United States Patent Application Publication US 2008/0220983 A1 - sequence listing, part 3

SEQ ID NO: 5206 - DNA, 3417 bp, Homo sapiens
tgaatgaggcatattctcctcccaccttgtacctcagccagcagaacatcgctgggacgtgcctggcctaaggcatcctaccaacagcaccatcaaggcacgttggagctttcttgccagaactgatctcttttggtgtgggaggacatggggtaccacctacacccaacaagtcaatgagggacttctttttaatttggtaggattttgactggttttgcaacaataggtctattattagagtcacctatgacaaaaaataggggttacctagataatgccaaagtcagcatttgtcctgggttcccttgtgtgatctgtttggactatgttttcttttcttctcccacttgctcagcagcttgggcttccattctagttcttttaccaagatttttgtgtgaccatgttgacttcatttggattgccctctttcaatttccttgtgaaaacacccttaactttctctttacccttagctgaaatgtttacatagcttctggtgatatcttttcatgattttatatctcttaaaatggtgatggatgtgacacctcataaaagtgagctttgaactgtagataactcttaaagaaaatgtcattttagacaattaaaatatttgtgctcaactgcttgaacttttttcgtgtatgtgtatttaattctatgcaatattatcacatgtgtagattcatgtgaccaccatcacaagagacagaacagttctgtcacatggatcccttgcactgcccttttacagccgcagccacatccctttcttataccctcaccccaacctgtggctaccactgttctgtcctccatctctgtaattttgtcatttcaagaatgttgtatgaatggaatcatacagaatgtaatcttacgaggctgatcttttttcattcagcataattcccttgaaatccatccaagttgttgcatgtatgaatagtttcttcctttttttcttttaaaaatgttttatatatttagggggtataagtacagatttcttacatgcatatattgcatcgtggtgaagtgggggcagttccttttgattgctgagtagtattccatggtatggatgtaccacagtttgcttaaccattcacccactaaaggacataagagttgttttcagttttttgccctaataaagctgctgtgaacattcatgtacaggtttttatgtgaacatacattttcattttctgggataaatgctcaaaagggcaactgttgggttgtatggtaaacacatatatttttgtaagaaactaccctactctttttccagagtggctctactttttacatacagccactcatacaattcagacagcaatgtatgattgatccagtttcttcacatcctcaccagcatttggtattactactattttttatcttaaccattcacatagatgtgtgtaatgataccacatgtggttttaatttgcatttccaatggctaatgatgttgagtatctttttgtgtgctaatttgccatctatgtatcctcttcggtgaaatgtcttcatgtcttttgtctattttctatttaggtcatttgttctttttactattgagttttgagaggttttttatatatcctagataaaattcctctgttagatatgtggttgcttgaatttttaacataacttctaccaaggaaaaataagtaaaatttccaacccttgcatggccagtcacttacttaattcctgtccttcagtgttccatctagagaattaagagatatgatgtataaaatagacatcgagggccattaagagagtaaatacttaaaaatacatgttatgaaagcaaagccaataatcactgtaggagtatgagttgcctaagggccaaaactaatgtaaataagagaaagtgtggatataaatgaccattgtttataaacagttatgaaaaatgctgtgacttgaaatctttcccacatctcccaagaaagtaggtaggagtttatcctttccgtaatctctttttaaccctgctgactattacagggcttgtttaatcacagtggcaagaattacatgtatcttacagtaaagaaacagaatactggaatcgttagagaaccctgatgtgttgacctggataaagtacaaaggtggaagagggaatgagttatgctgttaaaatctcaggctattctgttaatgttcctgctactatgaacccaaactttttttttcccccttttgactccttgtgtcttcctctcctgtggcataaaagtagttctgtcgttaacttgtacaacattgccatctgctgttgagaattggtaggtactgcttctgagaacctggctgcagatccttagcataggcagcaaatgttgagaaagtctatctgtagtattacatatactaagttacagaggatgcatccaagtagagaaaataatatgtgggttaagatacatccttaaacttttttttttttggggggggggggacggagtcttgctgcaacgcccaggctggagtgcaatggcactatctcagctcgctgcaaccttcacctcctgggttcaagcaattctcctgcctcagcctcctgagtagctgggaatataggtgcacaccaccatgcctggctaatttttgtattttcagtagaagcagagtttcaccatattggccaggttggtctcgaactcctgacctcaagtgatctgcctgcctcagcctcccaaagtgctgggattacacgcgtgagccaccacacccagcctccatctttaaacttttaaatgtgaaatttctatcatgtaccgttagcctaacaagattttctttcctatttctgactggtgcctttcccctttttaggagcaacgaaagctactctcttagttatgttcttgtgatgtgacaaaatgtcaagaagataggagaagagaatattttatttcgttgatgcttttgttcccaagtgtgaccctaaacttaagctttgtaggagttgacattctttcatgtcccttccctttactcatgccgaaactatcaactgggacattttgtgcttttggtttaaaagttaattgatattatactttggttttatctaaaaagtaaatgtatttgcctttgacaaaagactgacacaagagcaaataagctttaaaatcgggtgttatgtgctttcctccatttttgagcatattatccaaaatggtctgtataatataaatgagaatgatgcagtttaagtaagccttgttataccattgtcatggacccctgtcataaagccatttcttggtttgtttgggaaagaggcatatgggatttatacagattcacttgtaaatgttggattggggatttttgtgtaaattttctcaaataaaggctagcagaaaccat

SEQ ID NO: 5207 - DNA, 1767 bp, Homo sapiens
ggccagcattatcacctccaggactttctcgttttccaccttggccatcttcttccttcgtcgtctctcctctttaatttcttttctattccatcatctgcccttttattcacttttagcctctttttttaatttttaaaatttaaagatatgcatactgaaaagtatataacatgtacgtacaatttaaagaataattttaaagtgaatactacgtaactccatccaagtcaagaaattgccagcttctcggaagcccactgtgtctccttcccctacctgcaacctcttccaggctcccttttccagccttcccctttttcccttttattttcatgccttgatttgacttgtgtggtgggaacatgtgaactatgaaacttaaacctgctgcccacccagagcagctgtgaccaagggctgcctcaaggggttgtccacgcaggttgggctcctctctgctgctggacccaagactctgaaccttccaagggacaggcagttcttctaagaagggctcccctgtgtgtgagcaagaccacagctctccttctatctacagatgcatgagggttggaagagtctgggctgtttttagaccttctggtcagctgtatttgtgtaacaacttttgtaataaatagaaaaaccctctgctctgatcagttcttgtactttgacctctgctaagacaagagcatggctgcctcctctgagccctaggagaatcacagctttatgcctgattgaatacaccatagtgagtaggacagctcatgacacaggtcagcctggctgcctccggctccttactgtcatttgctcattcctcttgtattcttgaagtcaaatcttcttttttctcaccttcaagagtctgcgttcacaactaaacactaagtgccctttcttatttcctcctaaagaagaaacagattcttgagagagcagagacaaaaaaatagaactaggcagcatagatgaaacaactgcatgacatgggaagaagacaactaaaccccgaggagaatgcactggaatggacagttgctcttaaaccctacccagagggcctcccccagctggaccctcatacacagtgtgtgtatccaaaaggccattgctatttcagcaaatatttgttgagtacttctccatgccggacacttgggaaagagaaatgaacgacacaggcaatgcccctgccctgtgggccttatattatagtcaaggtaacagaatcaacaagccaacacaaaaataaagaacttcaaatagggataagaactctaacaaacacaaggtattttggtcaagaaggaatgtggggtgggcagtggggaacgtaacttaaattagatcatcagaaagtcctccctgaggagatgggatttttttgttttttagagacagggtttcactctgtcacccaggctggagtgcagtggcacaatcacacctcactgcagcctcaacttcctgggctcaagtgatcctcctgcatcagcttcccaagtagctgggactacaagtgtgtaccaccacatccagctaacatttttgggggtgggaagagatggggtcttactatgttgtccaggctaagaggtgggatttgagctgagacttgaatgcccaggagttaaatgtcttaagatatggagcaggccgttagaaaggagggagcagcaactggaaggtagaatagtcttattcaaggaataagaactatgtaatcacagcatggtgaagagttaggaagtgaaa

SEQ ID NO: 5208 - DNA, 1088 bp, Homo sapiens
gaccccacgtgcgacagagagaggggagagagaaccaccactgcctgactgcccgctcctcgggaaacacacaagcaacaaacctcactgagaggcctggagcccacaaccttcggctccgggcaaatggctgagatggaggtttccttttggaacatttctttcttgctggctctgagaatcacggtggtaaagaaagtgtgggtttggttagaggaaggctgaactcttcagaacacacagactttctgtgacgcagacagaggggatggggatagaggaaagggatggtaagttgagatgttgtgtggcaatgggatttgggctaccctaaagggagaaggaagggcagagaatggctgggtcagggccagactggaagacacttcagatctgaggttggatttgctcattgctgtaccacatctgctctagggaatctggattatgttatacaaggcaagcattttttttttttttttaaagacaggttacgaagacaaagtcccagaattgtatctcatactgtctgggattaagggcaaatctattacttttgcaaactgtcctctacatcaattaacatcgtgggtcactacagggagaaaatccaggtcatgcagttcctggcccatcaactgtattgggccttttggatatgctgaacgcagaagaaagggtggaaatcaaccctctcctgtctgccctctgggtccctcctctcacctctccctcgatcatatttccccttggacacttggttagacgccttccaggtcaggatgcacatttctggattgtggttccatgcagccttggggcattatgggttcttcccccacttcccctccaagaccctgtgttcatttggtgttcctggaagcaggtgctacaacatgtgaggcattcggggaagctgcacatgtgccacacagtgacttggccccagacgcatagactgaggtataaagacaagtatgaatattactctcaaaatctttgtataaataaatatttttggggcatcctggatgatttcatcttctggaatattgtttctagaacagtaaaagccttattctaaggtg

SEQ ID NO: 5209 - DNA, 1985 bp, Homo sapiens
cagggctcccaggggaagagagcttctcttccagaagagctcactggatcagagactgtggaaaaatcccatgcatctagaaacttagatccaagaaacttacatcccctcccttccccctcctcgttccctttttcccacggttagactttctccaggcctggctgcgttctctgcctgtggtccttgccccaccccagcctcttcctaatcctgtgccacacactcagtggccctgggagaggcagaaggggggctcccccttccttccatgtatccagcgctcccccttgatttttaattaccagggttatgggagttcttgatttcattggttatttgctttcaggccgtttcttgatgtaccttctgacctgaccttttccctgccttcaggacttctgggcccagccctcttgccaggcatgcatatgtgagatatgcatatcatgtatgtgtcctcttggggtgagacttctgcacagccatgcctgcctctgaccagtccacttttcatgttggggctgtaggcctggggcaggttcagagtctacccaagtacctatgtatgagcaggcagcagcagggcatggccccatctctccttttagcctctgtgtttcattaggcattcatcctgccaaccagggcaggcccggcgtctgggctctgggaacaaatggggcccacatcctggagtggcaaattttgggggatgcgctacctgtcccagctggccctgtgcctccaacccagagctccccacagacctggtgtaatttcacaagggccatccctttccccaggcttccctgagggaggcggaagtttgaacccttatgtggggttcattgggctagggtagtggtatgaggtttaaaactatttaaggattaggaggagaaagagtcttcaggaaactcttgtttcactggactctgcagcctgcagaactggggcaagggtaggagttccagtaggggaaggagcaggtagactcttcagctgcctcagctgggactgaagacctaagctgattctctttcctctccactcctaagaagcaattttctgttcctctccttccaccactttttactttctgctatctcccatctcccgcttcccttccatttcctttctagaaaaccctggtatttagctcaggccaaactgcctcagcagaaaggtggccttggacaaaactggtccaagaatttgaagtggcagtacttgcggattggctctgtccagcaaggcctcagctgcttgttgcgtctgctttccctcccctaacagaagggtaccctggcttattcaggggactccttagtccacactgtgtcacctgcatgccttaatctttcattgctggggtgtggccttgggagatcctgggccagcccctccacacatctccctaagtcagagtggctgctggccctggtagatttgacttgctcttgcctcactcgacctccaaagtgggactgaagacagtggtcaagagacttgagttcgggacagtaagccaggggttaaggttctttcctttttttgaaagccaaagacccagtttgcattgtgctgctgcattcatggttagaagctttccatgcctaggttctagggaatttatttttctatgtgtatatattttcaaactttgtttcctgggtactgggcatgtgcctgtctgagccccaggtctgtctacaccccaccattcattctgtctgtctgttccctggacactgcctaaaagggtctcaagacagtgccctgtgggttcctaggactagggcccatcactgttctcttctgctgggaaatgcagctttaaaatggctaaccacagcagagggcagatgcttgatagattatcttttccttgctttcttgtttctgttttgaaagtgaaatggggttttaaattgttatttaaactctttttccaaataaaggtttaccttttttccccccaa

SEQ ID NO: 5210 - DNA, 857 bp, Homo sapiens
accactgggcagccacctcctttgccctagaccagctcctctccaatcctgagggcccctcccccaacccaactcgaccctccctcccctcacccccaaggtgtagaattgtgaatataacgaaactgcaaaaagttagtcttatgtatagacattattttcgtcgtatgtttctatattttgaaacaaaggtatgtaacttcttcatttgaaggataagctggtttgtgttaagcagtatagtattggttgggtcatttgcatcatatcgttagcatttatttggtggcagaatgtttgcctaggtacagaattaatagcccttagcaacgactgctgctggtgtgtatttttgtaaatgttatgcactctctgaaaggaaaaacacacacaaaagaaaaagacttttttttttttttttttttttttgccaaggccagtgttgctgcctaaaaaaaaaaaaaaaaaaaaaaaaaaaaaaaaaaaatgctataaaatggtgaaagcttccttctaaactgccccaagtgttgaagtcttcactttattttgttgttttgttttgtttttctgttttgtttgcaaaatggtaagggggtgtcgggggggatggggtgtattttgttgcaagtttgtgaggggaaaatgttttggtttgtttctactgacctgaatgtgttggatctacacgtgttgttttgtttttgctttattgatgcacggatgcttttgaacagtagagcgaaatgctagacatggagaatctgctctgtttgtcctttatacatttctgtagttaacagaacactgtaatgtgccttggagcttagtaacttgtaataaattcaattgatatt

SEQ ID NO: 5211 - DNA, 2413 bp, Homo sapiens
tagacactcccgtcatttatctctctgtctctgtcttgactcctcctgagcataaaaccatggcagccttgtctccacccatgactcactacaaccttgtgctggtaaggtcctagcatcttcccctcaccttccacccatgagaacagcgtgagctggtggatcatgacaaggaggaaaaatgtccccccaggcatttctaggctcctcacgagccagccaggtggctgctagctgttaggctgcctctgctttctttccgtccccttgggatccctgctttccccctcttcctggctcatccattctccaccgtgtctcattcatcactgctgtctgctagagcccttcctctcagcccccatgttgggagaggggagtggattcttgctgctggtatgagactccctgggacctagaggctggcaaatgtttaaaatcaccacgtgtaagaggcagccaagtcagctctgccaactgctaggggagttgggaaagagtgggtgtgtgtccgcatcccctctgtaggaaaaagaacttagtagcttgctgctccctcaccaccccccaccaggttcaagaccctttttctgggagacagcaatcaatggcctgctttttccaaatgttattccctgtccaccctgccccatctggccggcccagcccagtccaggacctggctggatgcttcctgtccctggaactcttccagcctttctacttgatctccagcccccaggtctttgccagatgatgggaaggcaaggaagaagggacagggaaagataattactgataaatgaaggggatattcgactgtataaccatatggaagtgtgtgtgtgtgtgtgtgtgtgtgtgtgagagagagagagagagagatgggtggtggtgagaagtgttgttagaaacatataggaataatgcctaggggaaagggagaagtgagagggacaattgggttcatttatgccctatacaaagggcattccagcagctgaaactcttcaatgtttgaatggctgcctgtgaaggtagtgagtgccccatcactggaggtattccagcagagtctaggcagtcgtctgccaggcatgctgtggaagggatttctgtacagggtcattctaggtgagcttacacattccttccaaccccaaggttctgatgtcctggttgtgattgctggacccagaggcaagatctgcagagatgcctgtgagatatttgctttcctagaggggagtgtgggcatgggaggggtctgaaaatcaggacccaacccagccactgaagagagagtctctgcagagacagggctacctgggtggttgaggggactgacatttgaggacagggagatggagcagtgtcattgtcagtggcagggcatggggggcagtggtgagctaaggctgaggagtggagatgaccagaatataagggtgcaattcccagaccatccctgcgcatctgactgactccggtggaggcactgctgtgtgttttctgaaacctagaggaccagacctctggggcatataagggagtagggacaacacaagtgccccctcctgactgggtcccaaagccaatatgacatccatgcaggcagcagtgctgaatccatgccctgcaatgtccaaccgccaactgcagtgacccgctgatagctgcgcaacagcctgggttcttgagcagagattgggaggactttactgtggttctgccttcacaccccctagagagctaatgtagtattggctccacctgctcacatttctccctcccatactcattccttcactcatccatcctacgtatatttattgagtgccaactacgttcccagcctcttccaggcactggcaatgcagtgatgaacaggatgacaagattcatgccatcaggggcaccttgtcactgccgtctgtgcactgattcacactccctgcaaaatggtcactctgccatcttggtggttggtggggcaggtcatttggaaataaagaatgtgatagagatggctgaagaggggaagcctaggctgcctcaatggaggagtcgctgggggcattttcacccacaattctggccatacttaagcaatgggagggagagggaggaggggaagatctgggcaattttggccttgactctttcctggctccagagctcaagcttagaagccagccctgctatttccagcctcctgaaggctcagcacggtgaggcctgacatcctggggaagggcaacagggagacctacaggatgttggctgcttgcagactggtcaatgggggatgacggtggggaggttgccagatgtgagacttgagtagcatttgtacacatggccctgtattgtccttgaagaacatcaataaaatatatggttttaaattgga

SEQ ID NO: 5212 - DNA, 1045 bp, Homo sapiens
gaggcgaccccgcccggcagcccccatccatctgtgtctgtctgttggcctgtatctgttgtagcccaggctccccaagcttccctgcatcttggtccttgtccccttggccacactggagaggtgatggggcagggctgggtctcagtatcctagagtccagctgcagaaggagtggcttttcctccaggaaggggcttctgggtgtcccctcatccccagtagcctctttcttgcgtttctttttaccttttttggcactccctctgaccccgcgatgagtgttttggtggcagaggtgggatgagctggaaaggtatggaggtgggagaggatggggctcttctgtctgtcctgcttcttcaggtgagtgcaggccaaggcgggggtgagatggctgagcttccagcgccttctgtcctgcctgcccagtcccttcactgctttcctgccccaagatggcttgcttttcacaaataaagagaaagagcagctttagccttcttggtggaatcccaggcagtgggagcagaatcagaactgccagggaagggaagggggacctgggtctcaatgggtctcatttgagtctcgcgggctgtgcagatgccctgacagagtcggtttcctttggcggcattccctttccctcattcagcacttctgctgggaactccctgactattccgctgctgcaggaacccagctagctggccaggtggggaggggctggggaccggccaggaaggaggggtgacttcatcccagagagacccgagttcccccagcccttcatcaccaacccgctcctgcaggagtgagtcttacctcccctggccctcctttctggctcagcctgcagcgactgtgaggccacagctcctcagattcactgcccgctgtgtgccagtactcaggcagctggagagaagagaaggcagcagcagaggcccccgccctcaccccagccatctgcacttgtaccatttgctctgtgctgactgtggtcctataaattcatgagaaataaactggttctgtgtgc

SEQ ID NO: 5213 - DNA, 2418 bp, Homo sapiens
ggccactgcaaagattccagcctgggtccaggaacttcccaggagagccagctgggaagcagtactggaccatccggccatgaggaagctgcctaaggagcccgaagaattctgctgctcaccaggacccagctctgggagtgcagctggaatggaacccagcattggagagagccgggagagagccgcagctccgtccacagcaccacggagaggacagcgcctcttgggctgctccctcgtgcacagcgcaggggaggatgggtgccagagggtgggagtgggtgcgcgtgtgtgtatgtgagggcatgttgtccatatccctgtggaatacagaccgtgtaactggacagctgagtgtcataaactctaaaatagtccaggctatagtaatattttctggtatttttttctgttggatttctttggttttggtttgtaagatccatcaaaaattctcagacctctgagagggccttgagggcagagaatactgacctcaccttgggatgtcaccaaaggcagagcagatgggactgtcaaagttgtgctgccctccctcccacaaacaaatgaatccagcgtggaggaaggcgcgccgccccgagctggagggcctggctcccaccatgccccccagtggctgcaggtagctggacttcctgcctgtgacgcacagagagcagcggactccggagcgtcagcctgccttagcccttggttcctcgttttttgggattgtcacactgtgacactcgggaggaacgatgtcctatcctgggctgctcagtgttcccaggccctgtgtgccagaggccaggtctctccaagtgcatctagcctggcctggagggcaaggcagatgcattctcctggctgctgggagagcccatgggaaccttgcttagcgcccaaggtagatgagagacagggcagggaatctgcgtggtgctgggatgtggggactctggcctctccagactaatgttcctgtcacctgctgagctttcccagtgtcacttctgcagtcctcctctgctcacccctccctcactccgtgggcaattccctttctctctgtcactgcttcagcagtgaagacccatggcacctagaaatgcatgccagcttcctgcgtctaccactctgcagctcaaacaagaagctcagagctgccccttccacttcctccccaaaagggatgaagaaaaccctgtggtagaaccaaaccacccaaggccagcccttaagcctgcctccaccttcctggtgcatgacaaaatatttcttttgtctcagaggactttgatgcttcaatatttaatgatgaatccgccacactccattttccctcctctgaagctcccaacaactctgacagggtcagatctctttaaagcatcttcaggaggcggttgccacggagactggatattggtcccagggacaggctgtgctacctactgggtggtggggagggaagcttctggccatgcttgggcattcagaccaaccatcattaatgttaatagaggaaatgcagcaacgtcaaaagcaaggcaggttggttaattagatctggggcccgatgacctccctttcccactgctacagcccttttgacttcccccagcaggaagcgctgtctgtgcggctgagtctgggccacttgcttaattgcatttctggcagggaaggagaggagggatggagaagctctgctcgctgcttccacctcaccgtgtgtcctcccctcccctcccttcctctcctccccacaggcggaattgctttcttctgagccgggtgggctctcctgcagggagaatgcaggggtctgtgcttggctcttagcaaagcaggtggcccacagtgacctccaggaggtggctgattttcctttgtgccttcttatttctcagtaggaacttggaagggaagagctctgaaggagccagaggggcagccaccttgcatgagggtgaggaaggagaagcccagccagcctctacccatccctccctcccaattaggctgcactggggccgaacgcttccctgggctcccactgccttctaaggagccaaggagaattccctgcccactttctgttcctccatgcccaaactggcagatgcttctctgggagcaaggccacatgggctgatgcagctttgagtgctcaggttctgttttctggaagttgctggagaagggctgtcagggtgcttctatgaatatgggcttcagctgtagcacttggcagaaacgtgatgtgtcccacaaactgctggtggaggaagaagatgttcgtcagccaattcaacctccagccagcttcttgagcctatttggtttaaaaaaaaaaagtcttctaatcagaagccactgattttataataaataacacttgttttg

SEQ ID NO: 5214 - DNA, 941 bp, Homo sapiens
gtggcattgactaccttgaagcctgcctcatttcctcctctcctgcctgtgaaagcagagagagctcttctttgggagagctgcggcatcacatcgcttgggcccattacccatgggcagtgccagctactcttgacacagataacttcagactgatcttctgtccaaggaacatcatctgaggatcgagatctaaagctttgagtcatgagaatgattctctccacctggtgctcatatgaaggtgggagtgatttctagattgggcccctactgggtaagatctcacttggtctgagaaaagtgactgctccagaaaggaagaggtatgggagtcatagggtggctactgcattccactcagctaattatgatccaggacttggcgctggacattggcagttctgctctgaatgaagtcagaacagaaccaaaatggcctcaggaaggaatgccagtgtttcccaagacctcctggagatgcactcacaccagactgcacagacccctccacattatgccacacatggcctagacgttgtgtttcctcagccattttccctctgctgccccagtttactctgtccaaaaccctaaggttcttctctcacttgaacacagacgaccttgcttgggtgatgagacatcccctttatctcttcctctactgctggccaagacccgtcactttataagaagctcagatgcagcagtgctggagagctctctctttatgcaaaaatctcatttcaccaggagctttcagaagtttcacctgggctaaattcagcagcatttctgttaggatatttagatggaggttttattttcacacttggattcttgctctgtaccaatatttgcctccttttctgtgactgaactgggtttttctgacatgcctagactcctaataaaggtatttcttccttggtgccttc

SEQ ID NO: 5215 - DNA, 1689 bp, Homo sapiens
actgcaagagcgacttcctaatcaagtatctgagccagatgctgcgggacctgcccagctgcccgtgtgcctacccactggaggccatggacagccctgtgagcctacaggacgagcaccagggccgcagcttccggtggagggatgccagtggccctcgcgagcgcctggacatctaccagcccacggcgcgcttctgcctgcgttccatgctgtctggggagagcagcacactggccgcccagcactgctgctatgacgaggacagccggctgctgacccgtggcaagggcgccggcatgcccaacctcatcagcaccgacttctcacctaagctgcacttcaagttcgacacgacgccctggatcctgtgcaagggggactggagccgcctccacgctgtgctccctcccaacaacggccgagcctgcaccgacaaccccctggaggaggagtacctagcacagttgcaggaggccaaggagtactagtgacggggttgctgaacagacactgcagggagagggcaggcggctgctgctgttgcacgggagaactttcctcacccgcccctgcccagacagggtgaggaaagggctcccccagtgaggttggtccgaggctgtgtgccctctgccagcgaccccgaagcagatatctcagtggggttagtgagaaggttgaagggtatgtagggcccagggtgggtgtccctgggagccctggaaatgtgcatatgtgcatgtgtctgccggggcctccctctgctgcctgctgggaccctggccactcatttttctcctccttgggagctgggctcttctgccctggctctgcacataagtgttagccagcagctccagaaaaatcccgattcccgggatctgccacgagtcactcctactccaccctgatggccagcagaggaagggccactcttctcatgggcacagccatcctttgccggggggggcatccagcctgggtggccacccctccttatctctgggtggtgcacatgcccttctttccccactccctgccacgagccactgcacaggaggctatctgtagccccaagctgcctttctgttggacaccaactttagtcttgggctgcaagccagcccagctgaggcgaagtggactccaggcagggaatgggttgcccaattctggtccctttcctttgctcagccccctctgttctgctgattgtagggatgtgcagggctgggagttggcactccccccgagtggggaggtgacagcttgtcacagtagccaggcttgggtgggttcagcactagctcgggacggtgtgtcacacgtctatagtaaaccagttctctgggaggggaaaaaagccctgatttattgcatttgggcagcttctgtggtgtaaattctcccagcagtgtcccatgtcatgctgccagcatcactgaatgcactgaactcagagttgggaagagatgcacataatcgctctcccggcacacctcatgcctcttccctgcctccccattcccctggctgcacttccttgccttctatggggttgaaatattgaagtctcaactgtctctgttcacaagagccaccaaaagttaggggacttcagtcctagcccccagatggccgccctgaagctctctgggctcctcagcaataaagcactttattttc

SEQ ID NO: 5216 - DNA, 5355 bp, Homo sapiens
gcctttttggtgctccctcagaggaactctccctcacccaggacagcctgtggcctttgtgagccagttccaggaaccacacttctgtggccatctcacgtgaaagacattgcctcagctactgaaggtggccacctccactctaaatgacattttgtaaatagtaaaaaactgcttctaatccttcctttgctaaatctcacctttaaaaacgaaggtgactcactttgctttttcagtccattaaaaaaacattttattttgcaaccattctacttgtgaaatcacgctgaccctagcctgtctctggctaaccacacaggccattcccctctcccagcaccttgcagacttgggcccatcaagagctactgctggccctggctccgcagcctggatacttacctggccctcctccctagggagcaagtgccttccacttacttcccatccaggtctcagaggtctcaaggccaaccttggaatccttatttaaccattcaagtaatcaacggaagttttcaccctttaatcttaagtttagccttttaagaaaaacagtaagcgatgactgctgaaaggctcattgtgtaatctcccaagggtttggtcttattccattttcttctggtcaccagatgatttcttcctttaccatcaaatacttcttcataatggtcacagtctgaggatgtgcgcaaattctggttcttcccaagctctaaccgtaacacgtcccaccccctttttaaagcacttactgttttcagagcacccatatcccaccctggtgagaaggccactctcacatctgagtgttgggtacaaagctgctccgtagagtgatgtgcactcctggtgggtgaggggcaggggcagtggcagtgtgcaaagaattgattactccttgcagagcctgtggcttgcatttcctactgctttctacgtttgaaaattatgacagtctctggctaggtctgggtccagattaggatttaaactgataaaggaaactgttggtaaatcctctgctcagaaagcatttatcatgttcctatttaaggattaggtttattaatttaggcctcttagaagctaacccacttaaatattactcttctgaatgctagttctcttttattcttgatgtcctaagtcaattgaatctggcatctggggctagggtctgcctgtctacatattttttatttttttctgagaaattctgaacacatagatctctttcctaaactgacattttctattttgactgttttcatactataaccaggtaaagggacttctttcagagagctttatactgcctgaccaaagaacaaatctgaaaatcaccattttaaagttattttttcagttgaaccaaagtttaagtgaagaggacttttggcatattatacccaggatcagtttgtctttttgtatccatcaagtattacaggagaaggattgggaacagaatggaaaaacagtgtatgaaagtcatgttacaggccgagtgcggtggctcacacctgtaatcctagcactttgggaggctgaggcaggtggctcacttgaggtcaggaattcaagaccagcctggccaacatggtgaaaccccgtctctactaaaaagacaaaaaattagctgggcgtggtggcgggcacctataatcccacctacttggtaggctgaggcaggagaatcgcttgaacccaggaggcggaggttgcagtgagacgagattgtgccactgcactctagcctgggtgacagagcaaaactgtgtctcaaaaaaaaaagtcatgttacacatttaagtttttgaaattgctccttttatcggtaaagattctcaatccaaattctcctgggtgtgttgtcatcagctgtgatatgtttgtgcacattacgtatagcagaggatgtaagcaatattattgtttgtgaagttttgtttttaatgtcttgagtatgagttatgtttagtcactgtcagcatctgagaactttaataagcccttgagatattccaaagttttattttacttttttaaagaacagaaaaagatgaatgaaagaaccaaggagagatgcagagactatatttagcatgtataggttaaagtaagaaggaggttgtggtaactaaataggagtcctataaaatcaaatacattgtcaaccttttctgcacatctagtttcctaccatagaatcccactggaataccacatagcttttgcactgcagttactatttactaatgtaaacgtagggtttgtaaaagtcacaaacttataagcaatgaacttacctgctagtctttttattttggcttgcatgaagtcactgcaaattcaaatgtcagtaccggcatttaaaatatatctatatcactttgttggtacaaagttatttcaagataagtgtaattttgttacaagtttattttgaagagacaaatctcctgtgatctatgcaggacctctgtactttctaaagaacaaaatgttatgtagacattatacatggttggttgtctcttcttgaaactgtaatgtaaatctagggtccagtcatatcctaggtatcatcatttatccaagtacttggaggaatacaagtatatataaatacagtcattgagaataagtcgatttgaggcatacaagagtagtttcttacacagtttaacacggcctgattcaagactctgataggattcaaacagataccggttaaccatgactaccaaaactgatcatctgagtcgattgatagaggtgtgactagtccttagcactttttctcattcctctttttattcagcattgctgttacctatttcaggtttataagacctctttcagcagatcacatcagaagccaggaaatgcatagctaggagatgtcaaaagcccatatgaggagtggaccaagcagcagtggcggtttctcctcgcatctttttttttttaagctttaacttagcaggggcatggactttatagcactttttcaactttttgctttgctttggataagaaatccttacctttaaaaaaagcttctagtctccataacccccaaagtactgcttatttgtttgaagaatccagccatcgtagtgctttagtcactatcgtaaacattcatgatagggcaaggattttaaaacaggattcttgcttctgtagtcatcaaggtgaacagaagcatcctacacaaccactaagggctctatgtttgtgtcatgcctcttcaaacaccaaggagttgaacatgcttccagtgatttgtctccgtaatgccttcttcctttatttggcctttctttctttctgtaccttcaagttcttgatttttaaaattccaactctagagaaaaccaatatatggtggtgctgggctttgaagatagcatatcagacgccttggttctgtttgtacacttagccttacatttcaggaggaggcttttcattaggggcttaagctagctcctttggcttttaaaaaaaattttttttcaaatttcttcattacctaagggagcctgcatctaaatttctcaactagttcagcctagctgaattttctagtgtgttatacactttgcttccttcttattggtgaaaaccagggggatgagtggcttccatggagagatttcctgatttctcagggaggaaaaaagtgatgacatttaccactacttttatgtttttcccctttttccaaattgataaggatttctggttcctagtgatccgggattgggcaacagtgcagaactgccagtcatgccgtaggccgtgaagaaagaatgtgagtaactgttgttttgcaaggatttgtagggttatgggcagttgttgtttgaagcattgctatgacctaattcccaaggtatctttcctctcttggtgttctaggtaagccaatgagctttaatctctacttgctataaccgtgtgcttagaaaaagaggtgagagtagtggttttccttcaaactgtccacattcatgaagattatgaattgttaggacagccagggcaagatagaccctgtctctacaaaaatttttttctaaattaaccgggcatggtggtgcctgcctgtagtcccacctgtgtgggagaatcacttgagcctgggaggtcaaggctgcagtgagccatgattgcacccctgcactccagcctgggtgacagagtgagaccctggctcaataagagggggaaaaaaaattgttaggagctgggtgcggatgcagcctgcaatcccagctacttgagaggctgaggccggaggattgcttaaacccaagaatttgagcgtagcctgggcaacacagcaagaccccatctaagaaaaaaatgttttttaaatcagcttagcccaaaggggttgtgaatggggaggtataaaaagcaaagattattttttggctactaagccaagaacttacagggattttttttttcagtcccagaacctacagataccctgctacttgcttcacgtggatgctcagtgcccagcagccatcttaatacattaaaccagtttaaaaaataccttccatgtggagaaaaacatgtctttttctcgcctcaactttatccacatgaaatatgtgcccatggctgggcgcagtggctcacctgtaatcccaacactttgggaggctgaagcaggcagattgcttgaggccaggagttcgagaacagtctggccaacatggcgaaacctcatctctactaaaattacaaaaattagccgggcatggtggcacatgcctgtaatcccagctacgtcaggaggctgaggcacaggaattgcttgaacccaagaggcagaggatgcaatgagccaagatcacaccactgcactccagccttggcgacagagggagactctgtctcaaaaaaaaaaaaaaaaggtgtgcccaggcccctagccattgccatgtgcccagccagagagccaaattagagggctggcttccctatcacacagaataaatgctagtgctagccaatgatccctttgcttttaatgtatagaaaatactgttgttccttttgtcatttccagtgacatctgttttctaagcagctcttttctagggaggaaaccaaaggggctaggttaagaccctaatagaaatgttttttctaatctctggtgagtctggaagtgtcacattcacagtccacccttgggagtggcttggtggagctggggacaaggttttgtttactacatagtgcacatgataaatggccttaaactgtgattctttctggtaggataagttataataaactgaccctaaagaatgc

SEQ ID NO: 5217 - DNA, 1406 bp, Homo sapiens
gacttggagatcccatcctttttactcaggcacctgcttaccgtaaatgatcatgttattgtgtattgccgtggacttcagcacccagacaagccaaaaacagagacagggaagaactcattgttgatcacactgttgccttggaacccacgcagaagtaaactcagccactttgctcagagaagtgtttgacatggtctgttcctagttacatgttggctgtaatgtatgttgagaagtcagtccaaggaggtatgttcttccacaacagccttctcagcctctgctatttcctttgaggaaggtagaagtgagtttccatgtttgcagagtatttaaatacctcagattttattaatgagaaatacagtacccctccctccactccatctggtaatttatggtaaaattgtggttctgtgaaccagctattagtctcatcttcttaactccctcaggcatcatcaaattctttgatcttctcttccacctctctggctctcatggaagaatcctttacacatgaaaacaatggaactggaaaatcttgtcttttagaaaagaaattaatcacaactatctctcttgcctaaaagataaatataggtaaacccaaggaaaggggaatttagtttctctacatgtcatttcggtctccaaactccctgttggctttttaatgcaattttaattgttggaataaaaaagtcccaagggtgttttgttactgttttctccatgaataaactcacttgattttaaattaaagatctatatctgtctttggggtttagtctatctgggattaaggtttttttttctgtttttctttgctgtattgttcatgctattgaagccctctagctgtttctgccctacaccattctgctgtgccctaagtattctttgtggctgtctcacagaagagagaacatttcttaatattccagtcactgctgttattgtctgagggtaggcagcttggaaaaatgtaggcaacaccaagttttaatctttatacccccaacaatttgactgactatatcatggtccaggttactttacatttctctggacctcggtttcctcatcataaaatgaagatactgtagactaccatcttcctaaagggatattggtatttgaaagagaattaagtgctcctttctacaaacatgatgtgccaaaattgttttattataagggctctttgaaacatcctaacttccttgtgtggaggactggctggaagcccatttggtacctactgtttgcaatgcatgttattaagtttacatgtctcctctgtcctgctctgccccttttttaaattactggcattgaatattgagttcatatggtaatagcagggtttttaaatgaataaaaattatggatttatctct

SEQ ID NO: 5218 - DNA, 487 bp, Homo sapiens
gcacaggtctctccaaagtgaatgaactcttacccataaccctaatgatgcaagtcatatgggggaacactttgtaaatggtcaggataaaaaccaaatctgggtgccagatcccagcactactttttattactggagaaatgggggggatagaaaattctactttgaattatttagttttttttaaagagtgggttgtgtttgtgcttctcccacctttcagcatttatagaacatgctgccccacatacaaagtcaagaccacttacttttatgtgacactagtagtttggggttaatgttttgtgtaagaacagctgcatatgagtaaagttaccccaaccacagtgaggaggaagatgttcacatactggaactgtcctgccaaataaattttgcccctattgtgctctgttttaatttggagtgggcaaagtaacctcttgcttggtgcaactatttgtttcaaataaaaacatttagacaa

SEQ ID NO: 5219 - DNA, 5163 bp, Homo sapiens
aggtatgattataagagagcttattgttttaaaaagttatataaaggcaaggaaattaagaactgaatccatatttcaacagagccctattggcttactgaaagacaggagtttatctatcggaagaacatgaatctctaacagctccatacttctttcactactcaaatggcattgggctgagtaagtaaccatatcacctctcttcttagtaaaaagccctatgtgaaaagatcccaagatggagaggaagaaacgctaattcagcatgtgttcattctgcattgagaaggaactgatacatctgatgcatgctttgagaccagaagaaaagacttacctgaataattactacattagggaagctactgtctacgttaagataaagggtattgccttggctctatttggcatggatggagcccagttggaaaattcccaaatattacaacaagtccttgaacccaggccatgtggttagacgttggtgttaaggttagaccttatgttagagtcatttctgatgttccagcttctagccatgtagtgctctcagtcttcataccccagaaattattggtatatttgtagataccgagaatgatccctcagtctgagaggttagaatgatcatctgtaatctgagggttaatttctaggcaggtggagagagtggtaaaaaagaaatgaaattgacaagctaggaaagaggaggcagaaagatttggaaaattcacagagtttcacccttaagctgtagagagtgggtcacatttgttagccacggaaacatagaaacatacacaaggccagaaaaagaagaaggagctcaactaaaagtggcatagagaatacacatataaaaacaatatatttgtcatatgctcctagagaggagaaaggggtgattgaaagaaaaaaaaatacttaaatatttgtaattgtgaggggtttcttttggaaataattacttttgaaccatgtatgtggtatgtatattttcagtgggttaattataccccatgatacctattaaaggaaaaccagtgggtctggtggtgctggtcttttcctccccattcctacaatttctatgtggcccaagtcattcctaatcttggtctctatagcagtgttctctctgaatgctgagctgaagaaattatacgtacatacacacatacatacatacatacaaatatatgtatatatattctcagctgctgcgggaggtaggtaccatggccattcagcacagccttgatttcctcccaaagtaggtgagctatagtgaagaataggtgcaaacaaacaagcttacttccattgcaaaatagaagaagaggaagttagagataattctgatcaatcattttggaggctttgttataaggcaacccccggtatatcatggaatttccattgacatttgaatttggacttggatcttcccttggtcccattagctgaggtttagtaatctaaagtccctatagtatatgattataatgctattttaaaaaatatatatataaaatatttttttctttttaaaatagacactatagttttacccataagtaatatttaaagattatagctcccaaaagaatggaccaaccactttcgtatcataatttctttttggtaaatatgagactattatgaaatcatagtatatgattgtatttaaaggtacaatcaaaggatcttttgtccattccattaataactgaataaaaaataaataaaatggatagaaaaaaactaaagttgaaaatacattcttaaactagttgtctgaattgagaaaagagtgagaactaggtgtgcaagaaccaaacgtattttattttattttttaaatgggagcaacatatcagtcgtgtcaccagctggtatattgtgtaaatattaaagctccattgggactgatttttcatggcaacatcagctttctaatgttctaaattctataaaaaccacccacaaagaaacaaagcaaatttcattatctaatgagttgctggaaaatcatattgagaataattatttcagattcctcagttgttaacttctacattcaaggcttatctctgcccccattgatttttaacctcaaaatggtgttgagatttacgtggaaccctaaagcagtaaaataaaaaacctggttgcagcacattcacactgttgtccttaaaattccccttttttctctatgtacgataaagtaacagtatgtcagataagccggtggggggatgagattaggctgaggcagtgctagtcaactggggaaaaggatgatggaaaaatcacccagttgtgctatatttttaaagaaggaggtcgtttatgtgtgcagacaattctccctgaggttagcccaatggagaaatgaagcagaggaaggaaacatagaaagacatgggctatcagggaggaagatgttcaatagaacatgcaagaatttctggaagaaaggctgtggaagggccaatggagaaaatgaatggacaaagctcaggaatcctacgctatgtagaatgtcttggtgttatcagggttaagcctgtaattatgtaacctatttatcgcaacatgaatttttatgatttcttgtgatgtattcttttatgaaattaacaagaactcattattttgaggtagaggaaaatcaatgctttatctgatatgctgagaaattattagattgccaatactcatgtgcgtttcatgtgttttataaggtttgttcctttgaagaattgtagttcttagtcccacagggaaatgtgtatctatttatatatcatagtataaatctatgatatatttatatcatatataaaagtctgagttctctttcttagtccctaatcatgtttctcccataggctgtgtttacatggagctatcggtttagccttttaagcttcattagcttgtctattattgaaatagtttccaagaaattttagatattatcataacatctgggtctactcaaacacttattgtttgaaagacttatgtcttggacctatcaaaaactgactttatttattgcttagtgaaaatactagtgggatcaacaatgattttcttgaatgggcatgaatggagatgcccgcacagtaatgtagaaatgtttcatacagctattaaaatgtaactgacctccttagaggcagattagtaactgttcctactttgtatagctaagtgacagtcacttaacttacatgactttcttttttcacattgggtctctggtcctgtgtcttcacctcatttatagcacgtctccttgatttttggtagtatcaacttcccagtgatctgttcagttaagttcttctcccgttaaccaggaagtgcttattctctcatcacagtgggaagaatagcctattgtctttcattttgcctgagtgtattttactatttgggctctgaaataaaaattatgaaatatggtgaggtcacatgttggtgctgccttgctgcataaaattctagagggcaggttagagacagtatgtatgccttcgggaaaattcaaaggtggattacaaggtgtcctcagcatgccctatggcctatgtgcgaagcaagaagaattgactgatttacaggacttctctttatgtcaatcttaagaggatggatgaatctggacatttgttccacccgacctctgactgatggtttggaaaataactttaattaggatcatatgaccattgaaaaaggaaaaatgtagactctgacttccgtcccactgaaggattaatgaaaacctttactagcatttagagcttttcagaacatccccactgtcatgtgtctcagcagtggagactgcaagtaaggcttttaattttaggaggtttttttttttttttttttttccctaaatggtatggccaaaagtcagagttaaaatatatatagttagattccaacttcctccttcactctaaaaatagaatccaaacccactcttcatatatgcttccagaatggggcttaagtaccaatctctgctttgcaatgggcacaatcttggtcatgtcctgaggctctctaagaaaagagaggatctaggatgggagagctagaaagttgctaactgggaagaacaaggccctgagggcttggtctaccaatctgggaagatttgaaaacaaacttctcgcaactgaaggaaggctgaaggctgctgcaagtcattgagtgactttaggatgagcaaaacattgggccacttcctaatgccctatgtgtatagtaccagaagcaaggtctcagacttaacagacccagctctgttccaaggtgagtctgaaccaatagaaagcaaacatgtgcagatatccaaacaagactgctcatgcaagtcggggctggctacccgtcttaggcagcaacagcagagctccagggagcttattcaatatttactgagacttcgaagacccagcagatgtttaatgaagtcactattttggctcaaaccctccacttctccccctcccctcaaaaagccaacaggtaaacacataaatgaaagaaacccacagaaggggatgggaaataaagaaaattctctcaagacttctccaggcccatgtcactggtcagcgtggtttttatgtgtattaggattgggggatgtgaagaaataagtatccagtactttataaccaaagcaattaaatgatattgggtagggaatgttggccagttttgtttagttttgcatcacattgtcaccagactcactagcccaagtaatcgggcgcccgaagagggagacagagatgtgcagagttgaccagtgtgcggatgataactactgacgaaagagtcatcgactcagttagtggttggatgtagtcacattagtttgcctctccccatctttgtctccctggcaaggagaatatgcgggacatgatgctaagagtcctgggtaaatgtggtgagaatgcacgcgtgcatatgctacacatatgtgcttctcagttgcagaaaatgaactgctttgggagattatcagtagaaagagtgttatcatattggtgctgagtgctatgtgtgcttatacaatttgttcttgtattttaataaactttgaataaaagaataaagcta

SEQ ID NO: 5220 - DNA, 998 bp, Homo sapiens
aaaagcaaatgtaatttgttattttacatgagtatgttacaaataataacatctctattcttacagcaatttggcccagattatctaacagacatacctgcagctttggctctttggtattgccaaacattgacaaaagtgacaatactgttggtccttgtgaatggtaaaccaatccaaataatatcagatcatgaatgatgtgcagctaatttatttgcaacttatactagcacagaaagaatgatattttttcactttgtattttcctttttcaagtgtggtcagtcacattttcccaaccaaaatttggatttctaattgaggccttttaaaaattactggctaaaaagaaggaaaatgagtttcccttgaggcaaaagttgccagcactttagattcagggagcatttatatacaactgattttttgaaaaattttctccctaataaattatcatgtgttataacatgtggagatgtgcatatataacattagacagtccactttataaatgctcaggacttttatatctatcatcttaacagtccacaactgcataccgtagctgaaaattatttccaatcatccatttttaatagcaataaagaattcataaatgatatctgaactgtagagcactgtaaagaattcatagcacaatttatttatttgtctttttgtggccaaatatcctactgtgatcacttcagtcatatcctggaccgtctttggtttactgtgactaaaatcatagcaccaaactcctttgtccatgagatttatatataatcttgtataatttggtcctatctgcttctaccatcccaacttttttcatcaaagtgtctaagaacgtattccctttacacgctgatctcctagtggagaaggatttatattaaatgctaagtaatagtaaactttcaggaactgaatcctattgggtcatggattctgcatagacaagggcaataaagcaatacctttgtaatatg

SEQ ID NO: 5221 - DNA, 173 bp, Homo sapiens
agagttgctttttttcttttataaataaaagaaacttaaaaaaaatgtaaagcggacagtttgaaacttggggcatatgccaaccaaaacttcgtttctgcatgtcagaaaagtgcagtagaagcaaagctactggaacaaagatagaccttgacaacatagacactacttac

SEQ ID NO: 5222 - DNA, 5423 bp, Homo sapiens
taggcactgggtccagccttgatcagtgacagcgaaggaagttatctgctgggaacacttgcatttgatttaggaccttggatcagtggtcacctcccagaagaggcacggcacaaggaagcattgaattcctaaagctgcttagaatctgatgcctttattttcagggataagtaactcttacctaaactgagctgaatgtttgtttcagtgccatatggaataacaactttcagtggcttttttttttcttttctggaaacatatgtgagacactcagagtaatgtctactgtatccagctatctttcttggatccttttggtcattatttcagtgtgcataagttcttaatgtcaaccatctttaaggtattgtgcatcgacactaaaaactgatcagtgtaaaaaggaaaacccagttgcaagtttaaacgtgttcgaaagtctgaaaatagaacttgccttttaagttaaaaaaaaaaaaagctatcttgaaaatgttttggaactgcgataactgagaaactcttaccagtccacatgcaattagacatattcagcatatttgttattttaaaagggagggttgggaggtttcttattggtgattgtcacacggtataccatactcctctccttcaaagaatgaaaggccttgttaaggagttttttgtgagctttacttctttggaatggaatatacttatgcaaaaccttgtgaactgactccttgcactaacgcgagtttgccccacctactctgtaatttgcttgtttgttttgaatatacagagccttgatccagaagccagaggatggactaagtgggagaaattagaaaacaaaacgaactctggttggggtactacgatcacagacacagacatacttttcctaaagttgaagcatttgttcccaggatttattttactttgcatttctttttgcacaaagaacacatcaccttcctgaattctttaaatatgaaatatcattgccagggtatggcttacagtgactactattataatactaaaactcagagaatcaaagatggattaaactcagtggttgatgaaagccaaaacctgtttgtactgttctatactattcaggtatctttttatttctgatagttttatattataatagaaagccagccactgcttagctatcatagtcaccattttctcactgttaacattaggaaaatcaaggctactatgcttcaggattgtctggttaaatagtatgggaaaaaaactgaagagtttcacataattacacacgtgaaataattaaagcttaaactgaatttgtatttcattttattgtcagatggtggtgttcaccagcctgtatcttgtctgagactgcattcgtatctgagcaggttttctatgcctactgatgtcagtatgtttatactaaccttcatgcttttttcccagaatccctcatctgccagaaaacttgaaaagtttattgcttgtagagttgtactgctttgatttttgaagttggggtagtagttagaactagatttaactagtctataatgaacatgaaggcttttatatatgaagttgtatacctttttgtgtttagagaattatgggaaacctggtaagcaaaactttcctcccagataattgcttccaaattcgaagagttagtcaccaagagagccatatgtatgaaagcgtatctgtgaaaggtaggaaacttaccccccctaagtgtaatgttgctttaggcaactcttgtaaatagtgagacttgtttggtctcttacatgtagagatttgagtgcagttggtacagtactttggtgtctccaccactgtcccttctccccgcttcaaaataagtgtaatccacggtagcagccacacttcctttagaaggaactgttataatttatttaaaagttgaaaaaccacccaagatgactaccaactttcacttttttcttctgccatccaccctcatttttcctttagcaagatttttatatctaactttccttccctccattgagtacgtgctttgagaaaacatttcttaaaacagtgtgtgccacctaaggctggatgggaaagtgcagtcttgttgttcatataaaaacacacttcttattagtttaccacttgcctttttctattgttaatgttctgaatttccttttcttggcttgtttctacttcattttaccctgggtcacttgctgccagcagtttgtgaatggtgtctttcaaataacttagttcttatggcttcacttaaagactgtctcaaaaatactttgctctcttcttcttttttgttcatgggacatggtacctaagcaaataggagttgggtttggtttttctcctaaaataatgctcaatacttacctaatcaaatggcatccatttgaataaaatgacaataactaaagctagttaatgtcagtgacattaaactaactccaggattcaggagttttaatgttagaatttagatttaacagatagagtgtggcttcatttgtccatggtagcccatctctcctaagaccttttctagtctgtcttcctgccttcgaacttgatgacagtaaaaccctgtttagtattctcttgtgcatttggtttgttggttagccgactgtcttgaaactattcattttgcttctagttttattttacagaggtagcattggtgggtttttttttttttttctgtctctgtgtttgaagtttcagtttctgttttctaggtaaggcttatttttgattagcagtcaatggcaaagaaaaagtaaatcaaagatgacttcttttcaaaatgtattgtttagcacttaactcagatgaatttataaattattaatcttgatactaaggatttgttacttttttgcatattaggttaatttttaccttacatgtgagagtcttaccactaagccattctgtctctgtactgttgggaagttttggaaacccctgccagtgatctggtgatgatctgatgatttatttaaagagccgttgatgcctccaggaaacttaagtattttattaatatatatataggaatttttttttattttgctttgtctttctctcccttcttttatcctcatgttcattcttcaaaccagtgttttggaagtatgcatgcaggcctataaatgaaaaacacaattctttatgtgtatagcatgtgtattaatgtctaactacatacgcaaaaacttcctttacagaggttcggactaacatttcacatgcacatttcaaaacaagatgtgtcatgaaaacagcccctttacctgccaagacaagcagggctatatttcagtgacagctgatatttgttttgaaagtgaatctcataatatatatatgtattacacattattatgactagaagtatgtaagaaatgatcagaacaaaagaaaatttctattttcatgcaaatatttttcatcagtcatcactctcaaatataaattaaaatataacactcctgaatgcctgaggcacgatctggattttaaatgtgtggtattcattgaaaagaagctctccacccacttggtatttcaagaaaatttaaaacgatcccaaggaaagatgatttgtatgttaaagtgactgcacaagtaaaagtccaatgttgtgtgcatgaaaaggattccttggttatgtgcagggaatcatctcacatgctgtttttcctatttggtttgagaaacaggctgacactattctctttgattagaaaataaactcataaaactcataatgttgatataatcaagatgtaaccactataaatatgtagaagaggaagttttaaaagaccttaagctggcattgtgaaggaacaccatggtagactctttttgtaaatgtattttgtatttaatgaaatgcagtataaaggttggtgaagtgtaatataattgtgtaaacaaatcctgttaatagagagatgtacagaatcgttttgtactgtatcttgaaacttgtgaaataaagattccacctctggttatcctgtatgctgtaatataccacaaccaagcacctttccagacagactttttttaagctgaatgattcaattttttaatgttttttggaaattcagaagcttctgaaaacattcacttgtggcaatttgaatttatctttcattttaaactcctgaaattcagatttttacaagtccaatattgccctagggagaacatgaatttgctaagaaatgttatcttttaaatctctgatatctttgtcttgaagcagccttgatatgtagtaagcgtgattcactttagcctgattataatattatttatctaaagtttgtttatgcattgccttgtcccaggaattttttaagaggacttgcagagacacgtaccacacagtaacatttagactaaatatgctctgagtaaaggagaaatgaaaaaatattaaatcaagagtgaacatgtacacaaagtgcaattggaagtgggctacaaatttggcccccagcttcccagcaggcaactcaaagaggtaactgaggtaaaatgttccagctcagaagcattggatcttggataaaaagcctacatgatgcaaactgtggcaactgagatgtcagatctcaagatctcaaattgtacttgtgggagcacagtcagtgaccccagatgaccttgactgacctaaaagttgtgggggaagtcggatgtcagagccttaacaccagcaggtgaccatccaacctggggcaatgcctgcctgttcaccacttagcctctttctggcaagtcattagaatgtcctccatcttcattggctgcaacttgatgagctacagcctctttcctaacttcctttatgatgctagtttaggttggttataccagcttggaagtatgcttagattaagttacagcagatacacaaattagatgcaagtaaaaaaaatcagaatttctgtagtagaaactacgaaaaataaaaaggaaagtttttactttttgggtatttttttacgaataagaaaaagtgagcgttaatcagttcaaaaggaggtactgctgtgtaatgggctttgtacgttccttctcatgtcacttacgtcactacttcgccatcaaattgaacaagcttttaattagatcctgaaaattcactatgctagtagtttattggtagtattatattttgagtagaactctgattttccctagaggccaaattctttttatctgggttaatttcttttaaacataacaatgttaatgctgaattgtatattaaatcccatttctaaaaaccacacaattttttctcatgtaagttgagtggaatgtggttagttaactgaatttggaatgttcatataaataatttgttgctgctc

SEQ ID NO: 5223 - DNA, 1718 bp, Homo sapiens
tacttaacagggcatcatagaatactctggattttcttcccttctttttggttttggttcagagccaattcttgtttcattggaacagtatatgaggcttttgagactaaaaataatgaagagtaaaaggggagagaaatttatttttaatttaccctgtggaagattttattagaattaattccaaggggaaaactggtgaatctttaacattacctggtgtgttccctaacattcaaactgtgcattggccatacccttaggagtggtttgagtagtacagacctcgaagccttgctgctaacactgaggtagctctcttcatcttatttgcaagcggtcctgtagatggcagtaacttgatcatcactgagatgtatttatgcatgctgaccgtgtgtccaagtgagccagtgtcttcatcacaagatgatgctgccataatagaaagctgaagaacactagaagtagctttttgaaaaccacttcaacctgttatgctttatgctctaaaaagtatttttttattttcctttttaagatgatacttttgaaatgcaggatatgatgagtgggatgattttaaaaatgcctctttaataaactacctctaacactatttctgcagtaatagatattagcagattaattgggttatttgcattatttaatttttttgattccaagttttggtcttgtaaccactataactctctgtgaacgtttttccaggtggctggaagaaggaagaaaacctgatatagccaatgctgttgtagtcgtttcctcagcctcatctcactgtgctgtggtctgtcctcacatgtgcactggtaacagactcacacagctgatgaatgcttttctctccttatgtgtggaaggaggggagcacttagacatttgctaactcccagaattggatcatctcctaagatgtacttactttttaaagtccaaatatgtttatatttaaatatacgtgagcgtgttcatcatgttgtatgatttatactaagcattaatgtggctctatgtagcaaatcagttattcatgtaggtaaagtaaatctagaattatttataagaattactcattgaactaattctactatttaggaatttgtaagagtctaacataggcttagctacagtgaagttttgcattgcttttgaagacaagaagataagtgctagaataaataagattacagagaaaattttttgttaaaaccaagtgatttccagctgatgtatctaatattttttaaaacgaacattatagaggtgtaatttatttacaataaaatgttcctactttaaatatacaattcagtgagttttgataaattgatatacccatgtaaccaacactccagtcaagcttcagaatatttccatcaccccagaaggttctcttgtatacctgctcagtcagttcctttcactcccaattgttggcagccattgataggaattctatcactataggttagttttctttgttccagaacatcatgaaagcggcgtcatgtactgtgtattcttatgaatggtttctttccatcagcataatgatttgagatttgtccatgttgtgtgattcagtggtttgttccttcttatttctgaagagttttccattgtatgaatataccacaatttgtttcctccccaccagtttctgatactacaattaaaactgtctacatttacaa

SEQ ID NO: 5224 - DNA, 626 bp, Homo sapiens
atgtgaaggacattggtcttggactgagcgttgtgtgtgtgtgtgtgtgtgtttttaatattcacactgagacatgtgccttaaacagactttttagtccaaaattacatagcattgaagaatatatttcactgtgccataaacaactgaaagcttgctctgccaaaaggaatcagagaacaagaacttcatttcagatagcaaacgcaggacacaccaagagtgtccgtgcacgtagccggttctggccgtacatgttaagggcatttcagtggcagtgctgtacccctgggcagtgctacctgggcacacacgtagacaagggcagctattccttagaccagcctcctgaaagaaacaggtgtgtctttttagtggagtcgtagtaatatgtgcacacacagaaggggacctgattgggtgggagctggttatgtgtaactagcgttggagttgacattttggcatgtgctctgagcttgaattttgataccaaccattcagtgcatcatacctagtctttctatgctccaaatgaatgtctgtggggacctgagagcacctggaatttgttggaagcagatcagagcacacgtacgaaaaggtgcaattgcttttctcatgac

SEQ ID NO: 5225 - DNA, 2359 bp, Homo sapiens
gctcccacaatttcttacggggccagtcatgtgaagcgtttacagcttaaaaaaaaagcgcttgcctaactcatactttcccgttgacacttgatccacgcagcgtggcactgggacgtaagtggcgcagtctgaatggcggcacgctgaaggaaacgtgcgaagcacaggctgaagaggggtttctaacctgggaaaggtgctcaaggaggacttggtttcaagggccttgccctgccccggtctgtccggtttgcagtacttgcacacattttggagattgtattttctagacaattctctattttactgaagctatgctgggcaattctggcaatcattaaagtgcatagatttctatcttaaactaatttttgataatggagtttttattttatgacaaatatttagggatttttctagtgagaaacaactttgtgtaaggatgatccacagatatgagttgctcctatataactttgtatttaaaaatcatgttattatcttttgttattttttaaaaaccttgggtacttaataatggtttagttgccaaactgaaaactatactgagaatctgtgttattttgaaacatcaaaaggatttttctatccagaacattttttatcctaaaaattctatatagttgtaccttctgtttttcaaatgagagctcaattcatttagatactgaaatgagtcagttaatgtaaagttgaggatgaaggcacattatttaaaatgtaagagaataagcattattttttcagtattattcatagatctaaatgaatttgattttattggttgaaaatgaagtgaaaaacaattgcctagggtggttttaagcacttttttgttaaaaacaaatctgagttttaatatatgtgttgctttgtagatgacacaataacaatgggcgctgagaagcgttttgggagagattaaggactaagagtatgtaagatgactaggacaagagtaggtggagtgtgatggtaaatgcaggatgccttcgtctttacaaaaatgcagtattatctatactcagactgaggtgctgggatggcgagcaggggaccccacagcactgtccccagggaattcaagtcctgtgaccgccagtgacttactccgtttccttggggcttttcccacctcaacctgtattgtttctttttcataaataaattcagcattatagtatcattaaaagaagccttaaagaggcgtatttttccttttggttgaaggaagggaatagttaataatagttttcacctcttctcccaaaaagtacagtccaaatttgtgcacagagattgctgtggtattcaagaggtacttgcattttagctccttaataattccctggccagtgttagctgtttagtgccccctcacccatcccatttaggcacatcccaatagacagagccaggctgagttacagggggagagtgtcatctctggccccgattaagatggccttgtcacagtgaccgctgagtaggcatggatgagtgggatatttagctgaggaaccctttcccttttccttctttttggggtctcttcttacagtgaacttccaaaatgtcaaatctagggctgtttcccaaattacactattctaggcatcattttgattcccatgtcactccttaactcacttccttgagcactacatgtatgttgtcagccacgagacaggacttcctaaatagtgtgtgcaccagcctaactctgccttacccagaaaccaaccacctaagaggaaaactcagaagatattaatgaaaactaattgaaagtacgcacacttctcatgtaggaacaaaattaaaattttacatttttattttacaaaattaaaaaattacattttgtaggaacaaaatgtaaattttgtaaatacaaaattctttttaaagtcctgtttaaagaacagtagaactaagtgaaaatattcagaacgagctccttagaagaaaggaataagaactttttactggaactattttccatctctagaaaaagtgcttcttcccctccccctccctctccatggtacgtttttgtgaaaatgcttttctgtcaggtttaaacaaacagtttgacatagctcgttgacaagaacatattgtaaaacaaatctaattaaagagtaatatgtggtctatttgtgttcctgttgtaataatttgataagtaaacttctgagggcaaaattactgtttaatattactcttaaaatgttgcatgtttggcgtcattcctaagagccatgtaattttaaacttttaattgcagttagtgaatatgaaaggatttctgaataaaaatctatccacatta

SEQ ID NO: 5226 - DNA, 958 bp, Homo sapiens
gagatgctgagatgactacagaaattaactttgagaccagaattacagagaagaaaaaccaaaacccaaccctgcatggtcaagtggtgctaacccaagactgtaacagggagaaatgcccagaatcatcaaaatagtgaaagactgatctgttcaaaatatttgctatatgcactgggtataatccgtaatccatacactgccagataatgccatttcaaggaaggatcgaatacttgatggtaaaggccaagtccccctgtattgggaagtgtgtgatttcggcagacctgctgggaaaatttagggtagagcactctttacagaagaactcaaaaacccaatttggataattttcattatctttttagcaaaatggtttcttaatgtttatattttattttcaaggttcattgtttaatgaaatattttattcttgcatttccataaggaaagggaaagtcatgatcatcctaaaggatcacagtttttaaaaggcaaacattttccctaaggaaacagacacaagctttcctagagaatatgatgttttttaggcattaataaggtccttttttataaaggacacttttctcctagtagttttgaattcaggaacagatccaaagttagcagtatatggctgctacatttccattttcattttcgagccatcagtttatgttcagatgccatctctgtaatcgcacatttaaaacataactgtagcctcactaatggaaaagtagtatgatgaacaatcattcccaatggtgtacaatgtaagggttttagggagcaacagtatttaactggaagaaagaattgcatatttaatgtagtctaatatatacacatttgtttaacatgtaaacaaaagtgttaaattcacatatacaacattatacaatttaatcactcttggaataaaatttttatagccttttttctattggga

SEQ ID NO: 5227 - DNA, 6242 bp, Homo sapiens
aaacaagtcactgatttgttttgaacttacgaccatttggtttcagcatgtcaggagatttctaatgatttgtggcaatatcagcaattttttttcttttttcttgtttttggtttggttttctttcttttcttttccttttattttgttttaatttgccccctcttctttgttttggacccttaagaattttatttttaaaggagattgaagccatagaactcatattgacactcagctgttttacaaaagcttttcattatctgaagacaaaaccgaaaaagccaaaattaccattgcttcctccagcttgtcagaaacctgtggctgaatccgcagggatgtcaacgtcaatatcacaggaacacacattcggcacctagaaggcacgtgggcaaagtaatcatcgttcaggcccaacccttaggtttaaaaagtcaggttgtccatcccattgggttcactgagtgaaggcacataaagcaattgaggaggaggaggaacccctcgtccccctaggagcagacccaagcttgtggcaccaggcatctgatggtgccaggaaagccactggaattgtcacacggcgagcacagagggccggccaccagtcctcgatgcttctgaaccctgaagcccgatgacatcttacgaggtggacgttggactgttcatgcgcatcgggtgtcagtgactcatggagaagaaatggggtaaatttttagtgatgttgctaatcattgaattctgttctctattaaattaagaaaatgttccaaaagccataagcctgaagattggccctgtgcacgcacgcacacacacacacacacacacacacacacacacacacacacgaaggagagagagagaaaactgatggggaaaacaagctgtgtcttcttaactgcccaagtgaaaagcaaccaagtccaggaaattacaatagctgttaaggaaaggaaataatggtacagatctttttctgtctatcaaaactatttgatccaagtgaaaaaaaaaaaaaaactagaaagctacggaacctgccattagtattgtggtgtatttttaagattaaaggtacactgatggacaaaaaaaaaaagtaaaacatggcaaaaaataaaataactcctatactgccctcaaaatggagtttgcaattaatatcaggatttatctttgcaaaaatcagtgatttccacattcagccagtatagccagcagaaatttctgatccacaatgcatggattcctttgaagaaaaaaaagaaaaagagaaaaaaatcacaaaaacaaactttttttattcaaaagtaacaaagttcttgtaaggtaaataatgtatttagcatgaagcatgaattattttcatataaatatagaaaatagagaaaaggctatgcctgtaatttttaagcccttaggcttagagtttcttttggttttcttcttttttctttccttttctttgctttctttttttcctttttgtttttgtttttgttttttgtttttgtttttttttcgggttattttgttttggttttttgaagcaggtgtttaaggtttaaccttcttcagggacaaattctgactgttggggaacttactctgcaatataaaaatatcttcatgctctggtagggcttggatggttgaactctgtactgccttgtgtgcacttcagccccgaccccctctgattctctgttgaaaagtgtgtcctttctctctgtctgtacatgtttaacatgacgcaataatttgagggcaaacttagtagtgagtgtgtatgatagaatcaagagaattatgggacgcttacttgagaaaatcattaccatgatttggttctaggaaaaaggcagtgaataattatgcaaattagccagaagaaggggaaccgtgctaatgggccttattgggtgaggggacgagatggggttcatgtgaaggaggaagcgatgccgaggtaggaaaggccagccccagacatcctatcgccacaatgccatgtcgcaataggaagcaggggccggccatcgctaccttcagcacactgaccaacctggaattaagaccacctagattgcgagagctgaatttagaaaccagacaacgtcatgcagcccagaaactcctgttgttacctttgcctaagaaattttctttaatggcgggggcggggggcgggggtacaaagagaaatctctaaaagaatatgatcttccatccaagtggagggaaactttaaaacaaaaacacccagtactgtggctcaggatatgatgcgtgaggagagggagggaacagagatgaccttaacttttaaaaaagggactgctgtgggccaaagccaagcccatctgccaggacgaggtaatgtcagagctccatcagcccggacagtgggaactaactggtgcattccccacacttaccttccggtgggttgctgatgagagaacctgaaaaaacctacacctctacagcaggtcgaattcatgacctgaagctgaatacttccagcatatttattcagggtgtaggtgggaataaagtatcttcgcagtgctctgttccctccgtctccccagacatctgacaccctaaaagccatccacagctatggaacctgagcgacaccttgatttgtgttgtcacctgaccaagcctaaagacctccagctcagtcccccaccttcatcccaccccacagatgataaaattcagacctctctcctgaaaggcagaggttcaacattcaggactgtttctggccgaggacttcttccaattaaaacccccaccgtgggctgtctcccctcatttcatttttctaaaggggcagaggcctcttttagaaaataataaaatgcaatgtgtgtgatttacttttctgatctctttgagaaatagagaaatataaaagtgtgttcttaactccagaaccactctttttgcataaatacctcatcgggcagctttctaagtgtgattttcctgagtctcccttcgttggatctgccggaagacttgtcggggaacctttagtgagggtacttcttcctatttttcttctgtttttggaggcatacacattatgcataaccaaaacaatggctcaattgtgtttaactttgtattttgattgttgagaacaaaaacaaaaagtatcaatgtgtatgtggctgtttgtagtgaatttattggagaatgaggttgtccgtgtccttaacaagccaaggggcaggaggcaccctctcttatcccctcctccaagagcagtagagaatttaagcacaagcctatttgtgaaagaatattttgcttaagtgtcattcactttagtcttggaattccttcccaaacgtcaggtgttcttttagcttccaaactagcatatgtatccattagtctgacagatcgcctgaacaccattaagaggtgtggcgtttttgctttcatttctcctgctgggagaagtggcggttcatgtgtcattccagtatctcacatactcacacggggcaggggggagggggaaacggggaactatagcaatatttaaagatgctttggaaaccaaccgtgaacacatcaacaccacgacgtctacgattacttgctattggccctcggatacatttaagagaaagagacagtcactcttttttttcttaaatgatatacatataaacagttatttttatcctattataattgtcttttgtctttatctagtactatgtggaaagggtttgcatcatagatttttcccagccttataatataccataagctcctacttccctgcccctccctaatcagtattctttcaagagttctttggtgaagccatctatctgaaactaaaatgaaccaaacccatatttcactggtggttggagaaaaccatggccaaaacgattgtggcaggtctcaatcttgggagtttttaagaaggaatgtgccagaggccgattcccaagaacagagttttcttttgttttgcagaggcattcaatgtgtctagtgcttgctggccacagcagttactaccacagagccttctgggaggggccgttgtgttgaaggaggctcctgcctgagggacagcatcaggcagtgggctctgtagagtgagaaccaggtggaggccttctgtgcccagctcagagttctgcaccacgccaggactgcccaggccaagggctactgacgcaagttccactcattccactctgtggggggcgccttgggcctctcctggaagggctcttggagaaggaattggagttacgtacaagtgacctaaatgggaagcttttctagatgagattggattaaattccatgtgatttctctttccctttaatccaggttgggactcgtttctttctggtggatcacagctgcccagatgttgcaattgatttttatgtttctgtagagaagtatttttctttcatcttcaggattttttttgccaccaaaagaaaacattggaactctgtgtttcctcttgattgtgacttcccagtgttgacagttaagtccttagtgtcgtaggtcccagcccaccaatactatatcaaacactgttatgcacataatgcagcactgtgatctaatttaaataatacttttttattatttatactactatatataatatacatcaacacttttgctatataacctaagtgataaccctcttttagttacctgccaaactctggacttggtttatattgcagttaacacagttacaaagctgtaatggtgtctttttttcctttgtaacggaatgtgtaaatcaaagtatatacattgtgtggtgttcctgtttctggagtttcatgaggatttacacatggcattcagtgttctgtatagatctgcctacctttgtgaattcatctgttaacccctcttcctttgagagagcaccggcgatggtggttaactccttgtgttttctctctctcctactggttattcttgaattaagcacagactcgtcagctcggttgctttatcatgaataatgtgtgtgaccttgcagttcttccacagttcagcaaacaagtgctagcttcactgaccaaaaattaaggaaggaaaacacagtttttaaaacgatccatcttttaacagccgaaaccgatgtgtctatggtgctgcaccttgctgttgtacttctgaaatcagacgtgtgtgaacgatcatttctgacttaaccgtgagatgctcacgagtacccttcctgttgttttgttagcattgaaatcgagactatttatttggaatatatacaacagtgtttttccactgtatttcatttgcaaaagttgagaactgctttctctaccttttgcaaaataattgatattccatattggattctcaaagacttcgatatggtgaacctattaaacctagaaattgtattcatcctttcatgactgtggcctgagttccccagcccctctcctccttttttttagatgagatttagcacactctcagttatttaaacatgcaacatttcttgagtatgtatgttgaggccatctgagctcatagctgattcagtaaccagtttcatgctgtgtcattcacactcactacttaatactgccatggtgaaaatgtggaggaaaaatgtatccatgtgtgtctgggaagcatatacacttgtacattttttaatactctgattctgtaacatttctgagttttgttttgttttacagaaaaaaaaaaaaagtgataaagcaatcagaagaccaagaggtttactattgatgcttagggtcgtctgaccttggctggccaatagacctacacggccaaattaatttacgagagtaataatttttcaaaagccaattttttttctgtattttctgtatgaaactgccaatatcatgaatagaaagggagaaccataaaggagaaagaacgtgatgttctgttatgttcatgtaaacctaaagaaacagtgtggaggcaggcgcgatcagccgaactctagggacttggtgttgcttggaaggcatccatacctgcattttgcattcttcgtatgtaatcatattgccaaagacaaactatttcatcatttattgtaaataacacttttccccagacctaccataaagtttctgtgatgtattgtcttccagttgcaataaaaattactgagttgcatcaattgaagaaaaacacca

SEQ ID NO: 5228 - DNA, 116 bp, Homo sapiens
ctattgtgaactacttttggtaactctggggagatcaatagattgtaatgtcagcagactcgactctactaatgatgtcatgctacagacttgtgattaaacatttaaaaattttt

SEQ ID NO: 5229 - DNA, 282 bp, Homo sapiens
agagcagcgggaaaacgggctgtgcctgcgaggccaagttgcccaccctgcggagctaggaggcgcgagcagagaacgtgtgtgttaggagaactcggcttttgaaatgttctttctcgatagtaataatgtgggctgccagcctctcacatcttgcacactttttgggtgtgtaaatgacacaaaagttatttacatattatatatgtgaatatgtgtatatatgtacatagccagagagtcatgccacgtggtcattaaaccgatgatgattgaggcgtg

SEQ ID NO: 5230 - DNA, 779 bp, Homo sapiens
gcaggcgcctgccagcctcacctgccgctcaggcctcagaggccctgccgggcaccagggcttgtgccatcgccccaaggggatgaatctgccacactgaggccagggacgagtgttcagtgggccacagtgaaccaaccaaaccaaccccgaatcatcgctctcgccatgtgcgtttctcttgttttttttgccagcccaatggtagtttctgaacctattgacattgttcaaaatggatcatgtgccatattttgttagttgacatctgagttttcagtaaaatgattatggaattaatcagcaaatgtagaagaatatattcaaagttaaaattcagtggcagcacagattatttttatcagagctgtaaagaaaacaactgtccttttctccccaccacccctcctgccccactttggcccagaaaccaaatgtgaacttcctgtctcccacctcagcactagtccatgccaggacaccagctgacaatttcttggttttactgtcaataattgtaccatgtgatcaattactgtcctcacttagaacaaagcctgagtccgagaatatttatattttaccaatatatgcctgttacaagagaaggaaatatgagttatttaagtttaacttttttatgtgaattcagagtttatttatcgagggaaatatgtacaaagaagcttcaaatggaatatttaccgacattccttatacatgacagacacttggctacatgggaagatgatgttaataataaaatgatttttaaatgg

SEQ ID NO: 5231 - DNA, 1246 bp, Homo sapiens
gcatggtaggagtgtatcagtgatccattgcacctttattccctcagcatatgcctgaggcgatcttttatgcttttaaaaatgtttcccgttggtctcattggaatctgcctcctaatgatttttttcaggaaaacctgtttggttatcctcattcaaaagcactggacagagaatgttactgtgaatagagcacatattactctttttagcaacctagcatgatgccaacaagactattcttgaaagagcaaaggttcctgtaaatttaattagggctagatttgagctgcttgtaagtcacaggttttccagatgtctgccaacaagaaatgactcatactgtgatgataccttttgctttgccttgtggacaatgtgggtttttgaaatttgcacccttcaaacaatgatttatcagagaaaggggtctgttttcaaaaaagattctgtaatgaattttatgtgtggcatatacttatttcttgagagaagattttaacttattgtttttattttatggttacatatgatgataacctgctattattaaactttttctaaaaagtgaaaaaaaaaaaaaaagatataagaactcaaggtcccatactctgtattcgggatccatctgagatgcatgctaagctatgtgtatgtttttaattttgcactgctctttcctggcaatttgttttaatggttattgcagaatattaaggtacatgtctctctgttttaagtaatattgcactttataaaaaagtatgaataaagcaaactattttataaagtgcactgtttaaagcatttgcactgtatttttgccatttattttcattttctactttaaatttgtcctcacattcctcttctactttgtatgcaacaagtagaatggggcatgttgtgtcatgtagtcagccacttatgcaccaatgtgaggaaaacctaaagggaaattaaactaaacactgtgcttcatatttgtacactgtgttgtactacagtgaggaatttcctcctgtagtcatatattatgtacataatattttagaatcatacctatgacttgtttggaaatttttctgttaaattttaaatccagaaagcatattttataaacttatgcagagcacttttattgctcaaaagttctgaattcatacagaaaacaagtactatgtgatgaaaacatttcattaaaagattgctgcatttaaaaatacaattaattcgttccctatgc

SEQ ID NO: 5232 - DNA, 430 bp, Homo sapiens
aatcactggatctcttacgtaattcagtctagcaccattattaaagatctcccaaacatgggggaagtttctggggaggtttccttatttttttacttttcaaggctgttaaatagataattgaaaatacgtttctttgatgttttttcttttatatttcagtctaaaataaatttgtctttgtttattttttgccagctgatcatcttgaggttatatttgtaagtgtgagaaccttttatggaaaaaatactttatgcaacagttgtggactaaaaatagcaatggaaatttttatagcagaaaataatatctcttacatataattttagagggttttttttccaaatgatgtattttgaaaacttattttttacatttgtaatcaaattggttagctcatgaataaaaatgtatataattctattct

SEQ ID NO: 5233 - DNA, 1420 bp, Homo sapiens
cctgggtcctccgcgggtggctccacgtgaggcctgagccttcagcccacgggcctcagggcctgccgcctcctgcttccctcgctgcggaggcagggaagcccctgtaactccggaagcctgctctcgcttgctgagcccgctgggaccgccgagggtgggaataagccccggttggctcgtgggaataagccgtgtcctctgccgcggctgcgatgtggccaggctggggctgctggtcgggggaagacagtgaactgcgttccctggcctgcttcctgcagagtttgtgcatggggagtgtgaggacatggagggtgggaggctgggcgttcagctgccagggccttccaatgccaccgttgtcacagacaatgcctgtccaaacgtcccggtgggatcagcactgcagcccgcccacaacagggtgggaagggaagactggagggggaaggaaggcaggagggggaaggaagaaagagggggaaggaaagaaagaggggggaaggaaaggaggaaggggagaaggaagggaggaggaaagaaggaaggtagggggtgttgggttgggagaattgagggagttataggcagaggaggatcctagctccagccataagaactgggagagccgcctgctgctccagaagacctgcccacctccacagaaatgctagcccttcagaccttctggtcagtgaactgggaccagctctgactaaggatgccttccatggcctgggactcgagttcttcagaaccaagaggctaactgggcttcctccaagaagggaccaggggctagaagcagaagttggcatcagcaaacatttctggaatctaccaaagggaggcccaggcagaaccccttcctcagtctcccttcccctcttccccccagccttgaagaggttgatcctttgtgctgtgtctcttagccctttcatcggggatgcccagaggcaacagcccaggctggaggtgccccagggaagggtgctcacagtggtcccagggctacacttggctttgactgcacagcccctgctcagatccttgtggagggtgtccgatgacttggggaggttctcttccccttcctagaggaggaagtgaccaagtttgaaggcggcagaaatggccacacagccaagaagagcccatgcaactcagtccaggattttactgggtcagtgacattggtggaagccttcatgcctcctcattccacagcacttcctcctatgttgaccttaaacactggcttcccactgatacagactgggatgagctgagggcagtctcatttactgtcaagagttgtatttttgtattgtcctttttgccaagtctacatgtgttgactctgtaatggatttatgtagcccacttcagtctgcaaataaagcaaagtaactgg

SEQ ID NO: 5234 - DNA, 1147 bp, Homo sapiens
taatggcaacggcctaggatcagtacctgttgaaaaaaactggttctccacccctcccccatacaaaatccacaacaaagcgcagtggtctcttgtgaatgactgacacagatcagcctcttacacttgacttctgctcatcaagtgccaattcaatggagcaggaggaggggatatcatatatttaggggaaagacttaagcctttgagctctccagcttggaccacacattgcccttttctcagggaaggaaatggaaacaaaaagccaacagggcaggggttttgtaagtggaactctggattgactggtcagttgctacaatcagaatatgctttcttggaccatgtttgagactcagaagaatgggcctttctgccataattcttcactagtcaagaatgccagcagtttctttgtataaagagacctgcctttaaaatcatacattctgaacattttagtcaagctacaacaggtttggaaaacctctgtgggggaggggcgagtataaagttttcctcttttttaactgttccctttgcccttcaaactgcagatatttttttttttaagtggggacttctccctacttgattaaagattgagtggaattctagatgtggtcatttgtgtcataatttttttgttttattttgtttttgattttttttttcctcccctgagtgtatgcttagttgttgagtatatatatttgggaccattaaaactttttttgatgtaatataacctaacgttgtgctggtacctgttttaccatgtgtaatttttgttctacatcacagttcttaatttgtttagagttttatgaaagatggtatagtttttattgacaaaagcaaagtaatcttacaactatgtgcatacaaaagcaatactattttgtgactaaatattttatattaaaatttacatcagcaactgtcttgagaattcagggaaatagaatggaatttaaaacttcaacagttttgttaaatctagaaacatgaaattagtattccaaagagattctgaaatttcttttcttggggaaatgacggtacattaaatcaaaattgaggatggatgatttaaaaacatttgacttttgaataataaaaagaaaagtgaagagtaagagaa

SEQ ID NO: 5235 - DNA, 115 bp, Homo sapiens
acacatggtgatcataatttctctttattttctagttttatcagccaattcctagaacaatatatttaaatgttaaatatgcaagctacataaaatcctaaagaattgtcattat

SEQ ID NO: 5236 - DNA, 2918 bp, Homo sapiens
agacttcacacattaatttggtgaagaacttgacattcttttagaagacttatgatttcaatttgctaccaatgagaagaggcaaatcaacaaatttgtcaatttatgggggctataattatggtatataatgtatctgatagaaaatttgataagaaaatgtaatgaattttatcagatatccaaagtaaaggaaatgttttaaaactgcaacaagagacacagacagtaaaatcaaagtattattaggatgactaaataaattataaagtctgtgagaatatcaaccatagatagttctttctatattatgttttcgcttttgtattttaagctttacttagatattcaaaacctggtatatcaagtctctgttagtactattggcatttagaagactttaccattatttcagtgctaggcattattgattaggtcttggctccactgtttacctcttgctatgtattttctcccggtaaaaatgaattgaaccatttcaactattttctatatttggagaaagtttgtgccctgtgttttataatttttttacccataagacatcacattatccctttgtaagctacttatctccaaaaaacttcagaaatagaaaactacattttggcaggaataattgaaaacaccagaaggttgaagtttaattggaaacccagaatatacatactttgctgttttcttccctcaaatattttactatttgttttatttggagttaaaataagagtatcatccatatggtccatcctaattcacagaattaaatgagcttaaatagaaaattcagtattttatgataatcacttcgtttttagtttttaaaatttagattattctataatttaccgtgtttgagtattttctcatttttttcataaccatacctgattatactgtgtaacaaatattttctattgcagttttctttccagtacttattagaactcagtatttggaaataatttcagcttaattgaccataagaactgtggccaaaaagaacagttttttggagaggcagatgacattatacctgattttagaaaatctcactttatttttgctaataagtagactaagtgctctgtgttctcagtcttccctttttttctgcccccattcttactttgtcccaggcatgcagagaaagatggtgatattttaggccaggagtataccttgctataacctaagcatgccttctttattccagctcctatgttctgtgtatatcattaacattttcccaaataaacacttaattctcttttccctaggtgccatctcctcaagctacaaaatgtccacatcttatatcccctttgcttctactgctctgattttgtggtaccagtactctctgccactgaacattttgaaatatttttgttttagatttgcaaaaaatgacatataggtcagtactcacatggatttttaagataaatcacctgtgtgataatattttgaatctgagacgaatacaacttttaaaaattgtttttaaaaatagacttttttttttagagcagttgtaggttaacagaaaaattgagaggaagatagagatttcctttctcccctgacaaagccctcaacagcctcccaggctatcagtatcctgcaccacaatggtacatttgttacaatcaatgaacctactctgaaacatcattatcatccaaagttcatggtttacattagagtcccctcttggtgttatacatgctagaggacaaatatatgatgatatgtatgcatcattataatatagtatagtttcgctgccctaaacatcctctgcaaatgcaactattttaatgggtaccaaagaagtaaatgtatttactggcttttagataataaataacgggctttattgtttattttaaaagctacaatttgttttagctggtttctctgttctattaatgctttgaatttccaaatttaatatatgtagtcatgcatttaacttaatatttaattatttgatttatttaattttctatattcttacaatgtatgtatgatgtataatttaagggaaagctatgacttctcagtttcttagaatcctaggtaaataaaacaataaaaagaaaacccttacatttaaaagagctttcaggtacagaagtattgatacaactaagatcctaaatgttttaattagtgtttacttaagcctttttcaggtgaggaggtactaatgctggttatttccttgaagctttatgtggacctataaataaaaatccaatctcctgctaataggtatgcatattgtgagaaaaacgttaggagctggtagtaaaaaatgagattctatgccaaaataacttctcttcatatttgcctaggcatttcttgacctttacccacttacgcaaggagaaggaaatcataatgatgtcatgtgatcaaaggaaaccatggaagggttcacgctgatagctgatagcttttacagtgctcattcctaacagtggatttacttgtaagctttcagatcaacacaaatagctgcagcctgggttaaaatataacatcactatttggcttttgttttgcatgatttttaaaagcagtactcctagggaaatggcctctgaagtatatcagtttcatctcttaccaagactgttaagaagaaactagtgggattttgaacaagttatataattgtggtctgaaaagaccctaaactgaagttctgtttaaatatagttacatgaatttctctgatactaatgtactcaacagccaggtataaactatatctcctagtaacattttccatttttgtttaatcaaatacttgcttatgaaggatttcagaaatttgtaataaatgtcagcttttgatagcatagcagtaattgacatttcaa

SEQ ID NO: 5237 - DNA, 812 bp, Homo sapiens
gcctcgggctggagcctccgacgctgcctctcattggcaccaagggacaggagaagagaggaaataacagagagaatgagagcgacacagacgttaggcatttcctgctgaacgtttccccgaagagtcagccccgacttcctgactctcacctgtactattgcagacctgtcaccctgcaggacttgccacccccagttcctatgacacagttatcaaaaagtattatcattgctcccctgatagaagattgttggtgaattttcaaggccttcagtttatttccactattttcaaagaaaatagattaggtttgcgggggtctgagtctatgttcaaagactgtgaacagcttgctgtcacttcttcacctcttccactccttctctcactgtgttactgctttgcaaagacccgggagctggcggggaaccctgggagtagctagtttgctttttgcgtacacagagaaggctatgtaaacaaaccacagcaggatcgaagggtttttagagaatgtgtttcaaaaccatgcctggtattttcaaccataaaagaagtttcagttgtccttaaatttgtataacggtttaattctgtcttgttcattttgagtatttttaaaaaatatgtcgtagaattccttcgaaaggccttcagacacatgctatgttctgtcttcccaaacccagtctcctctccattttagcccagtgttttctttgaggaccccttaatcttgctttctttagaatttttacccaattggattggaatgcagaggtctccaaactgattaaatatttgaagag

SEQ ID NO: 5238 - DNA, 156 bp, Homo sapiens
atgattctcaagccagagacaatctagcactttaaagaaaccatgaacactatatgtatgtactttatcacaaagtggcctttggggagaaagtcatgtatttgttcgcaattatgctttctctgaatttaataaaaatattcctaatgcttttag

SEQ ID NO: 5239 - DNA, 1532 bp, Homo sapiens
tacctttaaaaaataatttagatattcatactttccaacattatcctgtgtgattacagcatagggtccactttggtaatgtgtcaaagagatgaggaaataagacttttagcggtttgcaaacaaaatgatgggaaagtggaacaatgcgtcggttgtaggactaaataatgatcttccaaatattagccaaagaggcattcagcaattaaagacatttaaaatagttttctaaatgtttctttttcttttttgagtgtgcaatatgtaacatgtctaaagttagggcatttttcttggatctttttgcagactagctaattagctctcgcctcaggctttttccatatagtttgttttctttttctgtcttgtaggtaagttggctcacatcatgtaatagtggctttcatttcttattaaccaaattaacctttcaggaaagtatctctactttcctgatgttgataatagtaatggttctagaaggatgaacagttctcccttcaactgtataccgtgtgctccagtgttttcttgtgttgttttctctgatcacaacttttctgctacctggttttcattattttcccacaattcttttgaaagatggtaatcttttctgaggtttagcgttttaagccctacgatgggatcattatttcatgactggtgcgttcctaaactctgaaatcagccttgcacaagtacttgagaataaatgagcattttttaaaatgtgtgagcatgtgctttcccagatgctttatgaatgtcttttcacttatatcaaaaccttacagctttgttgcaaccccttcttcctgcgccttattttttcctttcttctccaattgagaaaactaggagaagcatagtatgcaggcaagtctccttctgttagaagactaaacatacgtacccaccatgaatgtatgatacatgaaatttggccttcaattttaatagcagttttattttattttttctcctatgactggagctttgtgttctctttacagttgagtcatggaatgtaggtgtctgcttcacatcttttagtaggtatagcttgtcaaagatggtgatctggaacatgaaaataatttactaatgaaaatatgtttaaatttatactgtgatttgacacttgcatcatgtttagatagcttaagaacaatggaagtcacagtacttagtggatctataaataagaaagtccatagttttgataaatattctctttaattgagatgtacagagagtttcttgctgggtcaataggatagtatcattttggtgaaaaccatgtctctgaaattgatgttttagtttcagtgttccctatccctcattctccatctccttttgaagctcttttgaatgttgaattgttcataagctaaaatccaagaaatttcagctgacaacttcgaaaattataatatggtatattgccctcctggtgtgtggctgcacacattttatcagggaaagttttttgatctaggatttattgctaactaactgaa

SEQ ID NO: 5240 - DNA, 67 bp, Homo sapiens
agactggctagattatcgaatgttcacattttaaagttctgagagaaataaaaacatgaagaatctg

SEQ ID NO: 5241 - DNA, 507 bp, Homo sapiens
agagctgcctcctggaagcttttccaagtgtgagcgccccaccgactgtgtgctgatcagagactggagaggtggagtgagaagtctccgctgctcgggccctcctggggagcccccgctccagggctcgctccaggaccttcttcacaagatgacttgctcgctgttacctgcttccccagtcttttctgaaaaactacaaattagggtgggaaaagctctgtattgagaagggtcatatttgctttctaggaggtttgttgttttgcctgttagttttgaggagcaggaagctcatgggggcttctgtagcccctctcaaaaggagtctttattctgagaatttgaagctgaaacctctttaaatcttcagaatgattttattgaagagggccgcaagccccaaatggaaaactgtttttagaaaatatgatgatttttgattgcttttgtatttaattctgcaggtgttcaagtcttaaaaaataaagatttataacagaaccc

SEQ ID NO: 5242 - DNA, 1698 bp, Homo sapiens
ccacggagccgggacccagaggggcagcgcagggcgcagagcacacccgctgggccagcagctcccaacggcgatgctactactaagaatccccagtgatctgattcttctgttttttaatttttaacctgattctctgatgtcatgatctaaatgaggggtagtgggggatggaagagagtaccaggtggtccaccgttggggagtggggccgtccgcctgctctctactgtgcagacctcctaactgagtttacacacgcttgtgtttgcaacactaggtctggatgggaggtgaggggtgtgcgtatggctgccatgccagtgtctgtgcacatccctgtctgttggtctccatggccactgtggaccgggacccttgggggaagcctgcccatgtcgggctgtgggaggctgatcggtgcatgtgagagtggcttcccttctgcctgactccccactccctgacctgccccttccttgtttttcctcctactggtctccaccaaggctttgttagcccccaccctgcctggtgtgcagctaacccctccctccccacagccagaggaggccacagacccctcaggggagttccgcgctggggtctgggctgtgctccctcactaaagggaaggaaaggaagctgggcgtcctctgggccccccaacacacgtcccatttagccctgcacagcggtctccttcccctaagccagcactgctgctccctggagcccgggaaggaggctgcctggctggaggcccgagccgatggcgcctgtgctgaggatttgtgctgtgatttgggcaaatcattccaggtctttgggcctccacccccttgtctctagtggacatttgagatcagagagcaccacagggctggctttgtgccctaacccctgggatgcagcctgcctttccataaagtcacctaggtgaggataggcgcgggagcctcggcatgacaccatggagatcggggccctcttcccagtgggttcactccttttcacacctgctgggtccctcctcacccagcaggcctggtccacctctcattgcaagccccaagcactgagccagcaggtgccagggagccacccgccccccatcgcttctgcacacctcagactcaccccatcaccttggcagcaaagcactggctctgccgtctgacccctgatccaggcagccccctctgcagagaaaagggttggggagaagcctctgcagtcctggaagatgtggggtgctgggtgagaggcatcagcccccacaagtatgtttttgtgtcttaagatagcagtttactttgaaaaagtgaaaaaggcttccgggctgtcctctgcccagtgagatggaggacgctagagaaagtgctgagtgtcccgagagaggcccccgagccagtgcatggaggtccttcggcctggctcagctgggctgcaggatgcccactttgaggagggaggcacagggcttgggcgaggggcagaggccatcagaactgcccggcttttttggaaactgaggacccaacaactaaccacgtttacacgacttgagttttgaaccccgattaatgtctgtacgtcacctttcctagttctgaccctgagccctggggaacaggaaagcgtggctggcctcttgcactgctttgtctccaaaataaactactgaaatcaaaccgc

SEQ ID NO: 5243 - DNA, 989 bp, Homo sapiens
gtctcagggaaccacgaagggatatggcaatgagtagagcatgaaggtagaacagtctatatactcttgtgacacatacaatccctaccttgtgctgccaagtaactcatttttgtgcaattctcagtataagccctttgtcgtttctgtgcctatttaaagtctcctaaaggtgtaattgactaggaaggatgtagttctacactgccatttacctatttaaattcatccttgtgaatatctttgttgttgttgttgagacagagtctcgctctgtcacccaggctggagtgcagtggcgtgatcttggctcactgcatcctccgccttccaggtttaagctattctcctgcctcagttgcccgagtagctgggactacaggcatgtgccaccacgcccagctaagttttgcattatcagtagagacggggtttcaccatgttggccaggctagtttcgaactcctgacctcaagtgatccacctgcttcggcctctgaaagtgctgggattacaggcgtgagacactgcgcccagcctcatccctgtgaatttcttattgtacacaagttctttcactatctgtgtgcagtgctctgaggggacagacaaggcttgggtgtatatgccaaccagatctcattgaagtatcagcttgtttggtactaggtgcaagtgtagcatgtcacatgtgaccatgttggatcattgacaatttttaggtatgtactgacctacatttatgatgaagatcctgagcggaggttaagatattaagttattttccatatgaatcagaattatattgattctgtgcaatcaaaacaaaaggcagaatagaatgctgagattggttaagtttgcaatgaccatcttgaaccacagatttctgctatgtgtcatcaaaacatctagttctgagtaacattttcacgattgttataaaattataggtgtgaacttctaaaataaaggaatgctaataaaat

SEQ ID NO: 5244 - DNA, 796 bp, Homo sapiens
caatagccttcatgacatttaaaagatggctgttgtatccttattgtcacactaggacatttaaggaagacttatgctctaatttggaaaaagcatttgtgttgttctcctgggacaattttgtcaaagagaaaactggtttttctgtttctagcaaagatagtaaaggcttagaaataaaatctgttttcttgagaaataaatttcagaccctggaaggaaaatagaacacttcataatgtataaaatcctctaagttggcaactgaatttttatcattgttttctatttttaaaataatcattgatttgtgtgatgtctacatcttttaacttctggttctgttataaagagtacatgtcacggttcataggcagtaacatttcagagaactgacatgaacaagtagtgaaaattgggcattaaatataaaaataacagttcttcataaacagaaggaaaataaggaaatagaaataccgacgagaaaggagagtccttgaaagagacccaaggaaaccctgaattcatacccacgtcaaatatgcacatatcctgagatgatgccactttgatgaatgtgcattagtctgatttatcatgtaccttaagagagccagatggggtatgtttttgtgctgtgatatggtatttatacaggtacaaatataaggccttaagtaaacaatctgcattgattacaatttggatatttcctctcctcctgtagccatactttgattttgctttaaaaagattattgaatccttttaaaaatatatattcctaaaatatg

SEQ ID NO: 5245 - DNA, 4721 bp, Homo sapiens
gagcaacctccaagtcgtctgtgcctgagatgtgaaacatcccattttatgatgtaacccaacaacttacagaccagttcatcaatgccagctgataactcggtttcacatgattttgttctagtttttgtgtatatatgtgtttattagacatggcatgctaagaaggttttgttttttttttttaatgttgcatctgtctaatttgtctttgaacaattatgtcgggaggcatttttaagaacaagcaggctggcactttttatttctctttacaaatgatggaatttttttgcacttgtacatttattttctctgtattgattttatatcagtatgttaaactttattgccacatttaaaggactgtattttcatacttttttgcattttacctttcatctaccaatccatgtgcattggattgcacactaagatgtattttcttacgaaatagttctgtgtttattttttaattatagaaattccaaagaacagcacatcagaatgctcctctcttttcagtaattgttttagttcagagatcttcccgctcagcctccataaatctaatgtcattttttttttaataagtcctaggagctgggcttcattcctccagcgggagtccagtcagggtcctgaagtttgctggttcaggaaagaacaggaaagagaaaagccttctgtgcccaggctaaagctgttacatttccacagtgtggatgcagtcagaatccctgcacattctggtcataaggattagagtcaccagatgaggctctaaacagatcgcatcccttggaattagaaagcagtggagaccgggcgcagtgactcacacctgtgatcggcacttcggaaggccgaggcgggcagatcactgaagctcaggagttcaagaccagcctgggcaacatggcgaaactccatttctataaaaaatacaaaaaaaaaaaaatctagccaggcgtggtggtgcgtgcctgtagtcccagctacttggggggctgaggtggcaggatcgcttgagcctgggaggttgagactgcagtgagccaagattgcaccactgtgctcccacctgggcaacagtgagaccctgtctcaaaaaaaaaaaaaaaggcagtggaaatagagaagtaacttaaaggtcacactgacagaatttctggttctgagcgtcaactctccagctgtgatggcggaactgactgcttgctgcctttaattgtcttgctctctatgggaaaaaaacaaaagggcttcagtctcatggatgttatttggtgtttgtaaagatacgttttcttttaaacgattttcaaaatatgtctaaattttggtgttgtgtaatgcataatgctttctcaccaacagaaaaaaggaaaaaaattgttttcagttaaacactacatgtcctacttgaactccactgggacgctggtttggcatttactaaaccactgagcacatggggtctttcaggatcctctcccttggaagggcaatgtgtgagctaaggactgttttttttcttactctccaatgtaaatatatgagtatttgagtttttaaatcacttcaacattatttgagcatttactttgtatttttacaaacacataaacacacagccgtagcacttagaagaaaagaggctttctaagcattccttcctctgcaggatatttgggatcctcttttctatgtatgtatatatataaaaaactatgaatcactcacactcactcgaaaactatgcagggctagggagcgtttatgagctaccgggtaaatgaattacatgcactttgaagtaaataggttttctattgggtgtcaacaacgctgatttctcccaaaactatagtttctcttacggtcttttcctcctttaccctgtggatatacactcaggaataatctgacattttagaaaagccgaacagtagatagtctccaagatgggaaacatgtcgtgtgtctgcacgccccggcaaactgccgccactcgttctgctgcctgactggttagctgctgtgcgggtgcgctcggtgacactggtggtggtgcacgctcccgagctcccagagttaacactaatctgcaggtcggctgtgcatcgcattcgaggctccttttttaaagagaaaagcataggcctctgttctcatttgtaagaagtttgactcataatagaagacggtgtcttttgaagcccagtctctgtctgtcttcagaaacaaaagtgaatgccgtcatgttccttgatgtgtgtttctgccacatatgtatgttgacatgttcatgtactgcgccggtactgcaagtaagactcaacagacctaatttggatggggagaaaaactctcatccctgacccttccccccccgcaaatgttagaccagagctgttgatcccacacattcatttttctgaaaattcatgaactattctctcatatccctgaaatataaaagtaagtggccactattcctaagattatttagtttataaagtttgcttttaatcatacaatagcttacctggctaaaactttgcgtataaagggaaaacttgctttaatctgtgggattgcggaccgatgcgacttgcagaaggtaaacaggcgtgggttttgtgtgcgttaggttaggtgttagtggacttttaatgtatcttgtgaagtatggttactagggtaggttcaagagctacatgcctctggcttttgaacccatctattaaatcttttttaatgctgtactaagataaatgtgaagtctgagtaaggttgctctcagaaaaaaaaaaaaagcatatatatatataaaataaaatttaggccatgggaactggcattttacttggtataggaatttaatgagaaccaaatcacaaaaataccagatctccttttgagatcgtggacaatcaggcctttggacaatcaccgcttccagtgcccgctgtgcgttgaggttagagacctaccgtttacacgctagagccgagaggacgttcaagtttcttaaagatgctgttggtcttttttcttatgttattgttttagttttgtgattttgatgaataattgaagttcagagtcacccgtggctcctaaggaaaaaacagcatcatgaaaggcaaaaagtatttgaaacgtaattgtttcaattttccacgcccgttctcacatgccccctttagctttatttctgggaacatgtcactagacctcagctagcctgacaccgcaataacccgttaggctttgaggcttttcagtgaattcttgacatttaaatcttcttatagaattctttatgaagccttaactaattcttgtttttgcttcctcagaaactttttattgcatctgccatccttcattggatttttgttttggtttgttgttgccattctagcaatgagcttagtccttgtacatctgcattaaggtgccgatgcagaaggcaaattggaaacacgcgccagcggcagtggggctcaaagccgacctccatgcatcattctctagagttgaaaggattgacatttctcagtaactacccggcaaaatatatattttcataatgttgaatttgccttttaggaaaacaatgtttcatgaaacacttgtaagatacttattttgaaattaattataaggcattcatatttttaggactgaattcaaagggaaatgcttctttgactttttttcattgttcggttgactttcagctttctggagtgacaaagcagcagtgatgggtgctattcctggttctgtggtggtttactttgtctactaagtgatttactttcaaacctcattacagataatcttactaaaagacttaacatgcacactgctaaaaggtgttttactgttttccattaacgctgttgtatgaacaatatttggtgacatgttgtctttttgtcctgtagattgtcatatctgttatgtagttatccttttggcaagtcctttgatttttttttcctctagaaaatcctcagactgtcaatcttccatattttgaatattataatgctgtggccatttctatagaaagattacttgcaagtgtgtgtcttgaaaataacctcttgtatttgtgtgtttatgtgagttctgtctaagagatcagataagctctggaagcttcatcatctgtacctacatgtaactgtatctgggttacatgggcaggcggtaccaagtcctgctcttcgatggggtggctgagagataaaggttcctgaactctccttgctgtgtatgcaccacatctgtacttcagagaggtggaaaatcatctacaacactgcgtttcttgtggttgtgctgttactggtataaagtcaagtgccttcaatgctaaaggctcagaaatttttcttaaactgatttcatgtcctatgcaagtgttttctacaacctgcataaccagtactttgtaaaacttgtttacgcttcaattgtacatagtgatttttaaagaaatatatagtatttttatttaggtacctccaaacttgaattcgtctgtgtgaagcattgtaaaacgatacatttctcttttgagtaccattacagttgtacagaggttttcactgcttctatttttctactgttactgataagcatgtaacactgactttatcctacatatagttggcatttcaaataaatggcttgtatag

SEQ ID NO: 5246 - DNA, 1007 bp, Homo sapiens
atatgaaaacccatccaaggataactggacatttgaggaaagcttccaaattgagacagagatcagagcaaaaagaacaaagtcctggaggaagcagacaatgaagggagcagaagaaaacttcagtagaatcaaaatatccttatataaaagaactttttatggaatcagtgagacataagcaggatgctattaaagtaaaaacaggagcttttagaaataagatagcagaaatgaaagatataatggaagcattgaaaggtacagttgaggaaatctagaaagtaaataatataataaagagatgagtggagacaaataaaactagagtattcatccagggtctaacatctaacaaatagtggctttagaaatatataccagagaaaagtgaagagaagacagtatctaaggagtaatataagaaatatttccaaaactaaaggaatttctatataaaaagtttctttttcagaacactggggaaaaagagacaattttaaaatgttgcagggaggagaaaaattaggttccatgcaaagaaataggaatcagatggtattgagattttcagtagcaacaactgaataccacaatacagtgaagtagtgtcttccaaaagctgatggaaaattattttaaacacaaaatcctatatttagccaaacagtcaatcaagtgtaaggctaaataaaggcatttttcagtcatacctcgaaaaactgcctgtgtagggatatttcccctgcttccccactcaggcagctgctgggaatgtattccaccaaatgacgaagcaaaccaagaacaaagaagtgaaggatctagaaaatgggctccaacacgggaaggaagcaaagggagatcccacgcatcagccacacagtaggtcttgtgggcattcagtctagcccagaccgggagggtgaaagtctccaaggaaagaggtgtctcggaagaaatcaattactttcaatgtttgaacattaaatagcaaatgacaaagc

SEQ ID NO: 5247 - DNA, 3146 bp, Homo sapiens
gtctgcaggccctggacccgctggccagagggacaccttggtggcactggtggacatgggaaagcaggtggacatgagctaaccctgagcttgtccaggacttcattgcctcacaggccctgagcctcccgaaggagaaaccattgtcttcccaggcttgcccctggtcagcctgcgggcccaggcagctcggacaccaggctgagcccggcgcagcacctgggcagtgtccccaccccaggccctccacatcctcctccctgtctggtgtctggtctgtcgactgcccccagctgctgtctaaagcatgcgcactggcgaagccagagggatctgtctttctactgtggcagggaggcttccccctttagccaaaagaaagatggtccggagcccactccctgccggaaaacctctcctcctcccaggaagcctgcctgctccactgttcacattctcaacagaagccatcggcacagccagcagacagacgtcccctttcaaaggtgcttcccacacatctgttcatcgccccatctgcagttgttgtcaatcttcagggcctgccttctccctcctatccccactgacaccctacaccctaggctcctgactgcctgccatggagggctgtgagtccagcctgcagaatcccctcctgagcagacacaggagtgcgtttacactcgggggcagtgtctggccttccgggggcaaaacgactcactgaacccgcagcccagggccactgggcaagggcagaggccactgcacctgtcctcagactcatccccacacttgaccccataggaactgatgcatctgtgtgagccaggccctgccttagtcagcagaggccactacttgtgccaaatccactgtgggcctgctgtaccaggctgatgctggccaggcgctggatgtcccccacagtcccctgaggcctgactgttgtactcaggccctctcccagagtcctccatcatctccccattttaccctaccccgagccccagtcgccaagaaggaggtgttgttcttccagggtcttcctttcaatgtctgtttccacagtctcatgctatagaagcgctgagccctccagcgtggttggaggatcaagggatgaaatgggacaggaggagaggggtcctccaggctggtgacccctgccctgttggcctgtctcccaagtggcagccttccctgtgggccacatcaggaaacccacggagacagggtgattttgcatctcctggaaaatgagtgggacactcctggccccctggctctccccaccacccctacatatgtgctcagaaggagcccaatgcattgaatggttccactgtcgagccctctaagacctggtttgcctcctaaacctccagtgtgctcctctgataggtgtttaagctacaggtgagactttgaagtccagagaagacagacacacctgaaaaccggtccccatttgggccgaaccttaaaaagcccattgtcccagagtcctagtgcccacggagctgtctgtgtgtcattgtcctgcccaggtcatcaggtgtgggctgaggacaggcccagggcataccctcccataaaggggttttcttctttcctcatttccttctatttgaggacttgtttggggtttagatttgaattttgcttcccctggacacctgggcatcagcatagtgccaccccctgctcctgacctggccagtacttcacagtgctcttgaggtgcggagccagctgacaaataggccagagggtgtgggccagcagcaggttaaagggggaaacccagcagaccccaccccagggcactctcccctactgccttcagccttctggtgcctgttgaacccccaagctgtgccctaagcagacccctgggcaggaccctagccctaagcacacaccaccctgtgctgcaaccatgagaaagtgcccatgccttgggctgtccagaagctcaggagtgatcagagggcaccttctctaagaggggaggttcctggctaagggaccatggagtggtgggcagcctgaaggggctgggcacagcccagctttgcgcacactcgcctggtcccatcattccctaccttggcttaaacctaggaggcctggattttgcagttagcctaatcttccagccccaggcgaggctccctggtgaggaatcagctgagccatcaccacgttttggggcctgtatcctcttccctgagccgctgacgcatccagggctctagtctgcacataaattccctctcagctgggcttgtaaaatcccttctcaccccagttagcaaaaatcaagggaagagcctagtttttttaaaagattcacttaatatccaccccccacctcaagcccaagaccgcccattcaaaaaacaagtatacggcacagcaagggagacccactagattttgagcttacagagacataagggtacttaaaaccctgccggcctagtatttgagcttagaacttttatttaaaatgagccggcagtctctagacacacaccgatcctcaggctagtccgagccctgaggtcaagaatgaaatgcacttcccttctcattttctcaaatagatcttttccagccgtctcacagttgaccccaactttggaactcagatcataggatctcccagaggtttcaggtgttcctaagaagcttctaaaggaagttttggaagaaagactaataggtgtaaacatataaacatatatattatatatagctatatatatttaaagagatctctacatatatatatatatataaatacaactactgtactctctgcatctgtacaaagtatgagttaaactgcccaggtagtgtgagatacgtaatgcatgaatgtgaatatcctgaaatctgccttcttagcaacgtgccgcgtgtactggagagaggacagttgctcctgggagttctctcaatgggcaaatgtacaagttgatgccgtcttatccaccaacaagccattaaggttggtttcctgctgagacttttgtaccggaagcgagaccggcagcactgggggtgtccatatgccacttatgaggaagaaagcaccatgacttttttattttcaataaaaatatagagatgtc

SEQ ID NO: 5248 - DNA, 489 bp, Homo sapiens
ctggggccacggggagagaggagtagcccctcagactcttcttactaagtctcaggacgtcggtgttcccaactccaaggggacctggtgacagacgaggctgcaggctgcctccctctcagcctggacagctaccaggatctcactgggtctcagggcccagagctttggccagagcagagaacagaatgtgtcaaggagaagaatcatttgtttacaaactgatgagcagatcccagaccttctctaccttcaggaatggcagaaacctctattcctggggccagggcagagcttgaggtgttctggggaaggtggtgctcagagccttccctgtgcccctccacttgttctggaaaactcaccacttgacttcagagctttctctccaaagactaagatgaagacgtggcccaaggtagggggtagggggagcctgggtcttggagggctttgttaagtattaatataataaatgttacacatgtg

SEQ ID NO: 5249 - DNA, 268 bp, Homo sapiens
ctggtcaagtgtgtcagtgactgcacattggtttctgttctctggctatttgcaaaacctctcccacccttgtgtttcactccaccaccaaccccaggtaaaaaagtctccctctcttccactcacacccatagcgggagagacctcatgcagatttgcattgttttggagtaagaattcaatgcagcagcttaatttttctgtattgcagtgtttataggcttcttgtgtgttaaacttgatttcataaattaaaaacaatggtcag

SEQ ID NO: 5250 - DNA, 18 bp, Homo sapiens
aggtcacatgcagatgca

SEQ ID NO: 5251 - DNA, 652 bp, Homo sapiens
ttcaggacacgcataagcacttcgtgctgtagtagatgctgaatctgaggtatcaaacacacacaggataccagcaatggatggcaggggagagtgttccttttgttcttaactagtttagggtgttctcaaataaatacagtagtccccacttatctgagggggatacattcaaagacccccagcagatgcctgaaacggtggacagtgctgaaccttatatatattttttcctacacatacatacctatgataaagtttaatttataaattaggcacagtaagagattaacaataataacaacattaagtaaaatgagttacttgaatgcaagcactgcaataccataacagtcaaactgattatagagaaggctactaagtgactcatgggcgaggagcatagacagtgtggagacattgggcaaggggagaattcacatcctgggtgggacagagcaggacaatgcaagattccatcccactactcagaatggcatgctgcttaagacttttagattgtttatttctggaatttttcatttaatgtttttggaccatggttgaccatggttaactgagactgcagaaagcaaaaccatggataagggaggactactacaaaagcattaaattgatacatattttttaa

SEQ ID NO: 5252 - DNA, 169 bp, Homo sapiens
gagaccacccacccagagcctcagcactgtctgactttgggaaccagggatcccacagaaatgttttggagagcgggaggtttcccccaatctcctccaagttcttctccctccaaccagagttgtgtctaactttaggcatcttttaataaatgtcattgcgactctg

SEQ ID NO: 5253 - DNA, 88 bp, Homo sapiens
ctgcctctcgctcctcaacccctcccctccatccctggccccctccctggatgacattaaagaagggttgagctggtccctgcctgca

SEQ ID NO: 5254 - DNA, 370 bp, Homo sapiens
gtgggaaatggcctgttaactgatggcacattgctaatgcacaagaaataacaaaccacatccctctttctgttctgagggtgcatttgaccccagtggagctggattcgctggcagggatgccacttccaaggctcaatcaccaaaccatcaacagggaccccagtcacaagccaacacccattaaccccagtcagtgcccttttccacaaattctcccaggtaactagcttcatgggatgttgctgggttaccatatttccattccttggggctcccaggaatggaaatacgccaacccaggttaggcacctctattgcagaattacaataacacattcaataaaactaaaatatgaattcatctgtc

SEQ ID NO: 5255 - DNA, 20 bp, Homo sapiens
aggagaattcctgcttgcca

SEQ ID NO: 5256 - DNA, 268 bp, Homo sapiens
cggccgcgggacacttgcccgtattacttacctaactcgaaggacttgcacagacagacgatgctactttcttgcacacgcgctgccttgcgggagggggtcgagaaagaggaacgaggagctgtaaatagtgtacagagccgggagggtcggcgtctggggtcagggcgcgcacagcccagcagcccgaggccgcccgcgactagcccccaccgtagtatttatagttaaattaagggtgacagtacaataaagtgatggcgatgta

SEQ ID NO: 5257 - DNA, 4269 bp, Homo sapiens
aaccgctttttaaaattcaaaacaagaaacaaaacaaaaaaaattaaggggaaaattatttaaatcggaaaggaagacttaaagttgttagtgagtggaatgaattgaaggcagaatttaaagtttggttgataacaggatagataacagaataaaacatttaacatatgtataaaattttggaactaattgtagttttagttttttgcgcaaacacaatcttatcttctttcctcacttctgctttgtttaaatcacaagagtgctttaatgatgacatttagcaagtgctcaaaataattgacaggttttgtttttttttttttgagtttatgtcagctttgcttagtgttagaaggccatggagcttaaacctccagcagtccctaggatgatgtagattcttctccatctctccgtgtgtgcagtagtgccagtcctgcagtagttgataagctgaatagaaagataaggttttcgagaggagaagtgcgccaatgttgtcttttctttccacgttatactgtgtaaggtgatgttcccggtcgctgttgcacctgatagtaagggacagatttttaatgaacattggctggcatgttggtgaatcacattttagttttctgatgccacatagtcttgcataaaaaagggttcttgccttaaaagtgaaaccttcatggatagtctttaatctctgatctttttggaacaaactgttttacattcctttcattttattatgcattagacgttgagacagcgtgatacttacaactcactagtatagttgtaacttattacaggatcatactaaaatttctgtcatatgtatactgaagacattttaaaaaccagaatatgtagtctacggatattttttatcataaaaatgatctttggctaaacaccccattttactaaagtcctcctgccaggtagttcccactgatggaaatgtttatggcaaataattttgccttctaggctgttgctctaacaaaataaaccttagacatatcacacctaaaatatgctgcagattttataattgattggttacttatttaagaagcaaaacacagcacctttacccttagtctcctcacataaatttcttactatacttttcataatgttgcatgcatatttcacctaccaaagctgtgctgttaatgccgtgaaagtttaacgtttgcgataaactgccgtaattttgatacatctgtgatttaggtcattaatttagataaactagctcattatttccatctttggaaaaggaaaaaaaaaaaaacttctttaggcatttgcctaagtttctttaattagacttgtaggcactcttcacttaaatacctcagttcttcttttcttttgcatgcatttttcccctgtttggtgctatgtttatgtattatgcttgaaattttaatttttttttttttgcactgtaactataatacctcttaatttacctttttaaaagctgtgggtcagtcttgcactcccatcaacataccagtagaggtttgctgcaatttgccccgttaattatgcttgaagtttaagaaagctgagcagaggtgtctcatatttcccagcacatgattctgaacttgatgcttcgtggaatgctgcatttatatgtaagtgacatttgaatactgtccttcctgctttatctgcatcatccacccacagagaaatgcctctgtgcgagtgcaccgacagaaaactgtcagctctgctttctaaggaaccctgagtgaggggggtattaagcttctccagtgttttttgttgtctccaatcttaaacttaaattgagatctaaattattaaacgagtttttgagcaaattaggtgacttgttttaaaaatatttaattccgatttggaaccttagatgtctatttgattttttaaaaaaccttaatgtaagatatgaccagttaaaacaaagcaattcttgaattatataactgtaaaagtgtgcagttaacaaggctggatgtgaattttattctgagggtgatttgtgatcaagtttaatcacaaatctcttaatatttataaactacctgatgccaggagcttagggctttgcattgtgtctaatacattgatcccagtgttacgggattctcttgattcctggcaccaaaatcagattgttttcacagttatgattcccagtgggagaaaaatgcctcaatatatttgtaaccttaagaagagtatttttttgttaatactaagatgttcaaacttagacatgattaggtcatacattctcaggggttcaaatttccttctaccattcaaatgttttatcaacagcaaacttcagccgtttcactttttgttggagaaaaatagtagattttaatttgactcacagtttgaagcattctgtgatcccctggttactgagttaaaaaataaaaaagtacgagttagacatatgaaatggttatgaacgcttttgtgctgctgatttttaatgctgtaaagttttcctgtgtttagcttgttgaaatgttttgcatctgtcaattaaggaaaaaaaaaatcactctatgttgccccactttagagccctgtgtgccaccctgtgttcctgtgattgcaatgtgagaccgaatgtaatatggaaaacctaccagtggggtgtggttgtgccctgagcacgtgtgtaaaggactggggaggcgtgtcttgaaaaagcaactgcagaaattccttatgatgattgtgtgcaagttagttaacatgaaccttcatttgtaaattttttaaaatttcttttataatatgctttccgcagtcctaactatgctgcgttttataatagctttttcccttctgttctgttcatgtagcacagataagcattgcacttggtaccatgctttacctcatttcaagaaaatatgcttaacagagaggaaaaaaatgtggtttggccttgctgctgttttgatttatggaatttgaaaaagataattataatgcctgcaatgtgtcatatactcgcacaacttaaataggtcatttttgtctgtggcatttttactgtttgtgaaagtatgaaacagatttgttaactgaactcttaattatgtttttaaaatgtttgttatatttcttttcttttttcttttatattacgtgaagtgatgaaatttagaatgacctctaacactcctgtaattgtcttttaaaatactgatatttttatttgttaataatactttgccctcagaaagattctgataccctgccttgacaacatgaaacttgaggctgctttggttcatgaatccaggtgttcccccggcagtcggcttcttcagtcgctccctggaggcaggtgggcactgcagaggatcactggaatccagatcgagcgcagttcatgcacaaggccccgttgatttaaaatattggatcttgctctgttagggtgtctaatccctttacacaagattgaagccaccaaactgagaccttgatacctttttttaactgcatctgaaattatgttaagagtctttaacccatttgcattatctgcagaagagaaactcatgtcatgtttattacctatatggttgttttaattacatttgaataattatatttttccaaccactgattacttttcaggaatttaattatttccagataaatttctttattttatattgtacatgaaaagttttaaagatatgtttaagaccaagactattaaaatgatttttaaagttgttggagacgccaatagcaatatctaggaaatttgcattgagaccattgtattttccactagcagtgaaaatgatttttcacaactaacttgtaaatatattttaatcattacttctttttttctagtccatttttatttggacatcaaccacagacaatttaaattttatagatgcactaagaattcactgcagcagcaggttacatagcaaaaatgcaaaggtgaacaggaagtaaatttctggcttttctgctgtaaatagtgaaggaaaattactaaaatcaagtaaaactaatgcatattatttgattgacaataaaatatttaccatcacatgctgcagctgttttttaaggaacatgatgtcattcattcatacagtaatcatgctgcagaaatttgcagtctgcaccttatggatcacaattacctttagttgttttttttgtaataattgtagccaagtaaatctccaataaagttatcgtctgttc

SEQ ID NO: 5258 - DNA, 36 bp, Homo sapiens
tacgtgtgtctggataataaaaaagacaggaccctg

SEQ ID NO: 5259 - DNA, 332 bp, Homo sapiens
cccactggggcacacaggtgactttctcctccaacctccatcagtcccagggcccctcctgaggatgctcgccagggaaactggaaacaggggcagggcaaagactgcagagctgcatccatatcagtgctgtgtcagcgttcccagaagacacttactttttatacagtgttgtcttagtctatttatactaaatgtgtactacatgtgactagggaataatgtctagaatttttatatgatctgtatgtaaatgctcagtatgtataatttcatatacgagttctatttggagttgggaaaattcctagcaatggctccctccaatggga

SEQ ID NO: 5260 - DNA, 915 bp, Homo sapiens
gtcttggcagcacctgtctcctttcaccccagggcctgagcctggccagcctacaatggggatgttgtgtttctgttcaccttcgtttactatgcctgtgtcttctccaccacgctggggtctgggaggaatggacagacagaggatgagctctacccagggcctgcaggacctgcctgtagcccactctgctcgccttagcactaccactcctgccaaggaggattccatttggcagagcttcttccaggtgcccagctatacctgtgcctcggcttttctcagctggatgatggtcttcagcctctttctgtcccttctgtccctcacagcactagtatttcatgttgcacacccactcagctccgtgaacttgtgagaacacagccgattcacctgagcaggacctctgaaaccctggaccagtggtctcacatggtgctacgcctgcatgtaaacacgcctgcaaacgctgcctgccggtaaacacgcctgcaaacgctgcctgcccgtaaacacgcctgcaaacgctgcctgcccacacaggttcacgtgcagctcaaggaaaggcctgaaaggagcccttatctgtgctcaggactcagaagcctctgggtcagtggtccacatcccgggacgcagcaggaggccaggccggcgagccctgtggatgagccctcagaacccttggcttgcccacgtggaaaagggatagaggttgggtttccccccttttatagatggtcacgcacctgggtgttacaaagttgtatgtggcatgaatactttttgtaatgattgattaaatgcaagatagtttatctaacttcgtgcggaatcagcttctatccttgacttagattctggtggagagaagtgagaataggcagcccccaaataaaaaatattcatgga

SEQ ID NO: 5261 - DNA, 4496 bp, Homo sapiens
tggcttggaactgacagtgtgaagataaggagagtggaaccaggagctcagagtcctgacagcagcttcagaggaagctcgtttaattttattgtgctcatctcaggaacaaaagcattttttagttaaataatttaacatcaaaacaacatgcaaccaaaaacttctgacatttatagttgatacttgcctatagaaatgtttggtggctggtgtcaaaggtccttaaagcatttgctgccaagttagtggaaggctcacttttgttaagatgactgtaattctccttgttaccgacgagagatcattggaagctgccttctaacactttgtgtagctctgtggagttggattttcttaaggtttaaaaagaatcacagcttcggaacttttaactgaaaatgagagacagaagccacaggggaagcaaagcaaataggattttcaatataaatatcagtgtggaaaaataacctattctgttgaatttagtgttcatgcacttgagaacaacattatttccatttactccgaaaatccttctgtgggggtttgagaaagtgaatgttgcagacatgttctgttgtgttgcactttatcctgtgtttatgtgtatgtgtttttagattaattcaagttgtgtgctatatttcttgtataatttacaaagttacacaaaatataaagagcagtaaacttgtctgaaagtttttggcaaaggaaggtaacttcaatgtaatagcttcctttaagagtacaggaaaatgcattctgtaatgaagtggggcccatgtaattgtttatattttcagttttaagcaggtatagtgcaggcttgttaggaatgtgtggaagggaagattggaagtgatttttcctcttttaaaagtaaacaaaattcttcaaatatgccctagttaactatttcagcataccatttttacttggttaacagtgtacattttgataacctatcaggaatgaataaagtatttttatttaaaggtgatattgttttatgcttccatgaatattttgcttttcttagagcatattcatagatgcagtactgtgatttaccacaagataattgggaacactttctcaaaatcgattttggttaatatcaggtaaatcattacctaggagtaagagggaaattgttgtcaattcctgactttagattgatccagcagaaagaaaaggtggaactttgtatatatccactgttgaaagttgcatgacctgacttcctgttttctaaagttgggggaatattattgaacttcaatttcagaactgcatttcaatttggggcttggaaaatgtagttaaatcaatttcgttctctaaattttctaagcaggaaagcaatgtaaaccaaaaatcaaaatgtttagaatttataaaaatggggttatatagcttttaattttagtttcctttttactgccaaaaaacttaaaaagacaacagcgtaaccacctgtttaagcaccgtgggaccatctcttattcgggtagagcctggtcctggcgacacactaacaggaaggcgtgctgtgttaccgggaaggcgcctctggctgtggggtgcgttctgaccaccccgctcagatgccagcattttccatttgcccttaaggaaacttgctatgtgtgttaacccagttatgattagtcaaactggaaaacacttgatcaaacttaaaattgtaaaatctgtctaacttttaaatatactttccacagttgtacttaagttcaattaactacagtatagagaaaaataattattctcttctttgcacccggagttgcaaacaaattaagtttacaaatctcatttaaacatatatctttgtaatgtaatctccgcggttctttctttgttctaccctcctgcacctgttgtcgatgtaatcattttgggaacagaaacgttgtgtctcaaaaagattcgttgtcagttcagccaagatgttctttacctgagattctggaaagatgtttatctatatcggaacacttctacattattaaatgtccttaagctttttcttttttacaagtgtcttttcagactttggtgttgtgatgacacagtagaaagagcgtggctagaatccgtggtttgccacatctgcagcttaccaaacggatgacttgtccaggacatctgatccctgtaagcctcagcatccctcctggtaaatggagggttttttacgacaaagcccaaagggaggttttggatgattaggctgtgtgtgcgtgtgagaatgatcacatgtggcgtcatgctttgtacagagcctcagaccactgggcctcgtccagtgagagtcctctctggcgacatcacacgcggagcagccaggggccaccttagatctcagatctctcagagcaatacttttctgaactgccactgtgcctgggtggttgggttggtgtcatgcttctgactagagtagatcgcgcatgtccaccagtgatacgttgagtccttacagttccccccatggagtcccataagcagctccatcgagatctgtcagcaagttgcaggaccccacaatgttctgacatgttaagacccccttacatgacgagtagagaggcagctgaggccacaaccgtgtcttcctcttgaatggagctaactcggaaccccccgttttctcttcctttctgcccaccactgaacattgccttttagataactcagtgtttcttctagatgtcatagcaatagactttcactttcatgaagtttgggtacgatttggattctcgcttaagtacatatatttatcaatatttttataaggcaaagttcacttaaaaaatctttccaagtagcagtgtgcctaagatggcaaaatactaaaaactggtgtttcctgctcctgttgtgtgtcacttttcaagccgattgaaatatttctggcttttagggcattactttttaactatctcctttaaaaacgatgttctgtaggtttagtgtctttgttcatttccaaaagagtccagacaactgtgtctgcccctgcagaggctgtttgtccaaaggcagcatgccgcttccaccggaatgcagacagcaggggagcggaattctaaagcagcgacttaaaatgaggaatccccaattgcactaaatggtttcaggattgactaatcattgtcttaacattaactcagattttcaatgtgtaaagagctgtgtgacttggcgtctgagagatccctctgctttgctttgcttcagagtcctcgcacccgcatcctcagaactgtggggcatggtgggctctaacgagcactccccttctgttttccttcattacttttgacctccttaagacttcagagagaatgtccgtcaagttcttttctccatcaagttctttaagttccttgaaaggaagggactgtgcaaacacaaagcaatattcttttgtatctgcaaatgcatcagctggacataccaattggtatcaaatagaataaaatcaaatataaatgtttgagtcttaggttaaaaaggaaggttatttgtatagtttatagataatgaaggaaaaatttctttttcattgcaggaaatcttgtttactggaagatagagtcactcttttcatataagacaaatagtgctttaatgccaacttctttttatctcaacatttcaggatcatgctaggcacactgcccccttgaatagacattatatgcacagttgcaagtcagccaatgtttttattcagaagtatttccccccattatagtgcctgcatatcagagatacaaaaagcatccaacacactaccgtaataggcttctttggggatgagaaatttgagtctcaacaactcagagtttgagatgtcagcttttttggtaaacgtaggtgttagaggtatattttgctttcctacaacaattgttggcccttgatttcaagcatgttgcttcataggaagcaccagagtgccatctgctgcatttcaagagattgtaaatgtcatctcagctggctcagttatatctctaatgtcccgggtagcagcacctccctctaaaaatatgtttacttcactgtttcacttgtattttgtgtatacgaaatggcagcttccgatttctagttggatttgtcttgcattgtttgtataacttgctggtcacccagggctatttgctttttcattgagaaatttggtaggggtgtctagttcagcttttatgttgatccatcctgacttattttagacattgaatttatctcaccacaagtaaaagaacatgtgtattgactgtctttgctaagtttcctaatttttcctaattatggcaattatggatgtgaataagaatactgatgctgtacaaatatttttgtggaaatgtaccttgttaatgtgactatttaaataatatgaaaataagaatactcttgaagaaaaaattaaaatatttactctttgg

SEQ ID NO: 5262 - DNA, 4861 bp, Homo sapiens
gcgcgcgggccccggcgccccgcacctgtacagtggaaccgttgccaaccgagagaatgctgacctgacttgcctccgtgtcaccgccaccccgcaccccgcgtgtccccggggcccaggggaggcggcactccaacctaacctgtgtctgcgaagtcctatggaaacccgagggttgattaaggcagtacaaattgtggagccttttaactgtgcaataatttctgtatttattgggttttgtaatttttttggcatgtgcaggtactttttattattattttttctgtttgaattcctttaagagattttgttgggtatccatcccttctttgttttttttttaacccggtagtagcctgagcaatgactcgcaagcaatgttagaggggaagcatatcttttaaattataatttggggggaggggtggtgctgcttttttgaaatttaagctaagcatgtgtaatttcttgtgaagaagccaacactcaaatgacttttaaagttgtttactttttcattccttccttttttttgtcctgaaataaaaagtggcatgcagttttttttttaattattttttaattttttttttggtttttgtttttggggtggggggtgtggatgtacagcggataacaatctttcaagtcgtagcactttgtttcagaactggaatggagatgtagcactcatgtcgtcccgagtcaagcggccttttctgtgttgatttcggctttcatattacataagggaaaccttgagtggtggtgctgggggaggcaccccacagactcagcgccgccagagatagggtttttggagggctcctctgggaaatggcccgacagcattctgaggttgtgcatgaccagcagatactatcctgttggtgtgccctggggtgccatggctgctattcgctgtagattaggctacataaaatgggctgagggtacctttttggggagatggggtggcctgcagtgacacagaaaggaagaaactagcggtgttcttttaggcgttttctggcttgacggcttctctctttttttaaatcacccccaccacataaatctcaaatcctatgttgctacaaggggtcatccatcatttcccaagcagacgaatgccctaattaattgaagttagtgttctctcatttaatgcacactgatgatattgtagggatgggtggggtggggatcttgcaaatttctattctcttttactgaaaaagcaggggatgagttccatcagaaggtgcccagcgctacttcccaggtttttattttttttttcctatctcattaggttggaaggtactaaatattgaactgttaagattagacatttgaattctgttgacccgcactttaaagcttttgtttgcatttaaattaaatggcttctaaacaagaaattgcagcatattcttctctttggcccagaggtgggttaaactgtaagggacagctgagattgagtgtcagtattgctaagcgtggcattcacaatactggcactataaagaacaaaataaaataataatttataggacagtttttctactgccattcaatttgatgtgagtgccttgaaaactgatcttcctatttgagtctcttgagacaaatgcaaaactttttttttgaaatgaaaagactttttaaaaaagtaaaacaagaaaagtacattctttagaaactaacaaagccacatttactttaagtaaaaaaaaaaaaaattctggttgaagatagaggatatgaaatgccataagacccaatcaaatgaagaaataaacccagcacaaccttggacatccattagctgaattatcctcagccccttttgtttttgggacaacgctgcttagatatggagtggaggtgatttactgctgaattaaaactcaagtgacacaagttacaagttgatatcgttgaatgaaaagcaaaacaaaaacaattcaggaacaacggctaattttttctaaagttaaatttagtgcactctgtcttaaaaatacgtttacagtattgggtacatacaagggtaaaaaaaaaattgtgtgtatgtgtgttggagcgatctttttttttcaaagtttgcttaataggttatacaaaaatgccacagtggccgcgtgtatattgttttcttttggtgacggggttttagtatatattatatatattaaaatttcttgattactgtaaaagtggaccagtatttgtaataatcgagaatgcctgggcattttacaaaacaagaaaaaaaatacccttttcttttccttgaaaatgttgcagtaaaatttaaatggtgggtctataaatttgttcttgttacagtaactgtaaagtcggagttttagtaaatttttttctgccttgggtgttgaatttttatttcaaaaaaaatgtatagaaacttgtatttggggattcaaaggggattgctacaccatgtagaaaaagtatgtagaaaaaaagtgcttaatattgttattgctttgcagaaaaaaaaaaaatcacatttctgacctgtacttatttttctcttcccgcctccctctggaatggatatattggttggttcatatgatgtaggcacttgctgtatttttactggagctcgtaattttttaactgtaagcttgtccttttaaagggatttaatgtacctttttgttagtgaatttggaaataaaaagaaaaaaaaaacaaaaacaaacaggctgccataatatatttttttaatttggcaggataaaatattgcaaaaaaaacacatttgtatgttaagtcctattgtacaggagaaaaagggttgtttgacaacctttgagaaaaagaaacaaaaggaagtagttaaatgctttggttcacaaatcatttagttgtatatattttttgtcggaattggcctacacagagaaccgttcgtgttgggcttctctctgaacgccccgaaccttgcatcaaggctccttggtgtggccacagcagaccagatgggaaattatttgtgttgagtggaaaaaaatcagtttttgtaaagatgtcagtaacattccacatcgtcctccctttctctaagaggccatctctaagatgtcagatgtagaggagagagagcgagagaacatcttccttctctaccatcactcctgtggcggtcaccaccaccacctctcccgcccttaccagcagaaagcaatgcaaactgagctgctttagtccttgagaaattgtgaaacaaacacaaatatcataaaaggagctggtgattcagctgggtccaggtgaagtgacctgctgttgagaccggtacaaattggatttcaggaaggagactccatcacagccaggacctttcgtgccatggagagtgttggcctcttgtctttcttccctgctttgctgctttgctctctgaaacctacattccgtcagtttccgaatgcgagggcctgggatgaatttggtgcctttccatatctcgttctctctccttcccctgcgtttcctctccatccttcatcctccattggtcctttttttttctttcattttttatttaatttcttttcttcctgtctgttcctcccctaatcctctattttatttttattttttgtaaagccaagtagctttaagataaagtggtggtcttttggatgagggaataatgcatttttaaataaaataccaatatcaggaagccattttttatttcaggaaatgtaagaaaccattatttcaggttatgaaagtataaccaagcatccttttgggcaattccttaccaaatgcagaagcttttctgttcgatgcactctttcctccttgccacttacctttgcaaagttaaaaaaaaggggggagggaatgggagagaaagctgagatttcagtttcctactgcagtttcctacctgcagatccaggggctgctgttgcctttggatgccccactgaggtcctagagtgcctccagggtggtcttcctgtagtcataacagctagccagtgctcaccagcttaccagattgccaggactaagccatcccaaagcacaagcattgtgtgtctctgtgactgcagagaagagagaattttgcttctgttttgtgtttaaaaaaccaacacggaagcagatgatcccgagagagaggcctctagcatgggtgacccagccgacctcaggccggtttccgcactgccacaactttgttcaaagttgcccccaattggaacctgccacttggcattagagggtctttcatggggagagaaggagactgaattactctaagcaaaatgtgaaaagtaaggaaatcagcctttcatcccggtcctaagtaaccgtcagccgaaggtctcgtggaacacaggcaaacccgtgattttggtgctccttgtaactcagccctgcaaagcaaagtcccattgatttaagttgtttgcatttgtactggcaaggcaaaatatttttattaccttttctattacttattgtatgagcttttgttgtttacttggaggttttgtcttttactacaagtttggaactatttattattgcttggtatttgtgctctgtttaagaaacaggcacttttttttattatggataaaatgttgagatgacaggaggtcatttcaatatggcttagtaaaatatttattgttcctttattctctgtacaagattttgggcctctttttttccttaatgtcacaatgttgagttcagcatgtgtctgccatttcatttgtacgcttgttcaaaaccaagtttgttctggtttcaagttataaaaataaattggacatttaacttgatctcc

SEQ ID NO: 5263 - DNA, 932 bp, Homo sapiens
ctcgaggtgaagctggatgggggatccagtggagcaggagttgacggacagtccgttcacatcgctgtgtttccttgttaacatttttctttctgcagagaggaagatatgtttttgctgctttatataaaaatggtttttttaagttattttaaaaatctagcttccctttttgattaagattgccatcttgcttttaggcaaaacaaaccaattaacaaacaaccacaagaaagggagaagaggtgcctgtgggagattttgcagacctattgtgggtataggtattttcttcctggggaagaattcagttcccgtctcagctgtacttttgtgggcctgtcatcttgatgaccagaatgaaagcttgctctgcctcctgccagccagaattggtggcgggacttggggatacagcgtgaaggtggggaagttgcacagcagaaaacagaattgaagttgggaaactctagagtctgggcaaaatgtttggttttttctcttaaaaaaaataacaccccattaccaaaagaaaaggtaaggtggcaaccttatttttaatagtttgaaatgatgataatcctaattatataaaaatatatatataaacacacatatatatagtgatttctaaagatttgtttacttttgtgttttgttttactgtactaagaacttgtcctttctccttgaatcaaagtaggacatgcatcatcctcctaattttaaatgttggctctgattttaaagtggtgcatttgattccagccttggtaatggagagtttgcaaacacacagcggcccacagcttcacgtggtggtgtgcagtgtgaggcagctccttggctttcctggttttcacaacaagctagagattttcaaagctacacttttgagtaaaaacccttattaaaagaaaaacatgattaat

SEQ ID NO: 5264 - DNA, 369 bp, Homo sapiens
gaccctccattccttaggcacttacgggactcactcatagacctcctccagcgtggctgccctgagcaccctatgtggaatgactacgcctccagctcatccgccctcctgccctgtcctgttacatttccctctattgtccagatccgcttgtttctgcctttttaaaaaattattgttggttcacccccccgcctcccattagaatggaagatccatgaacgcagggtgattttgggggagggtctgttttgctcattgctatatcgctgtggtttttaatgaattcatgaccggtaaataaatgactgtaaaagccccatgcctaggaaaaaagatcagaaagaaataaaccaaaatgttaacgtg

SEQ ID NO: 5265 - DNA, 341 bp, Homo sapiens
gcccgggctgcctcctggtggtggccattgtcccccatcggcccctcagccttgcaccccagcactgagaagctacatttccttcctgtgctctggactgctgcccttgtccccgaggagtgtcccgcgcagccacacctggcaacagcagtgtgggctgcagggctccgtctgcacgtggacttgccctggaccttgagtgtggccctccctttctgggcctccccaggtgaggcctggccctgccccaccatgacctgggtgctctgagcccacggttcccacggagctgacttctccggggtgcctgtgccctacattaaacccggcgtttgtttcac

SEQ ID NO: 5266 - DNA, 1087 bp, Homo sapiens
cactcgttttacatatgcttataaaagaagtgatgtatcagtaatgtatcaataatcccagcccagtcaaagcaccgccacctgtaggcttctgtctcatggtaattactgggcctggcctctgtaagcctgtgtatgttatcaatactgtttcttcctgtgagttccattatttctatctcttatgggcaaagcattgtgggtaattggtgctggctaacattgcatggtcggatagagaagtccagctgtgagtctctccccaaagcagccccacagtggagcctttggctggaagtccatgggccaccctgttcttgtccatggaggactccgagggttccaagtatactcttaagacccactctgtttaaaaatatatattctatgtatgcgtatatggaattgaaatgtcattattgtaacctagaaagtgctttgaaatattgatgtggggaggtttattgagcacaagatgtatttcagcccatgccccctcccaaaaagaaattgataagtaaaagcttcgttatacatttgactaagaaatcacccagctttaaagctgcttttaacaatgaagattgaacagagttcagcaattttgattaaattaagacttgggggtgaaactttccagtttactgaactccagaccatgcatgtagtccactccagaaatcatgctcgcttcccttggcacaccagtgttctcctgccaaatgaccctagaccctctgtcctgcagagtcagggtggcttttcccctgactgtgtccgatgccaaggagtcctggcctccgcagatgcttcattttgacccttggctgcagtggaagtcagcacagagcagtgccctggctgtgtccctggacgggtggacttagctagggagaaagtcgaggcagcagccctcgaggccctcacagatgtctaggcaggcctcatttcatcacgcagcatgtgcaggcctggaagagcaaagccaaatctcagggaagtccttggttgatgtatctgggtctcctctggagcactctgccctcctgtcacccagtagagtaaataaacttccttggctcctgct

SEQ ID NO: 5267 - DNA, 818 bp, Homo sapiens
gcgcctgcgtgcaggcctggccgtggttcgctccccgccagcccacgtgccccagaagggccggcctcacctctccccagcccccgctgttcccctgccccggccaacaacgaggagtctgttcctccccgcacctcctctcctccccagccctgtaggcctgaggggagggtcccccacaccacggtgtccacccggccccggcccgtggaactccacttagagcgtttttcacgcgtccttcccccatgtgagaggagcatccccccttttataaagcgaaactatttttatagagaaaaagggtctttcttaacgcacttggcctccagctccctggacggctgccttggcgttttcaacacaaagctcctttattttttgggcgagggtgcgtggggcctgccccttggaagggaagggaaggacggtgtcctgtggagaccagactctgcaagtggggagaccacccccgcaagccagtgacaagggagccctgaagttgtgtccacgaagagggagctgaaacaaattcggggctatgaagtgttttaaaaatccattcttcgcagtgtggccaccacaccgccctgagccctcccacggcccatcgtcccgggtgggccgggatgatgccccagtgcggccggtgctcatctccgcccccgggtccgccccctgacaccgtcttactctacctcagacatgaggaggccctccattcctggtttctgtagcttgcattcttgttgtctctgatgcatgccctgccagttagtactgtattttgcattcattaataaaagacaccggtggaa

SEQ ID NO: 5268 - DNA, 974 bp, Homo sapiens
tctctggctgagggatgacttacctgttcagtactctacaattcctctgataatatattttcaaggatgtttttctttatttttgttaatattaaaaagtctgtatggcatgacaactactttaaggggaagataagatttctgtctactaagtgatgctgtgataccttaggcactaaagcagagctagtaatgctttttgagtttcatgttggtttattttcacagattggggtaacgtgcactgtaagacgtatgtaacatgatgttaactttgtggtctaaagtgtttagctgtcaagccggatgcctaagtagaccaaatcttgttattgaagtgttctgagctgtatcttgatgtttagaaaagtattcgttacatcttgtaggatctactttttgaacttttcattccctgtagttgacaattctgcatgtactagtcctctagaaataggttaaactgaagcaacttgatggaaggatctctccacagggcttgttttccaaagaaaagtattgtttggaggagcaaagttaaaagcctacctaagcatatcgtaaagctgttcaaaaataactcagacccagtcttgtggatggaaatgtagtgctcgagtcacattctgcttaaagttgtaacaaatacagatgagttaaaagatattgtgtgacagtgtcttatttagggggaaaggggagtatctggatgacagttagtgccaaaatgtaaaacatgaggcgctagcaggagatggttaaacactagctgctccaagggttgacatggtcttcccagcatgtactcagcaggtgtggggtggagcacacgtaggcacagaaaacaggaatgcagacaacatgcatcccctgcgtccatgagttacatgtgttctcttagtgtccacgttgttttgatgttattcatggaataccttctgtgttaaatacagtcacttaattccttggcctta

SEQ ID NO: 5269 - DNA, 448 bp, Homo sapiens
ctgagcagcaccgtcgtctcgacttcggaggcaacaccaagcccgaccgggccaggcctgggtgatctgctgctgagacgccacggagggctggggatgcgcctgcgtccgtttcgcgctggccggggctctgggtgctgccctgcgccctgccgcacccgcggcccgcgcagctgcctaggatgttctgggctaatatacttgtaaaaccaccgcattctagggttttctttcattttcgttaagaatttggggcaggaaatactttgtaactttgtatatgaatcaaaacaaacgagcaggcatttctgtgatgtgttgggcgtggttggaaggtgggttctgcgtgtcccttcccagcgctgctggtcagtcgtggagcgccatcatgtcttaccagtgacgctgctgacacccctgacttttattaaagaataagctgtcgtta

SEQ ID NO: 5270 - DNA, 273 bp, Homo sapiens
cgtcctgagacggctgcggacactggctccttccacgtctcaccaggcagacagtctgcctaggacccagtgccgcaggcctggatcagaccccaggatcagaccttggggtcttctggccagagcttgtcaccagccccatggcctctccaggcgtgctcatgcccacaacccgcggccagccccacgtggtgctgctcagccttctctgcccctcctgggaatctgtcattcgtgggtgcttcagagtaaaatcaatgagtttctgagcag

SEQ ID NO: 5271 - DNA, 75 bp, Homo sapiens
gcccggagcaccctaggcgctggattttgggacaaaactatttttcagagcgttgtaccggcactttatatatat

SEQ ID NO: 5272 - DNA, 1333 bp, Homo sapiens
agccgccagctcgccacaggggccagggagctggagatggcctccagcgtcagtgccaagactgagcgggccctccagtgttgtccaaggaaatgtagaatcactttgtagatatggagatgaagaagacaaatctttattataatattgatcagttttatgccgcattgttcgtggcagtagaccacatctgttcgtctgcacagctgtgaggcgatgctgttccatctgcacatgaaggacccccatacagcctgtctcccacccctgacaacccgagagggcatatggggccctgccaacaccacttcctcagcagaaacccgtcatgacgcggctgcttcggaagcagacatctggggacacagcctcagtacccagtcttttccctagttcctgaaactttcctaggaccttaagagaatagtaggaggtcctatagcattcccagtgtcactagaattttgaagacaggaaagtggaggttagtctgtggcctttttttcatttagccattgcacagtcagctgcagaagtcctgctgaccacctagtcatggacaaaggcccaggaccagtgacaccctgcgtccctgtgtgcattaagttcattctgggtcgcagccatgaagtgtcaccagtatctactactgtgaagtcagctgtgctgttttccattcgcttccacggcttctgcctcctgccataaaaccagcgagtgtcgtggtgcaggcaggccctgtggcctgctgggctgagggaagtcagagccccagggcgccacgaagcagccactgggataccccaccccgccccgccctgcccgcccccccccccaccagtcctgcccccgcatggagcccccgtgattagtagcccgtatgatcacgtagacccacccaacacactcctgcacactggccccggcccacggcacagcaatcccctgcgcgtggatttcacctcaccctttgtaccagatgttgagtgaccagctctgtggccctgtgtcgtcagaggcttgtgattaactgtggcggcagacacagcttgtccacagcttgggccaggcttcccctgtcctcccaccggtcggctgcttggcaaggctgttcaggacgtgcacttccccaagtcggcactgagtggcccagcaccgcctagccctgccaccccactgccctcctgggccttctgctggatgggcacctggggggttctggtttttacttttttaatgtaagtctcagtctttgtaattaattattgaattgtgagaacatttttgaacaatttacctgtcaataaagcagaagacggcagttttaaagttc

SEQ ID NO: 5273 - DNA, 205 bp, Homo sapiens
agcccggcccacacccgacaccagccctgctgcttcctaacttattgcctgggcagtgcccaccatgcacccctgatgttcgccgtctggcgagcccttagccttgctgtagagacttccgtcacccttggtagagtttatttttttgatggctaagatactgctgatgctgaaataaactagggttttggcctgcctgcgtctg

SEQ ID NO: 5274 - DNA, 3269 bp, Homo sapiens
aataccagagatctcacttttgatactgttttgcacttcatatgtgcttctatgtatagagagctttcagttcattgatttatacgtgcatatttcagtctcagtatttatgattgaagcaaattctattcagtatctgctgcttttgatgttgcaagacaaatatcattacagcacgttaacttttccattcggatcattatctgtatgatgtggtgtggtttgtttggtttgtccttttttttgcgtttttaatcagaaaacaaaatagaggcagcttttgtagattttaaatgggttgtgcaagcattaaaatgcaggtctttcagaatctagaactaggcataaccttacataatactaggaaaattatgagaaaggggaaatttttggttaaataagagtaaggttcaaacacaagcagtacatgttctgtttcattatgctcgatagaaggcttttttttcacttataaggcctgattggtcctacccagcttaacggggtggggtttttttgtttgttcagacagtctgttcttttgtaaacatttttagttggaaaaacagcatctgcattttccccatcctctacgttttagagaggaatcttgtttttgtgtgcaacataagaaaattatgaaaactaatagccaaaaaacctttgagattgcattaaagagaagggataaaggaccagcaataataccttgtaagttgcttttgtttgtaaaatctgagcttatagttttccttagtgagtaaattcataaggatgggaacatttaaattaagttaatgggcctttaaaaaaaaaaaaaggaaacactcatacctgtagttggaggatgaatactggagacgggttaccaatgtcaggttatactaaaactaaatcagaaagtctgaatgtagcacataatggttctcttctgttgtccaaggctgtaaaatggacagccttgtcacacctccccggtgctgttttacaacgtgagggtagacgctgtcagtaacccagagggaccaggccttcctaggttttctaggcagtcagctgttaaccactcacttagtaaatgtcataactacacctgctccaggaccaatcagtgaaacctgctcggaattaaaggcttcctctgggtgcctgctgaacaactgagctcatgtcatgggcatgtggtggtttctctgttgcctgaaagagccattaaagtcagtcgtgcgtgaagcatctctcttctaaaggatgtgtatttccataaatgctttctgaggatccggtacaaaatgatttcccaaagttctgaagtgccttgagaacatgtgggtccgagtgttataacagactcctcccccgggtcaccttttgcctggtcatcctgttagagtacatctttggaaatccagggtaatattctctttcagagatgctcattgtgtaactctgtgtagggagatagtcactttaaacagctcaaagtagctagctaaaggagtagccttaaatacctaaaagatgacagaagcatagcccttaacaaatcttcagcttgtctctcagtatttcccaatcatgaaaatcccttgctatgtctttcctactagaaatgttctagaatcgctggacggtggggtcagagggcagtcggtatttaggccgtgagcttcccatactactgcaggtccaactcctggcaaccgcgggctcaaggcaggtcattggaatccacgttttggccacagtagttgtaggattgcttttctgtatcataattttagaatgctcttaaaatcttgaggaagagtttttattttttatttatttttgagatggagtctctgttgcccaggctgcagtgcagtggtgccatctcagctcactgcaacctccacctcccaggttcaagcgattctcctgcctcagccacctgagtagctgggagtacaggcatgtggcaccatgcctggctaatttttgtatttttaatagagttgagatttcaccatgatggtcaggctggtctcgaactcctgacctcgtgatccgcccgcctcggccccccaaagtgctgggattaacgggtgtgagccacggcgcccagcccaggaagagtttttaaattagagctctgtttaattataccactgggaaatcatggttacgcttcaggcatattcttccccagagtactacttacattttaaatttcattttgtaaagttaaatgtcagcattccctttaaaagtgtccattgttctttgaaagtagacgtttcagtcattcttttcaaacaagtgtttgtgtaccttttgccaagctgtgggcatcgtgtgtgagtacagggtgctcagctcttccaccgtcattttgaattgttcacatgggtaattggtcatggaaatgatcagattgaccttgattgactgtcaggcatggctttgtttctggtttcaatctgttctcgttccttgtaccggattattctactcctgcaatgaaccctgttgacaccggatttagctcttgtcggccttcgtggggagctgtttgtgttaatatgagctactgcatgtaattcttaaactgggcttgtcacattgtattgtatttttgtgatctgtaatgaaaagaatctgtactgcaagtaaaacctactccccaaaaatgtgtggctttgggtctgcattaaacgctgtagtccatgttcatgccaaaaatggctgggaacgtttgctttatttacattcagtcagcgttgctttcagatcacactttatccacacaggaaagccagtcagcctataatgaagtagttattaaaataaatgtaatgaatatgtctacaaagtatagtttagtggtttattttgctaaaatgcacatatatttgatataatttagtttgagaagttcagctagtttttctcctttgtttgactttgtcaatttctatctggtttttaagggtctgagcttagcttgtgcatgcaaggttttgggtttttttattttttttttgagcacagcttttcaccttttaatttgttgggtatttttctcttaataagagaaatattggccatcgatttttacatataatacaagtgtgtttttccagtacattggttcctgtcccctctctgtgaactgtttgagtattggaacagtatgtcttcaataattcaatgttactttgagatacatgtgttaatatacccttagttattcttgaaataaaaccagtctcttacgcttgcagtgg

SEQ ID NO: 5275 - DNA, 1181 bp, Homo sapiens
cacggtggcggctgcacaacagccctgcctgagaagccccgacacacggggctcgggcctttaaaacgcgtctgcctgggccgtggcacagctgggagcctggttcagacacagctcttccagggcagcggctccactttctcatccgaagatggtggccacagactgacccccatctgagctggggggatgttctgcctctccctgggtctggggacaggcccgcttgctgggtacctggtccccactgctgagctggcccttggggagaggtgattctcagggctggagcctggggtgtcctacagtgactccctgggagccgcctgcttcttctctccacatggaagcccaactggggttgcgtctgaggcctgccccctgggctggggcctcagaccccctcagccttgggaccgtgcccacgagggtctcccctcctgcacacagggcagtccttactcccccaccactcaggccacagtggggctgcaggcaggcggctcctcctcacccacctctgggtccttggctcccgggggccccacctcggcacacactgtgccccacaaaacttcagtgtggtacaaggtggagaaagcatatcccaccaacctccagtgtcagggtccaggagagcctgggggtggggggactgccttgtctctagtagtgtggcctgtgccagcaccacagccggtcagaggagcgcaggcagcgcagggctggcacgtgacaggctcgtcagccacctgggaacacagttctgggcaaagaggatccgaggttgagaggaaggagggtcccggtgtatcctggccctgggggtctgggcgtccagctcagccctggcctggctgggtggtattctggtagggatatggcaggactcctggcagggccacctgcaggaccctgtcctgcagtcccacactgtgcagacccagtcccacactgtggccaggccttacatctggctggaaagcagagcctcctgggaacacatctggctgcacaggctgaaatatccacccagcaggcagagtggcgtggcctccccatgggcacagtggtgacccccttgattcccaccgtacaaccccctccaccccccactcagtgcctccacatgctgcctggcacagaccaggcctttgacaaataaatgttcaatggatgca

SEQ ID NO: 5276 - DNA, 1403 bp, Homo sapiens
acttccttttggagcaccgcatggtcttgccagctaccaggagccacttaagagattattgtgctgttttccaggaaagctgcagctagaaaatggtcttaatggtgctcactttagcagacagcgtccacaatgtgaatcctacagtttccaggtgaggccctttctccagtttgcccattaactgggagaggtactttcgcctccaaggactgaattttgccaattactataaatccaaataaatacccactttcaaaacacccacccctcttgccattaagaagtcccataacccccggttggttgccagtgaagacagaagctcttactgacttggccccgaggccatcaccccctccagcagtgaacactgtccgccgctgtgaggcctgctcccctgcgaccgccctgccccccgtcaccgaatcggacactcatcctttctcacacttcccacacatgatccttcttcccttcatcaccaaaggagcctctgtatggaaacatgtccagtgttgctgcccagtgtgtatgcctcccagtacccactctgctcggccgccttgggggttccgcttcctgttccagttcacctaaaggctgattgtgcaggcccagcactgtggctggactgccgcgccacgggcaccaggacccctaagaccaagtgacaactgggagagcctcagcatatactcttctcctccgatctcacagcctgtcatgctgctcagtgtggttctcacccctgcaagctcaaattcagttccctgaatggagtcaggtgctggaggccgtggcagcggagggtggttggggttggggctgggggtggactggtgtgagggcagaccagggccaggtagacggggctgtttggtgcctgaaggatggcagacgcctggtgtcaggaggggccgccaccaaggagcagcagctggggcagaggagctggggtcaggggccacccctctctgccgatctccctgcctgggctggctgtgaggccacctttgtcccaggcccagcctcaaggcaaggagggcgcttcactgaggtgtgaattgtacgtacaggctttttatataccaaaagtattttttgactagaccattcaaagctacccgaactatgttggaaattttttttttctcattaaaatacaggcccttaggctctatttttcatgtatgagtcgtgtgtaatttatgtaaaaatgtgtgtacagactcactgatgcagcactgtagcccatcaccttggagcactgactgtacatagtgtggtgaagaaaagtgaacgcccttgtagagcagcccgaccacaggagcatggccgctgccagcccagacgctgctgacgctgtgtaaatgtgcacaataaacccgtctcaccccggc

SEQ ID NO: 5277 - DNA, 376 bp, Homo sapiens
ccagatttacttggagtacatgtgaaagaaaacgtcagtctgcctgtaaatttcagcaagccgtgttagatggggagcgtggaacgtcactgtacacttgtataagtaccgtttacttcatggcatgaataaatggatctgtgagatgcactgctacctggtactgctttcagtgtgttccccctcagcccctccggcgtgtcaggcatactctgagtagataatttgtcatgcagcgcatgcaatcagaatctcactgagccacccatcattgtgaaataattacctcagttgtacaggacttggtgatcaggatccaggcactcacttgtattctactgctcaataaacgtttattaaacttgatcctgctact

SEQ ID NO: 5278 - DNA, 1010 bp, Homo sapiens
gctctcccccatccagaggaggaggcaggctcctgtgtggataaggtagttagcaatgggaccaggcagtgggagcagtcgggaaggcttcctgcaggaggtgggggagagctgggcttttgtaggtgggtttggggaggagatggccacagtgagttagaatcaggaagtggcaaggccctggggtctggggtgggaagtgtgggggtgtggggggaggtggtgccagaaacgaaaccaggcatcagatcctgggggtccagtgtagggacaagggctttggactttggtgctggcgctgggtgggcctgttcagatcagagctggaggcttagaggagtcccctagccagggggaagctgatacagagtccaaggaaggaggcaggggatcccacttgtgaattcagatttgccaccctgcccttgtataagctgcgtcccccgccccctaggagacttggtggagggcgatggtggcccccactctgagggacgctatttgctgaaatgcaggcatgtggggacacatcagtggcccgtgagggccggagggggaaccctggaattgggtttgccccttgaaatctgcagatgtgccccagacggagatgaggcagatgaggggtgccgggtgggggtggctgagaccagacacctggctcctgccagcactgatcagggcccgctggcttcaggtccaattccggaccccaggctggcctctgaaggctcttgctggccgtggctggcctgaggacgcttctcctggccaggagccctccaagggtgctggacatgggtgggcctgaatgctctttgccgagatgaactggacctgtcaaagacaccttcatgcaaatttagtgagtggaagaggcctcaggcctaatttgtgccagttggattaaggtgtgagtgcagtctgatggcaaatacgctcaaatgagaatcagcttaatgtagctcaggcctggttctgattaaattgtttctccttcaactgtttgg

SEQ ID NO: 5279 - DNA, 989 bp, Homo sapiens
ggcggcggtggactgcgctggacgatagcttggagggatggagaggcggcctcgtgccatgatctgtatttaatggtttttatttctcgggtgcatttgagagaagccacgctgtcctctcgagcccagatggaaagacgtttttgtgctgtgggcagcaccctcccccgcagcggggtagggaagaaaactatcctgcgggttttaatttatttcatccagtttgttctccgggtgtggcctcagccctcagaacaatccgattcacgtagggaaatgttaaggacttctgcagctatgcgcaatgtggcattggggggccgggcaggtcctgcccatgtgtcccctcactctgtcagccagccgccctgggctgtctgtcaccagctatctgtcatctctctggggccctgggcctcagttcaacctggtggcaccagatgcaacctcactatggtatgctggccagcaccctctcctgggggtggcaggcacacagcagccccccagcactaaggccgtgtctctgaggacgtcatcggaggctgggcccctgggatgggaccagggatgggggatgggccagggtttacccagtgggacagaggagcaaggtttaaatttgttattgtgtattatgttgttcaaatgcattttgggggtttttaatctttgtgacaggaaagccctcccccttccccttctgtgtcacagttcttggtgactgtcccaccgggagcctccccctcagatgatctctccacggtagcacttgaccttttcgacgcttaacctttccgctgtcgccccaggccctccctgactccctgtgggggtggccatccctgggcccctccacgcctcctggccagacgctgccgctgccgctgcaccacggcgtttttttacaacattcaactttagtatttttactattataatataatatggaaccttccctccaaattcttcaataaaagttgcttttc

SEQ ID NO: 5280 - DNA, 1264 bp, Homo sapiens
gcaggagccctgagtgctcacagccgcctctgacgcattgacacgtgagcactggctcccacggagggtgcgcctgccgccagcggcccagccttgctgccctgtctgctgattctgagaaatcccagaacagcccattaccagtggggctgcagccctaggcccgtcccactcacctcccccctgtggagcgccaggcagaggctgttctggaaggcttcttgtcttctgacgtccccacagccctgggcccctcgtgtctctttgtgtcccccactgtagaggacggtgagccgcagctgcatcaacctccttttacctttagataggtgaatttttacaattcagttttacatgttttgggcagtattttgtcttaagatatattttttaaactttttataccttatctctttagattttttcagctattttcttaaaagtatattttttctataaacatcctttgctgctacattagaacttttatagcctaaacaattgcagttggtgtgtttcatttttttaaggtttaaataagggttttttgttttgttttgttttttgcagtgagcatcactacagtctcagtcaacagtgtgaatgtatcatgttttactttaaatgtgtgtgtgatacttcttcattatgtcctgcgctgcagtgagacctgggtgaaaatcaggagccgcacacagccacatcttcctagacctaagagtaaattatggaggattttatttatgtctatttatatgtaaatgtcattgaagacaaaggtcaaatatttgtctgtttgtagatcacaggcaccagttggtcttcagggacctcatagcccctcggtggtgccttctcaaggcagtgttcctggaggctcccatcagggtcagcccatgcacctgccctgggtgaggaagtagcattgctgctggatgagaaacgcctgcgctgctctgttagactggtgctgaaacaaaaggttaaggctaggttgaagtctagaatgaaagaaatctgaatccatgtcattcataaccccttgatctgtagtgtcatgggtgctgccgcaggcagggagtgagctgggggtgcctgcagccttccactcctgccccgcctcaccccacatgctccctgtttctcatgctttctctaacttcctcaccccttaaccaaaaaggtgtgttttcttttgtgcatatagccattcttaaatatcagtgatgtaaacctcactttattaaaaaattatccagcaaac

SEQ ID NO: 5281 - DNA, 1593 bp, Homo sapiens
gcccactgtgtggcagggggatggcaggttgggggtcctggggccagcaatgtggttcctgtgcactgagcccaccagccacagtgcccatgtcccctctggaagacaaactaccaatttctcgttcctgaagccactccctccgtgaccactggccccaggctttcccacatggaaggtggctgcatgccaaggggaggagcgacacctccaggcttccgggagcccagagagcatgtggcaggcagtggggcctcttcatcagcagcctgcctggctggctcccttggctgtgggcaggtagcacgcctgctggcagaggtacctggtggctgccctgttcgcatcagtggcgatgactttatttgcggagcatttctgcaagcgttgcctggatgcggtggtgcattgtgggccctctgggctcctgcctcagaatgtcagtgagcaccatgctggaggtcacccagcactgtggcagcgcccaggagggcatagggcagcctaccacctccaagggggcaggcgccctcatctggggttgggtctgtgctgagctggagggcctctagggaaccgtggggcagggtggccagctgctggctcccagagcgcagcccaggcgtcctcaacggggagccccaaatgtccacgcccagaacaacagttggcaggacaggtgtgacacagccacagcagaggcaaggggtgccaggagtccccagcggcatcctcggggagatgctggtgaggggtccgtacagggtggggtccccacccctagccccttactgaggggggagtgcagcagttggcctgcttgtctggcggagaaagccagctccctgcaccctcggggctgagtcagatctgggtctgccgcaaaggccttgcctagaccaggtcacactgatgccctggtttccctatctgtaaaatggggccaatgacacctacctcactgggtcaccatcgagatcaatcctcctccctgccccgacacctcgggcacatcgcatgcactcagagcacagagccgggcagacgcagcacctgcatggggagcccagtgcccggcacagcacaggggcttccagggaggccgcgcagggccgtggggctgagccacgctctcgttttgtcaggcagctatgcagttgctcttccttgtttttgttttgtttttgtttttgtttttaatatttatttttttagagacagggccttgctctgttgcctgggctggagaacagtggcaccatcatagctcactgcagcctcaaactcctgggctcaagcgatcctccccgctcagcctcctgagtagctgggactacaggtgtgcaccaccacacccagccaaaacagccatcctccccttgagagtcatcagaaaaatacattaggaaaatgtgtttagaaataaaagcacaaggcagggcagtgctcacgcctgtcatcccagcactttgggaggccgagacgggaggatcagttgaggtcaggagtttgagaccagcctcggcaacatggcaaaatcttgtctcttttttttggtattaaaaaaatcataaaaataaaagaaataatgca

SEQ ID NO: 5282 - DNA, 955 bp, Homo sapiens
gggcggctgccagctgggccgggacccagggccctcggtgggagccatgccgtctgccggacccggaggccgaggccatgtgcatagtttctttattttgtgtaaaaaaaccaccaaaaacaaaaaccaaatgtttattttctacgtttctttaaccttgtataaattattcagtaactgtcaggctgaaaacaatggagtattctcggatagttgctatttttgtaaagtttccgtgcgtggcactcgctgtatgaaaggagagagcaaagggtgtctgcgtcgtcaccaaatcgtagcgtttgttaccagaggttgtgcactgtttacagaatcttccttttattcctcactcgggtttctctgtggctccaggccaaagtgccggtgagacccatggctgtgttggtgtggcccatggctgttggtgggacccgtggctgatggtgtggcctgtggctgtcggtgggactcgtggctgtcaatgggacctgtggctgtcggtgggacctacggtggtcggtgggaccctggttattgatgtggccctggctgccggcacggcccgtggctgttgacgcacctgtggttgttagtggggcctgaggtcatcggcgtggcccaaggctggcaggtcaacctcgcgcttgctggccagtccaccctgcctgccgtctgtgcttcctcctgcccagaacgcccgctccagcgatctctccactgtgctttcagaagtgcccttcctgctgcgcagttctcccatcctgggacggcggcagtattgaagctcgtgacaagtgccttcacacagacccctcgcaactgtccacgcgtgccgtggcaccaggcgctgcccacctgccggccccggccgcccctcctcgtgaaagtgcatttttgtaaatgtgtacatattaaaggaagcactctgtatatttgattgaataatgccacc

SEQ ID NO: 5283 - DNA, 81 bp, Homo sapiens
gactccagggttctagacagaggccagtcttggccactcaccccacaccccgcggaccccaataaaggcttgcatagctcc

SEQ ID NO: 5284 - DNA, 643 bp, Homo sapiens
atgtcttcagcgtaataaatatctccgactttgtcatcatacatgtacatttccaccatgtgcagctgaaaagtgaaaatatttttattttggtttatttgtaaaacttgtccacagtcagcctggcacagtcgctcatgcctctaatcccagcacgatgggaggccaagacaggcagatcacttgagcccaggagtttgaggccagcctgggcaacatggtgaaacccggtgtctaccaaaaatacaaaatgtatccagacatggtggtgtgtacctgtagtcccagctactcaggaggcaaagatgggaggattacttgagcccaggaggtcaaggctacagtgagccatgattgcactactgcagtgcaacctgggtgacagagtgagaccctgactcagaaagaaccacttgcccacagtccagacagatggattgtaggtgggttttctggagattagtagatactgtatagagttgtatacataaaattgtgtcagtagtacaaagtgtatataggctgtttactcttacatttcctactgtaagatacagatttatggtactgatacctttaaattatatcatattttgaaaatgtaattactgatattcaaaataaattaaaggacttaaaatca

SEQ ID NO: 5285 - DNA, 562 bp, Homo sapiens
gggcacgcgctgcactccgtaactcaacatggcatgcctttctctccgtaaactatttagtgagatttttagggactatttttcagtatctctgtacctgttaaagggggtgcttttcgatctaaaaacttaattttataaaattgacttatttttctagactaaaattgtatatgcttttggtaattaggaactcttgagaatattggctgctgattgttgccatcacgttcctacaaaattgtttttctatgggatgttctggcagctgtgtcataaaatgctgctgggttcattcattcattccataagaaacttaataccagcaaatgcattaaatcccttgccagttaccattaactgtaactatttagcttttgtttagggatctttctgatggtcttttatgagcaatcttagttctaagtcattgttcccatcccttttttgtgtgtttcagaaaatagtgaacttgattcccctgcttccactaaatccagttgtgacaaaatctaacgtgacatcagatcgaaaggttatagaaataaaactaatgagatct

SEQ ID NO: 5286 - DNA, 2955 bp, Homo sapiens
acatgaccatcgtcaaagacctgctcaagaaatttttaaaaaagaaacaaagttatggggttaatctcctacacaattcatttacttcgtttgaatgttatagccacttatgattatttgtgtttctaatttatagtttaagtttatttgtaaatagttaaaagagagtgggtctctgtggctttcactgatgttcactctggcatactttcgcaattttctttttcaatttcatgattgtaggtcattagcatgcatattgagtttgcccttacgtggtgggagttcaaacacacaaagacccactatttgcacaaaactattcttgctggtttggaataggctgccatgtgtttttaatgttattgaagcatgtatattcattacagaattcagataaaatttgcctatgttctgctattgtttgatctaatcttaatcacagtgagctcttcattagcacaatatgtggtttgccccaagtgtgcactatttaatactttgtaatatgccaccaagagtactgacatttagagttgtttaaaggccgagaactggaaacagcctttccctcattttctgtgtattggtgatgggagtaataacattttgggggagctttttaaatttcacagaagaggaaagttgcctgctctggcaggtatgtgcaagatagagtgtgtttcatttgttctgttgccaagaattagtgctgtactattgtagttcctttaggatttgtatgtgctctgggctcatgaagatattgcatcatgagctgcagcagttgtactcttttttgatgacctaaaaagggcttatttctgaggaatgaaaggttcccatcattgactatggatgtggaaaacctttcctagcttagagcatttgtatctatattttaaagtcagagttcatgttacctgttttaatcacatgactgcatgtcccagtacacaaaagggcactggttggcattcttcttaatgtatttagtaaagatcagaagaaatcctttaagagtttaaatgtccctggaacacgcatacaggctctagtcaagaatgaattagagtgaaggaaagctgtgtgacacctggcattcctctgttcatggagcttctttgaggcttgaagattgattttaccatctagaccactctgcctattcttcaaccaccttggttactttgacataggaattgacttcttttccttgaatggaaaacactttgaaataataataaacattgttataaactaatatatgtgagagtgcttagttgaaacaaaaaggagttttagtagacagtattatactatctttgaaaatcaaggagaagtttatgcaacttaaaatgtgtacaaactgcagtgcaatctactgttggtgaatgtcagtgtattatcaggaaacatgtctatacaatcacagagttatatttcctcacaaacttctttgtgaagagtgaaatgtgtttctgtacctctgggtttcacttacgggcatattttgtgcagtatttatgtgattgtgcctatgcatgatgaatgaatgaatttcagttgtacattgcctaaatcataacttgatgatgcttgggaaagactcaacagttaaaacttcatgaagttctaatgtctgtgttccaaaacacatcacattattaggatgtagggagatatgtatgtgtgctccctggggtggggatttctagttactagaccatctccatttttagcatttggcatcctcatgatacttttataaatacgacattaacaggagagcagcagtacgattttgccgatggaataacagatttgccggcaatcactgaaagagtgcaaatatcgggtccttgtgacttcaacggactcttccaaattgtatgaatgtatcaatgtattagataaacccagtttcagaatgataaagaaaaaatgttagaccaaataatgcggctagttaacagtggtacgatttctagcccgtggctttaaaatgcacttaaagtcctgtccttgccttttattttctgaacttgatgtttttgcattctttgagttcagtttaaagacaactacgagcatctgtaaccaatctgacaataatgtgttcatcaggtgcctatggattaaatcacatactggcatatttaagctgaatgtcaatctggaaaataaattgactgtattaacagaaataccactctttgtgtagatatttgtcatatatttaagaaaaagctaaaaagaatggaaatcgcatgactataacttaagtctttcttcaaagtgcatgcagtcttttgcgatacctcattcagccaagtattggtattcttcctcattcggtataaggcagctttcaatttgcttagaaggcaacattggaaggttagagttcatcagaaacagaattctaaaatgtgagttcaattcaataaatttgaatttctgtaggaagaatcaaatcaccgatttaaagagtgcaatatataataatcatttttaaagtattggattaaatctgataggttttccagaaatgaacaaaaatcagctctaaaaccaaagctgatttttagaaaatttgaaaatgtaaatcagccctatccatactatagtttctctaaaactttatctgaaagagtcattttaaaataactattaaacaatgtaactgctatcttaatgttctgaaataagttaaaacattttaaaatatgaatactgtaaaggaaataaatggtgggaaggaaaagtagagaaagaaatgccaattccagtccaaagctttatttgccaagttttcttagaatgaattttaccaatttatgaattcttgtaagcggaatgtaaaacggaaatactgaaagacttttgcctaaagtggcattattgactgctggtgtgatgctactgtaatgtaataaattattaagttgttgc

SEQ ID NO: 5287 - DNA, 1107 bp, Homo sapiens
catcgtgctgtggcatgtggtctagtctgctgaggttctgtcgtctgctattgcctgttttccctgtgttgacactcttactgctttcaggggctgttgaggcagtgcttctgttttcttgtctattctgcatatctttccccctaggattatggtgattatctgtgttaaaaaataagtccttaaagttactgttttggtgaaattaatattaatgtcagcttatggcttttttttgtcatctctgttgtcaacaggattaactcagttctagtgtagtgtttactgaatttccacacttattttgaagaccctcaagagtaaatgtggcagagtgaaaggagaagttttaattgaactagtagctttgtgctataatagccttaacaaatggacccttgcagggctttgcagctgctcatctgtttgtttacagtttgttctttccctccttccccttcaagtgcacttgttaaactgtgatgaacttgtgattttgtgttttacttgaccaaaaccaagtgtatatgtttacatgtttttatcctgtttagcttgacatgaaataatttatatttggaaatatatatttaagaattatatatataaaaatatatatgtataagagttatgtatttgaaaaaaatatataaaagaatatacatcacaatataatatttatgtttatgtaataaagtaaatacagagctgaaagctgaaggtcaaagcctaacaggattggctgttgtgtggatgtgagttgtgtgaataatctttctgtccctcgcacagaagccagtaattagcatctaatgaaaaggactgttcaagtgggtctggccaaatgtgacagatgcagatcttagaggacttacaaagcactatattggtaattcttacaatggcattaatagcttactctataaatacagaaatggttttcctatgcagtttagccaccttctcattaattctttgtaacagcaaatcctaggctcagaggcacagtgctttgtatttgatatacaaagtctctagactttcccaacaaggggcttttgacaaaagagttcaacataaaagtaacaagattataaaagggaaaat

SEQ ID NO: 5288 - DNA, 4107 bp, Homo sapiens
gagcacctgtggttcacctgatcacaccacatcagttgtggttgtaaataccagcattatccttttgtatggtcatgcttctagtttcatcttcatgccaagcacctgccatgtacctctccagaactcaggttgtgcaccaggaggggacaacaacatccctgtgctccctttctctgtcagtacacatgggtcccacctggacaaaacacaggtggtgcatctgcagtgaatggcaacatatctttaattagaggcccttgtgtatccacctaccaacaaagtacctagggcccacctggacaaaacacagatggtacctcttccaggagtgtcaacattcatttgatagaaggccctcatgtgcccatgtatcagcaaagcacctggggcccacctggacaaagcacaaaccatgcaatgagggacagcaacacaacggctgtgactggttgtacttttggtcccccatttacacaaagcacctgaggcccacctggctaaatgcaggtggtgcaataggagatagccccagatatttgtagggagaaacctctagtctccctttcagtaaaaatactatggacctgcccaaccaaggtgctccttttgactttagaggaaccagcattgtttttgttttggtttgtttgtttgtttgtttgtttgtttgtttgtttttgagacggagccttagcccaggctggagtgtagtagcacaatctcggctcactgcaacctccacctcctgggttcaagcaattctcctgtcttagcctcctgagtagctgggactacaggcatatgccaccacacctggctattttttataattttagcagagacagagttccaccttattggccaggctggtctcaaactcctgacctcaggtgatccacccacctcggcctcccaaagtgctaggatgacaggtgtgagccaccatgcccagcctagaggagccagcattgttagttaaatacttgtgtttggatggtcctggtcagagcacctgtgcctgtgatggaaagcagccactagtgacacttgtacctgccaaggccttcataggagccaccaactcattttttactcctatcaatggtcttaagaaataagcactctccctgcacatacagttctcataaattgacattgttccaggaggaatgggctcagttccctcaaggttaaacttaacctgctctcttcctacagaagctggaggcccaaaaccacagacagagagagagagagtgtgtgtgtttgtgtgtgtgtgtgtgtgtttattggtgagtgtggagcagatgagcccagtcagaaccgcactgtattttagtggtcttctgcactgtggagggtagaggaaacctggcttgactgttaacttggctgaccctacctctgggccagttctctctagtcatggacagaaaggcaaaattcccgactttgtggaccctatattctagttgaaggggagaaaagaagcaaaaacatggaaattatctggtaaattagccagtaacgaatgctatgaaaaataaagaagtacatggaggattgagattgtagatagaagcaggtgtttcagtttacactgtgaacaagcctcactgggaaggtaaatttaaacgaagcctagagagaagcagttgagccagatatatgagcaaagacctttccagataataggagtggtcattgcagaggctcaaaggaaggatccctggtgtcctcatggagcagttagtaaggaaatgtggctggaatggagtcagcaagtgggagggagggatagagaagaggacagaggagagatgtgagtggaattccttcctccactttttactaattgtgtaataacagttgactcaaacttcaaaagtctcaatgaaatcagtacttttactatggcctgtttatctcataagatttttgaaaggataaaatgaaataatatggagaaatgacttataagcttttgttgtaatttgttatatacatagggatggatagacggatggatagattagatgatagatagatagatagatagatgataacgttatggactgaatgtttgtgtacccccaaaaattgatattttgaagcctaacttccagtgtgatggtattaggaggtgaggctttggggaggtgattaggtttagatgaagtcatgaaaatgaaacccccatgatgggatttgcgcctttatgagaagaaataccagtgctttctctaattgccatgtgaaggtataccaacaaggtaacagtctgtaagccaggaaaagagtcctcacaagaaacagaatttgtctttatcttggacttcctaacctttagaattgtagaaaataattgaatgttgtttaagctaccagtctgtggcattttttgtagcaatcagaactgactaataaagatagatagatgatagatagatacatagatagatgatagagatagatgatagatagatagatagatagatagataatatacatatatatgtatggtcaatgactgagttccttaggcaatggtgccctgattgcctttattaggcaattcaaatagaagaatagaagaacccccttttttttttgagatggagtcttgctctgtcacccaggctggagtgcagtggcgtgatcttggctcactgcacgctccacctctcggaagaacccctttttattagcataaaagcacttacttttatgaagcaaacacatgtaaaaatatgataacagagactaaaacatttatgagattaggcctgaaagaaaacaatcacagagaaattactgaattcctcttggcaccctggggcctgattcattcgctctaaattgtttagtacagttccagaggatcaaagctcctgtttcctggccagataatcacctaacttttgtaatcagaactgcctttcagaagtagagtggaaatccagttttcttctaatagccctatacccttgcagtattaccagggacaaattttttaaaattcatacttcttgacattttttaaaaggcttcaagctaaatattatgatcctggtaagacaaactttgaataaatgtgtgagagatacaaagataatttttgttttcatgttttgatgcacttacacaactgaaactatttctaaatattcttttattttttattaagataaaaagcaaacataatatcaatttaaataatactgaaagtcaaccttcctaccacagttccctcctccagagatagtgtttagctactttgatgtcactcccatagttctgagtttgcttttttacttcaactattatgttatcttacagatgtcattgtttttcctaaaacttgaagtgccttcctttttttctccttgaactcttttcccataaaaaaaaaatgtttttggtttctagaattttcaaatagtattgtttacttgactgaatcccttccttttccagaaaccttgagcctcctccactggtttgggagtggtaagaccaaagtaaatgtaaaaagtaaagtagaggttcctcttcaaagactttcctccctatctaattagaaataagtagtaacttcttttagaagcaaaatgtattcacagacctgtactaacattcttaaatatctgctagtcataataaagaaatcaatgtactttatgttcttagctcccacaatttagcctaagtatttgccctggcatgcttatactggtccaagcattaggtcatagcctgttcctcttccttatttagaagtgtttttacctttctcagcattccacaagttacttcctcattcctttgttctcctctacctttgcctcttttaaaagttctaaattgctagccaatcgggacaaatacagaatgtgaggtcctgttccagccaatggaaaccggacacagcagtagggtggacgcgtcaggttataaatgaccctgtctcctttgttcggtgtactcttgtggcaaaactgctggcaagtgtaccctttctgcaggaagtaaaaatggccttactaaataaatttatgttcaagtgctatttctttacgacaccgaggaacaagcatttcaaac

SEQ ID NO: 5289 - DNA, 390 bp, Homo sapiens
gcattatggctcctccacctggtatgagaccacccatgggcccaccaattgggcttccccctgctcgagggacgccaataggcatgccgcctccgggaatgagaccccctccaccaggcattagaggtgagtgggagcataggggtttgatggttcagccaggcccctgaatatgtgtatcctctttttctcaatgtttctatttcctttccaggtccacctcccccaggaatgcgtccaccaagaccttagcatactgttgatccatctcagtcactttttcccctgcaatgcgtcttgtgaaattgtgtagagtgtttgtgagctttttgttccctcattctgcattaataatagctaataataaatgcatagagcaattaaactgtg

SEQ ID NO: 5290 - DNA, 35 bp, Homo sapiens
acaatgtaataaaaatattattcataatttttcaa

SEQ ID NO: 5291 - DNA, 623 bp, Homo sapiens
ccggccacactcccaaactccaagacagccatacttccagcgaaatggtaccaaggagaggtcttgctcacagggactctccatatgtgagcactatctttcaggaaatttttgcatgtttaataatatgtacaaataatattgccttgatgtttctatatgtaacttcagatgtttccaagatgtcccattgataattcgagcaaacaactttctggaaaaacaggatacgatgactgacactcagatgcccagtatcatacgttgatagtttacaaacaagatacgtatatttttaactgcttcaagtgttacctaacaatgttttttatacttcaaatgtcatttcatacaaattttcccagtgaataaatattttaggaaactctccatgattattagttgaccaactatattgcgagaaacagagatcataaagagcacgttttccattatgaggaaacttggacatttatgtacaaaatgaattgcctttgataattcttactgttctgaaattaggaaagtactgcatgatcttacacgaagaaatagaataggcaaacttttatgcaggcagattaataacagaaatacatcatatgttagatacacaaaatatt

SEQ ID NO: 5292 - DNA, 107 bp, Homo sapiens
gtgttgctcagagtgaagagtgaagagcatttggtacacacttgaccttctgtcgtccccagaccagtagtgaccaatcgggagtagcaaggaaggacactgcccag

SEQ ID NO: 5293 - DNA, 2962 bp, Homo sapiens
acatcaccatcgtcaaagagctgctgaagaaatttttaaaaaagaaacaaagttatggggttaatctcctacacaattcatttacttcatttgaatgttatagccacttatgattatttgtgtttctaatttatagtttaagttcatttgtaaatagttaaaagagagtgggtctctgtggctttcactgatgttcactctggcatactttcgcaattttctttttcaatttcataattgtaggtcattagcatgcatattgagtttgcccttacgtggtgggagttcaaacacacaaagacccactatttgcacaaaactattcttgctggtttggaataggctgccatgtgtttttaatgttattgcagcatgtatattcattacagaattcagataaaatgtgcctatgttctgctgttgtttgatctaatcttaatcacagtgagctcttcattagcacaatatgtggtttgccccaagtgtgcactatttaatactttgtaatatgccaccaagagtactgacatttagagttgtttaaaggccgagaactggaaacagcctttccctcattttctgtgtattggtgatgggagtaataacattttgggggagctttttaaatttcacagaagaggaaagttgcctgctctggcaggtatgtgcaagatagagtgtgtttcatttgttctgttgccaagaattagtgctgtactattgtagttcctttaggatttgtatgtgctctgggctcatgaagatattgcatcatgagcttcagcagttgtactcttttttgatgacctaaaaagggcttatttctgaggaatgaaaggttcccatcattgactacggatgtggaaaacctttcctagcttagagcatttgtatctatattttaaagtcagagttcatgttacctgttttaatcacatgactgcatgtcccagtacacaaaagggcactggttggcattcttcttaatgtatttagtaaagatcataagaaatcctttaagagttcaaatgtccctggaacaggcatacaagctctagtcaagaatgaattagagtgaaggaaagctgtgtgacacctggcattcctctgttcatggagcttctttgaggcttgaagattgattttaccatctagaccactctgcctattcttcaaccaccttggttactttgacataggaattgacttcttttccttgaatggaaaacactttgaaataataataaacattgttataaactaatatatgtgagagtgcttagttgaaacaaaaaggagttttagtagacagtattatactatctttgaaaatcaaggagaagtttatgcaacttaaaatgtgtacaaactgcagtgcaatctactgttggtgaatgtcagtgtattatcaggaaacatgtctatacaatcacagagttatatttcctcacaaacttctttgtgaagagtgaaatgtgtttctgtacctctgggtttcacttacgggcatattttgtgcagtatttatgtgattgtgcctatgcatgatgaatgaatgaatttcagttgtacattgcctaaatcataacttgatgatgcttgggaaagactcaacagttaaaacttcatgaagttctaatgtctgtgttccaaaacacatcacattattaggatgtagggagatatgtatgtgtgctccctggggtggggatttctagttactagaccatctccatttttagcatttggcatcctcatgatacttttataaatacgacattaacaggagagcagcagtacgattttgccgatggaataacagatttgccggcaatcactgaaagagtgcaaacatcgggtccttgtgacttcaacggactcttccaaattgtatgaatgtatcaatgtattagataaacccagtttcagaatgataaagaaaaaatgttagaccaaataatgcggctagttaacagtggtacgatttctcgcccgtggctttaaaatgcacttaaagtcctgtccttgccttttattttctgaacttgatgtttttgcattctttgagttcagtttaaagacaactacgagcatctgtaaccaatctgacaataatgtgttcatcaggtgcctgtggattaaatcacatactggcatatttaagctgaatgtcaatctggaaaataaattgactgtattaacggaaataccactctttgtgtagatatttgtcgtatatttaagaaaaagctaaaaagaatggaaatcgcatgactataacttaagtctttcttcaaagtgcatgcagtcttttgcgatacctcattcagccaagtattggtattcttcctcattcggtataaggcagctttcaatttgcttagagggcaacattggaaggttagagttcatcagaaacagaattctaaaatgtgagttcaattcaataaatttgaatttctgtaggaagaatcaaatcaccgatttaaagattgcaatatataataatcatttttaaagtattggattaaatctgataggttttccagaaatgaacaaaaatcagctctaaaaccaaagctgatttttagaaaatttgaaaatgtaaatcagccctatccatactatagtttctctaaaactttatctgaaacagtcattttaaaataactattaaacaatgtaactgctatcttaatgttctgaaataagttaaaacattttaaaatatgaatactgtaaaggaaataaacggtgggaaggaaaagtagagaaagaaatgccaattccagtccaaagctttatttgccaagttttcttagaatgaattttaccaatttatgaattcttgtaagcggaatgtaaaacggaaatactgaaagacttttgcctaaagtggcattattgactgctggtgtgatgctactgtaatgtaataaattattaagttgttgcaaagtgc

SEQ ID NO: 5294 - DNA, 1178 bp, Homo sapiens
gccaccccagcctggccacgcagccaggacaccgggcagggccgcccgggcccagaggagctgggagccgggccgcagacttgaccccgacgccacagcccagccacggacgctggctccccaaagggtgtgccctcaccacccacttgatttttttcattttgccaaaaaggggtatgtctttatcaaaggagagtcacagaacaaatgtttgtttgtaaagcgttccaagtattttgccacgttctggactgtcttctccctgcacaagccagggtgtgtctcggtagctgtgcgtggtgtggagtgtgtgtctttcctccctgaagctgtgcggagcgaactggcgcctccgagggacgcggctcccggggcagggcagccgtcacccctgcctcccgcccccttggctgggacgtctggggtcctgtggggcccccacaatggtcccaaacagctgcctctgccactgactgcagggacacgggcagcctggctcccaggacacgacttgtaatgaaagtttggggacatgtgattgattgattgattgtaaataaaggatgatggccacaacatgaaaactccatatttatttagatgctattattactgtttggacttttattttggcaggcttttttccagactctagggttttccaatgtgactaatgaccacacctgcctctcccgtcgtctcttctgggcaccctcccacccggctgcatacccgggcagggctcccacagagacaaggagggcacaggtgtctgccccctctttaaaatcgatctacacacatccacgcacatgcgaccccgaggaaacgaaacccactctagaaaacgcgaccttggccgcacctaaagcagccagccgtgagtgcagaccccttggccagcgtggcgcagtggccctgagcagtagtggcatgtgtgtagatcaagtcggatctagtccagctcggttcattagcgatccatgtaatctgacgtcatcttgtctcgaagtctctttttttggcccaggccttgaagaatacactgtgacttaagaagccttaccacgcagtaactaaagctttaggatgactgtattcgaggagtgccgtgtgttgcatgcagctacccgtaggaagacttcgcgcatatcactaataaacctgaagtcgtgatg

SEQ ID NO: 5295 - DNA, 1540 bp, Homo sapiens
attccctacaggagaaaatggaaatgaggaggagagaaactccggtgtccccgaggtgtcggtgtggtgagggccgctggcgttgaagtacatcctgctctggcccagctccccatagcaggcctccagggggccactgcgctgttgccgcagcatcctgctcagtacgtcgacttcatcagccaggagggagagcttgtgaaaggctgtgatggagccacccaggctgatctgggcctcgggaacccagcggaagtagcacagtttccacagttttatgtgtgttccagagacacgtggcagaataacaccgtgcaggttggcgggtttggaaaaccattctctaaaatactgctccgtatcactgttctggctgtcggtttgctgagctggatctggctttggttttaatatcaatgaatttctccttggaagtaattcttggtcactgatgattccattctttaaggcagacggcattcctcttagtgtggagctgtagcttttctatacagaagagattttattatgttccggggattccctttttagaaagattgaaggatgcaatggcaaatataaactcaatactatgaaaaattaatggaatttcagcctcaaagaacattttcctcccttcctttgtgtccttattctaatcctcctcccctggaattacacttttttatgtgttgactctacctaggctgttactatcagcctgaatgggggcgggatgagagtacctcctatccactaatttgcttaaggataagttctaagacgggctagaaaaaacactagacctggccgattctatcaagaacaatggcaaactgaacagaggcagtcaggaggccaaatgtctgattctttgttctgtacctttcagtagtctgcaaattttctaccaaaaaaaatcccaagaatttatttgggaattattaaaaaggcaaacaatgaatgttattaggacaagaatatagcagtcaggaggccatgactacatcacagccaggcggcattccctgccacagtggcggcttgaatcatcaagaaatggataaatggggctttagtaaatcaggcttgcaggctcaaagctgcaatctgcccactctcaggtactgagactttgtgggcctcagacaccaggaagaaagctgggatacagtcatttgagttaaaaagggaatgacccctcagaaacccgcattagcagtgttactcttggaagtgcctttacttttaacgctctctgttctgaaaaagaggtgtttggttacgtgtgagccaacatcacgttttgttagctgtgatttacctttgtccgtttaaaagacttcacggagccattctgtatacaaggtgtgctctttccaatgtagaaggggttatggaaaagggtgcgatcctttgctgtaaactggagagaccagtcccaaacagaggggaattttaagcccttctcatcacccaattggatgtttttgcttatagcaaattcctgcaaaataaataaataaatatttgcaaaact

SEQ ID NO: 5296 - DNA, 5599 bp, Homo sapiens
gcccgccacagccatgagcagccgctcccaccccctcgtgagtccctggcctttccttttgtaataagaaagaagagagagaacttgatgcaaagtccacgaaaaaacaatttttttcacctcaggtgtcaaagtaaatttgttaaaaaaacaaaaaaaacacaaaaatttcaaaaaacaccacccaccaaattgcacaatagatacacccacaaagttgagattcagcgttgttgaaccccctttctcagggatggacacgtttcacgaggtcagtgaggacaccccttcctgccgccttactctgtacatagatttgcactctggagttttctgttaggttcgggaacacgctggggacagagcaggccagccagtctggtggagctcagcgtctggctggctggccagcctgtgggtctgttgggagcagatgtgctcactgacgtttgtgcctccagggcagattcctaagcagctggcctgacctcttcctgcccagcccccaacccagtctctggcctctgcccaacgagcctggctgggcttgcaacgcagctgattctgagacaggcccctgcagagggatgccttaaagctgtccctggctggaggagcactccaccttggggatagtggagggggccttcagccctctgcaccctgcctgcctcacaccccgccttcaggagccctctcctacggcgctagggagcactggaagcagagatgccagccctggctgagcgtagcactgcaccgtccgacctccgaggcaggggccggggtcacacctgccaggactccgcttctccgtgtcccagcagaaggcatgcaggaccctgtcactactatacctgggcctctgatggggaattctggtcttctaaaaagatgttagaaattcctggtggcacatccagttccgagtttgcccgcacgggcacttttgttggaaacagtgggcaggtcatggggcctcctcatcagagggtctgtgtgagcggctgtgcatgtggcagcgcaccatgcttcacagagaccattctgtagcaagagaccggaacattgtgacttggaccttttcaggagtggcgcggatgttacaggaaatgctgtcggagagcgcgcattctatttcctccgcagggaatgccagatagaaagttgcgggcaacacttttctcagacccaccatgtccccaactcagacttagcaaacctccagcctctccgtttcccctggactcctcctcccttttcctcctgcttctccttgtcctgcctggaggctccaggccacacccagctggtggggctgctccagtgccccatcaccggccttctcctggcaggagaggaggagcagagagctgggtcctgggctgggattcgagccctgggcgggggtcagtcaagccgtggtccagcaaactcctctgcagatggctggagtgttgacccaggcttgtggcccaggtatcaccttcccttcctcctgagagttgaggcctgtaaatacaagggcccaggacagagtgtgtgcgtgcgtgtgggtgtgtgcgcgcgtgagcacacacgcgtgtgttggggggggtggggggattggggtggactcagggtatcttgccagagatacctgttttgatgagtacctattttgatgcaaaggaacggccctgggacctcagagggccacagatgggcttcctgggcctagcgtgccttggttgtggccatcctgcttctactcagccctgccatgctatggggtgcagcacaaacccaggacccaggcctagccactgcccacagctgatggtcactgttttggctggctccagagtggacaggtacgctctgtccacagcagctgctcaggcacagtatgccgtcaggtgcccgcttcttaccactgtgtgtcagctgggattggccgacagcgtggtggtgacttctaggtagaccgatggaccctaaattgggcagtggcattgtttctgctgtggtgggaactggcagggagagggtcacctccactctggttggatgcggagctggtccctctggctgccatgctgtgttggggctctctgacctccctgcttgcattgggtctgggagagagagtggaatatttggtagggaccttgacagaagagagccctgggtgcttgtggtgcaaagatcttcatgcccagttccaaagtgaggtccctcccaaagttgttttcgtgtgaggcagagaaagccacactctgaatacattttatgtctcaggaattcacattccaggttcaggaattttattccaaagtcctttggtgcactcaccgtccaccgttccccaaggcagggagagggagtggcccgtccctgggaggctggcaaagtgctctccagggaggggtcagacgtccttgtgatctgcccagggtgtcacggaaggagattttctagctccacatctgtctgcacataggaaggaaaagataggactctaaacctagtcatcttggaataaaaagaagagctggtttgttttagagcagggcggggggtgggggagggaagcgggtgttggctgtttccaaagagagcacttaatttaatttttcctttaaatgacccagggctgttccgtctgatagatggaagggtaacattgccttaaaacagaaatatgcaggcgttggctatttttggcataagagcgtgtcttcattcccaaagtggttctcgtttaatggcagggtgcggtccttaggccccggcctggactgggaaatgggggtagggcaccaggagagaaatcctcctgggtactcctggccagaccctcctgaatcatctgcggcttaaactcatctcgcttgaagggcagggagaaacccatgaatctcaggcacggttcacaggggtcctcaagggcaggtttccatttcatcatgaagtgagggactcctgtggaagagggtggtgggccttggaacgctgcctccactgaggcgggcacacaaggcggaccctcctgaaacagcctccattttcttcaaacatgcagaatgttttcccagactgcgtctatttcagggtcttccatttttgtggtttatggccatgcttgccagttttggtggggttgaggaacccataggactcatagaaataatagtgaaaactcaaacccttattttgggacttcagttctcgtggtccataggggcagagatgtcaaagtgaaggttgcctgagtgaagggagagttcccctataaaaggcctaaaattgatctggggctcagccatcaaggggctggtgttgctcctgtcccagacaaggaagcccctctttacatcagccatattaggggaacggttgtcagctccccaaatgcctactggatcctacagccatacaggaaaacagacggacacagccctttccttaaagagccctggggtcctgtcctgcaggatgctgcataggaatgggcagagatgtcctggatgggaacatggtcctggaggtgccctacctgcatcctgctgcacccccacccacgacactcgagtgcaagatcgcctcactcctaaccctgactttattcccaggccccacaccgaggcaggtgcaggattcgccatggtgcagcctccgggtacaaacatctgaggcactggcgatcccagtccttgcagcaccctgaacacagctcagaccagtgaggggtgattcagaggtggggatgggcagagagggctggccactctgcctcaggacttgacctcaagtgttctgtctccccacccggtgtgtccagaagaccagcctctttcttgccagaagcaggtgctaagatggactgcacagggtcccggcactccctcgggacccattcaggatctcagctgggcaggggtgccacccaacaggaagatgtgatctgagcaatagtgtggccttgtttctccgcttctggttgtggctgtgtgtacagggctacctattttgacttctgacaggtgtcactgattttctttcccccatttaaaaaaggtcatttagtcaaagacacagtgctagaggtttaaagggtgtaatgtgttggtcacatcacaaccagtaagaaacgcttggtaggttatccacatcttttgctgactgtttccatatacaattctggtcaccatattttccaaagctaaaatctgaggcgtgggctgatggtttttgaaatcaggattaccccaggaagaaccaggtcctattactaattttcctgattctgaggctctgaaggcttgtctgagacacattccggagacctttgtaccagaacttggatgcatagtccaccttactactgatacacgcctgagcaccctttagggcgaggcgccgcctcctgcctgctgtcctgtccctcagcatcagaagagttgaattcagcaggagacgggagcccggtgtccatgagggaagaggggtcgcgcttggtttctactgacccccatgaagatttcagacttgcagtgcggccacctggccctgccctgcctctctctttctcatacagctttaaaactttactacttttatttaaaaatgaactggatgggagagaagtagcgtcccctaccctacaagtcacacattccggggaggggggtggggggtggaggcaggaagtcatgggggtgggggtgggagcacgggaacagctttcttaaggcctcagggtcctgttttccctggcctcttctagagggcccgtggacaggtcgcagtgcgtgcttatttggaaaccaggtgtgtgagccgaatgcctgccaggccatgcactcagcagaggagcccttgtacctggctgccctgagaggagcaagaggccacctcccatgtggctctagacaccacgtgggctcattagccccagcgtctgtgccggctccaggtgcctgcctctgggtgtgtgagtgggagactttgctccctggcctcatcctagagaggcccctggtgcctagtgctgaggcctctggggctggaaagcctcagcagaaaggaggcactactgagcaactatgcattgtcattgtcgggtttggggctttcggtggttccttggtgactgggaattgcttgtgtgcatgtgttgggtgcatgcttccgggtctcagctgccccaggcccgcacaggcaaccccttcccatccaaagccattggtggagcttctctggaatcatttgccaaaagcccaaggcagaatccaagggtccaagaccatttccatggagctcatgtttttcttttctgtaggaacttttttttaaccagcacccaccataattccgaaggccacgtttcatctttcctggatcactacagtgaagtattacagttgtacagttcccagtctggccttggcttgctcggataaaactttgtatgtattttgtatggcatagattctatattgtaatgatgtcctatgcaaaaagaaaaattaacgaaattgtaaattttattgttttaacgtgtatgcatgtttagtgacgtttacattttgaaataaaatttatgattcattatttt

SEQ ID NO: 5297 - DNA, 574 bp, Homo sapiens
ccacgcctggttctgtacatgtggaaaactcacagatgggcaaggcctttggcttggcgagatttgggggtgctaatccaggacagcattacacgccacaactccagtgttcccttctggctgtcagtcgtgttgcttacggtttctttgttactttaggtagtagaatctcagcactttgtttcatattctcagatgggctgatagatatccttggcacatccgtaccatcggtcagcagggccactgagtagtcattttgcccattagcccactgcctggaaagcccttcggagagctccccatggctcctcaccaccgagacagttggttttgcatgtctgcatgaaggtctacctgaaaattcaacatttgctttttgcttgtgtacaaacccagattgaagctaaaataaaccagactcactaaatcctttccaataattgactggtggaaggaaaacaaaaaacaaaaactaaaaacctcttagcttttctgcaattcaactttttatttttatttttatttctatcaaagacggtagagagaaacagcttgatgctgtttctacatt

SEQ ID NO: 5298 - DNA, 1822 bp, Homo sapiens
ttggtaaatgttatacttgtcattaatgtaaataaagtgagtaattggtatgacttgcaggatgatgtacatgttagtttgtagctcaggatgattgttaagcaatagatttgctctattgaaaatgtttcatttttttcactgtacaagcaacttagatttttatttgtacaaattacttctttgtttttcttaatgatggcaatttttaaactttaattttattgtgatctcttaaagcagaggttagactttacctttctgactctgtcgtccaggctggagtgcagtggcgcaatctcactgcaagctccacttcctgggttcatgccattttcctgcctcagcctcccgagtagctgggactacaggtgcccgccaccacgcccagctaattttttgtatttttagtagagacggtttcaccgtgttagccaggatggtctcgatctcctgacgttgtgatccgcccgcctcagcctcccaaagtgctgggattacaggcatgagccaccacgcccggctagactttacctttctaaagaaattgtttactggatttataagaagttaatttttgaaaatgacatatttttgtgtgatagaaagaatggagcaagttgtgcctatttcctccaagtcagataaggtttctaaaataaataaatttctagcatataaagggtagagataaactctgcaaatcttatgtctggaattatattaatgtttattgtccttgccaaaattcctagaaattaatttccttcaatagcatcctaaaactctatttttatttggggcagagtaatttcatttatagtgccagtaggtgtaccttgtgttcactcgaactaagaacaatggttaaggcagaataatgactaaaatatgttcatatattatgatgtggaaataattgataacttttaagccatactatgtttttaaagataatttgcacaaacacgtttgtgtctgttctgtccaatatagatttggcaattatttaaagagggataatcttgaaaaaaattaaccaaggtgatttcttatatgtagatgctcgattttggaatttgaaatagtagatgcacctctttaccttttttacttggataaaaacctatgatgattttgtcctgtgtgtaaatgttatttatttagcatagacattaaagataactctctggaaaatgacttgactaaggctctcatgaaattcaaagtgccatttagaacatgcaccaaattgtcaagtaaatctgtctaaatttatattttaaattattacaaattacacatctttgaggaaagagtattatgaacaatagaacatattctctaggttgtagaggaaggaataagcagacagaatcaaccactaaaggtagtttttcagattggttgttagaatgtcatgtttagatgttggagcagattagagcagcattcatgccactcggagcaaccagacttacagcataagtatgtacgaggaatttcaaatcatcagatgtttgcttggctaggttctactttgtttatttgatatcaaataggtttgtagatgtttatggcatttctaattgtaagtagagacaaaatattcatatagtcagatatatgttgtctgctttaaacaatttttaaattttaaaaatgcattaacgtctttttatatccatcaagggaaggatgaaatgttgaatttgaagactaattcagtaagaagtcctaggggtttaactgtacatactacctgaactggcttttctgagagatgaatcaataatgaaacatgtctgttttaaaaactacc

SEQ ID NO: 5299 - DNA, 242 bp, Homo sapiens
agttttacctaaaaatcctgctttagttgcttttttaatggcaaaacatattaattaatttactgttctagagattaaaagttcatgtttgaatagtgaaaatattagaattggcaatgtatttttctatcaacaattgggaaatgcttatacatgtaaatatgaaaatgtttgacattcttatgttaaaaattatttcttgtaacacaaatactttattagaattaaatgcttagtgactt

SEQ ID NO: 5300 - DNA, 488 bp, Homo sapiens
agagaagatgctagacgaaaacccacattacctgttaggcctcagcatggcttatgtgcacgtgtaaatggagtccctgtgaatgacagcatgtttcttacatagataattatggatacaaagcagctgtatgtagatagtgtattgtcttcacaccgatgattctgctttttgctaaattagaataagagcttttttgtttcttgggtttttaaaatgtgaatctgcaatgatcataaaaattaaaatgtgaatgtcaacaataaaaagcaagactatgaaaggctcagatttcttgcagtttaaaatggtgtctgaggttgtactattttggccaagtctgtagaaagctgtcatttgattttgattatgtagttcatccagcccttgggcattgttatacaccagtaaagaaggctgtactcaagaggaggagctgacacatttcacttggctgcgtcttaataaacatgaatgcaagcattggc

SEQ ID NO: 5301 - DNA, 3420 bp, Homo sapiens
gccaaatccaggtgcacccagcatgtcctaggaatgcagccccaggaagtcccagacctaaaacaaccagattcttacttggcttaaacctagaggccagaagaacccccagctgcctcctggcaggagcctgcttgtgcgtagttcgtgtgcatgagtgtggatgggtgcctgtgggtgtttttagacaccagagaaaacacagtctctgctagagagcactccctattttgtaaacatatctgctttaatggggatgtaccagaaacccacctcaccccggctcacatctaaaggggcggggccgtggtctggttctgactttgtgtttttgtgccctcctggggaccagaatctcctttcggaatgaatgttcatggaagaggctcctctgagggcaagagacctgttttagtgctgcattcgacatggaaaagtccttttaacctgtgcttgcatcctcctttcctcctcctcctcacaatccatctcttcttaagttgatagtgactatgtcagtctaatctcttgtttgccaaggttcctaaattaattcacttaaccatgatgcaaatgtttttcattttgtgaagaccctccagactctgggagaggctggtgtgggcaaggacaagcaggatagtggagtgagaaagggagggtggagggtgaggccaaatcaggtccagcaaaagtcagtagggacattgcagaagcttgaaaggccaataccagaacacaggctgatgcttctgagaaagtcttttcctagtatttaacagaacccaagtgaacagaggagaaatgagattgccagaaagtgattaactttggccgttgcaatctgctcaaacctaacaccaaactgaaaacataaatactgaccactcctatgttcggacccaagcaagttagctaaaccaaaccaactcctctgctttgtccctcaggtggaaaagagaggtagtttagaactctctgcataggggtgggaattaatcaaaaacctcagaggctgaaattcctaatacctttcctttatcgtggttatagtcagctcatttccattccactatttcccataatgcttctgagagccactaacttgattgataaagatcctgcctctgctgagtgtacctgacagtagtctaagatgagagagtttagggactactctgttttagcaagagatattttgggggtctttttgttttaactattgtcaggagattgggctaaagagaagacgacgagagtaaggaaataaagggaattgcctctggctagagagtagttaggtgttaatacctggtagagatgtaagggatatgacctccctttctttatgtgctcactgaggatctgaggggaccctgttaggagagcatagcatcatgatgtattagctgttcatctgctactggttggatggacataactattgtaactattcagtatttactggtaggcactgtcctctgattaaacttggcctactggcaatggctacttaggattgatctaagggccaaagtgcagggtgggtgaactttattgtactttggatttggttaacctgttttcttcaagcctgaggttttatatacaaactccctgaatactctttttgccttgtatcttctcagcctcctagccaagtcctatgtaatatggaaaacaaacactgcagacttgagattcagttgccgatcaaggctctggcattcagagaacccttgcaactcgagaagctgtttttatttcgtttttgttttgatccagtgctctcccatctaacaactaaacaggagccatttcaaggcgggagatattttaaacacccaaaatgttgggtctgattttcaaacttttaaactcactactgatgattctcacgctaggcgaatttgtccaaacacatagtgtgtgtgttttgtatacactgtatgaccccaccccaaatctttgtattgtccacattctccaacaataaagcacagagtggatttaattaagcacacaaatgctaaggcagaattttgagggtgggagagaagaaaagggaaagaagctgaaaatgtaaaaccacaccagggaggaaaaatgacattcagaaccagcaaacactgaatttctcttgttgttttaactctgccacaagaatgcaatttcgttaacggagatgacttaagttggcagcagtaatcttcttttaggagcttgtaccacagtcttgcacataagtgcagatttggctcaagtaaagagaatttcctcaacactaacttcactgggataatcagcagcgtaactaccctaaaagcatatcactagccaaagagggaaatatctgttcttcttactgtgcctatattaagactagtacaaatgtggtgtgtcttccaactttcattgaaaatgccatatctataccatattttattcgagtcactgatgatgtaatgatatattttttcattattatagtagaatatttttatggcaagatatttgtggtcttgatcatacctattaaaataatgccaaacaccaaatatgaattttatgatgtacactttgtgcttggcattaaaagaaaaaaacacacatcctggaagtctgtaagttgttttttgttactgtaggtcttcaaagttaagagtgtaagtgaaaaatctggaggagaggataatttccactgtgtggaatgtgaatagttaaatgaaaagttatggttatttaatgtaattattacttcaaatcctttggtcactgtgatttcaagcatgttttctttttctcctttatatgactttctctgagttgggcaaagaagaagctgacacaccgtatgttgttagagtcttttatctggtcaggggaaacaaaatcttgacccagctgaacatgtcttcctgagtcagtgcctgaatctttattttttaaattgaatgttccttaaaggttaacatttctaaagcaatattaagaaagactttaaatgttattttggaagacttacgatgcatgtatacaaacgaatagcagataatgatgactagttcacacataaagtccttttaaggagaaaatctaaaatgaaaagtggataaacagaacatttataagtgatcagttaatgcctaagagtgaaagtagttctattgacattcctcaagatatttaatatcaactgcattatgtattatgtctgcttaaatcatttaaaaacggcaaagaattatatagactatgaggtaccttgctgtgtaggaggatgaaaggggagttgatagtctcataaaactaatttggcttcaagtttcatgaatctgtaactagaatttaattttcaccccaataatgttctatatagcctttgctaaagagcaactaataaattaaacctattctttc

SEQ ID NO: 5302 - DNA, 876 bp, Homo sapiens
atctgaatcaaagaagcgcgacaattctggacagtcaacttcccatgaaataaagtcccctttttacagttctgcaacatatctgaaatgtgacattttctaaatgcctcccttaaaaaaaaaactgctgaaaatctgtgctattttgaaattgatttggctttttgtgcctaatggacatacactgtgggagagaacctgtcaaaatgtcgaagaaggaaggcgaagaatcaagtaatctctaggcaaatgccttcaagttttccagttctgaggtaactagttcagtttgttgggatggaagcatgaaggaaagggctagagaagtatgaaatctcgaatgtgtaatacctgaaaatttaaacacttgaatgtcatcatggtatccaacttgtgactcatagggtctgaactcactccaaaagataataactgcagtctaatttttcccatggtacttgctagtgactgtatccagaaaagctttaagcagttaaagaaacagaaaaaaaccgacactttgtcgacactgaaatatcgattaagtgccttaaaacctctttagacatagctatgcaagttttttatgtttgtgttccagaaggacagttccattcattagttgtgatcttccgtcttactttatgaaactgcacttgaaggttattcatacaagtttttttagtaacagctgtcagtcaactgctgttattagaagaaaagtactgtactgaaaattcagaaaaaaaatctcaaccttatgccaaaatggagtaatgctttatggtcccttgtaagtagtggagctgctctgtttaggtgaatctcctcaaatacaatgaagtgcccactgcaataaagtaatacgtaccaata

SEQ ID NO: 5303 - DNA, 770 bp, Homo sapiens
aaagtcaacaactcctctcgaaagaacaatgaccacagtcaacatcctctgaggatgagcaagctgattctggtttgtatattttcaaaaagaagacatctcattttgagtccttgaagatttttgtaaaggctcaagtttggttgccaaatggaaggggccatagctgcagcaattgctgacatattaaatgactcttgcctatgaccaaggccatttgatgccaggggagtttgccaatgaagtaaagggataggctcatggcccttcacaagaggaagcacactgggtaacaatgaacagtgactcagggaacttatgccccttctgtaggaaacagcagagaccaggtggaaaccttttcctgtggaaacctgtcatagaattttgtgcaatatgtatgtgtctatgaagctgtcttgtgccagtgagaaccagcaggagaatgtacaacagtgtcacttgttaacgagactgatattcaacaggcttctaagaatatgtatcttcataaactgatcactatctattatgcagctattatgtggtctatactatactgtggtttgttttcctgtccccacatctgagtgaaggtcttgctcttccctttcatatccaatgtcaattccttgtactcactgaacccatgctgatctccagggaaccatccttcctctcagaatccagagtctggaaggactgaaacctggtcatacccagtcctttcaaggggcctcttttctactaataaagatggatcaagtctc

SEQ ID NO: 5304 - DNA, 101 bp, Homo sapiens
ataccgatcatcatacacatctgttccattaggattagagacaagttctgtttagaaataactccaagattgggaggccgacctgggtggatcacctgaga

SEQ ID NO: 5305 - DNA, 361 bp, Homo sapiens
acatgagaaagcagcgcctggtccctatgtatttgggtcttatttacatccttctttaagcccagtggctcctcagcatactcttaaactaatcacttatgttaaaaagaaccaaaagactcttttctccatggtggggtgacaggtcctagaaggacaatgtgcatattacgacaaacacaaagaaactataccataacccaaggctgaaaataatgtagaaaactttatttttgtttccagtacagagcaaaacaacaacaaaaaaacataactatgtaaacaagagaataactgctgctaaatcaagaactgttgcagcatctcctttcaataaattaaatggttgagaacaatgcat

SEQ ID NO: 5306 - DNA, 237 bp, Homo sapiens
ggagcagcgggaccatctgaccccacttgccagtccctaaaggtgggtgccccagagtagattccacccctgctgcccaccaatggagaatcccaatgttgaatctcatcccaatgttgttttgttgttctgcaaaagtggcaagcatggagagagaggtcagactggctaggctgcagggggaattacctttggaaggagctatatagaaaaaaaatgaataaagtgttttgttgg

SEQ ID NO: 5307 - DNA, 1793 bp, Homo sapiens
ccctgaagatcctggaagagaagctgggaggaaaaggtgaatccggaagcaattttactttcctgcactgtaagatcctggcaacatctgccctgaacttcagctgaactcttgctgcccgtagtcacaccactacctctttagacaaacatatcaagagtttctgttttccttcatcccttgctgatgtgaacagccaagaactacagacacaacccactcattatcagcatttctgtctctgtcaaacaattagtttatagatagtcataatctttctttcttccggatggtttatccttgtatgctgaacaaaagaaaaaatgtgaagactgaaaggtgtgatttttcaattctcctcccagttaccgaatcaccctcttatttttttttccctaagcctccgttcactgtctctccctctccctttctcttcatgtgcactcacagagacccagcattgcattaccatcgtggaataatctagcgcaaacctaggaaagctgaagccacaaagtccaaagccacctttgtactcacctgcagagctccagaagaccttgatggcagcctgcctatgctgtgtgtttgctatattcaatctttacggcttcctgacttctgtgacagtaagccaagtgcaaaaatacacttgatgagaatttcctcttttaataatgttatttgaacaccacatattttagatttatcttatttgaaagtattagttccattgtgcctggaaaccacactcctttagattgggggccgagaggcgacaacccaacattgaggagagtttatttttaaacatggctagttgtcagtatgtacgtgagctagtatttttatgagtcgagttttttaaaggcacattctgtatactgcttagtatatgcattttataccatgtaattataaaacactcgagtaagttcagcattagaaatgtttagctttgtatgaactgagtgtgccagaaataaacctggagcaatttttaaataagcaaaataaaggagatttttctatttgttcactttaatttattcacttttgtgtacttttatgtactgcaaatcagatttcagtctaaagcgaaacatcagtaagttaataataaacctatcttttgggaagttgaatattaatctgtacccaaaacgtatttagtaaaatatttgcccccgccaccctgccatgctgacataacaacttttataatgttgaatagatgatatgggaaatactaataacaacaatgtaatttttgcagacagctttaacttatatacattgcttgatttttttcaaaagactaaatatgtcatttatactttgtttattttctaccaaagaaggtttgtaaaaatatgcctgctgcttttccttttgaaggacacaaacctggtcccaacatgtgtggattttaactctgagtggggtgcattaaatcaaaagagagaggcagaagatgaaatgctaaagaagggtcaggcaaacttctgtttcagtataaaattcatcatgcaggcttctgagtgaaatagaatgatttgaaaccactactgtattgcctggatacacacacacacacacacacacactttatacaaaaatgttaaaagcaggtttcctggcatgttctaaactgttttttctttaggaataaattacatttatctgcacagatgttgaaaatcctgttaaacccttgtcaaggatttgtttattttacattaaacaaatttattatgatgaacgtgaacaaataaattaaaaaataaaaaagg

SEQ ID NO: 5308 - DNA, 187 bp, Homo sapiens
ttccctaagaaatatccttgagcaatagaagggaagtgggatccgagcctgtagaagggaggcatgaaacttgtggaggaaagagatttgcttcagttttttcctcaccgtttgcctgcttgactaccttctgtcaccacgtcatctttccaggattaaccttgaccagtaaaaagctctgtaatag

SEQ ID NO: 5309 - DNA, 2376 bp, Homo sapiens
aatggtccagtgccaaaatgagcttaaaatctttgtttccaggaattagctaacttggatttgtggaagcttttggcaagcaatatggaatcttgcctggtatcattgagcccacacatggaggaagcagaactcatcagttcttggcgtttcacgccatgcctaacttttcccttgagtgcatggcatgttttgttacaggttgtagagtatttgcagaaggaaaccatttctggttatttggctataaaaagtcagcataaaatatgatccaactaaaagggattaatttttggcatttttgtatatttatgcattaggtgatgggacttttaaaggtttgaatttattaggacacgaactaaaaataaaagtgcactaggggacagttgatttcaatctaagaaaagttaacacttgggaattacaagaagtaaaacaagtgcaactaaatcatttattagttgttttttgaaagcagttttatgtataaataacaaatgtttatatttaactaaatgtaaggtacgaattattacatattaaacttttcttccccttcctagttctgaagtagatatatatatatatatatctactgtcacattccatatattttgaatatttaactcatctagttaataatgtttttattccatgcgaatgatttgatattttcatccttatttctctttggctacaatttatattgagttatatctgtacattctggtaatctaaaatccttaaaaatactctaatagccttgagtgaccaactttttttttaaagcacagatgtaattgtctaatgttctgatgggaacgtaacacttatttttatataaaaagagactgagtaaacaaacattatagaaaaaaagtgaagttttttagttgttttttgtggtattcaaccagcaagttgttttctttcagagtttcctccttcaaaaagttatattgcatttacaaatgttttacaaggcagaaagtttgactggatagttagtgtaaaagcttcatgttgagatcttcacgtatcattctgctaaaccagaatatgttcagctgtgttactaatttttcagcttaatcctcagtgcttattatttacataacaataactttttatcagttacattttatttttatttaaactggccaaaagcaaaattattttatgttaaaatgtgtgctaaactatcccaggaaagtatttaatccaacattgtaaatgaagtatcttgtacatataaatttatttcttttgcagagcattatattactggatgtttaatttacaaaatagttgggtaaatgttccaacaaactttaaagtaccttgaagtcaaattgtctgtttttgttttgttgttgttgttgttgttttcttaagtgttacattaaaactctaaccaaggaaagggttctttaagaacattcccttagagggataaagttgagaagtgtgccttttttttaatggcttgaagtttcagaggtgataaaaattaaaatcacactactatttgaagctcattttctatgcaggtttttaaacgtcatttatgtatcattctttttatatatcacacttaagcttgtgttagcttttttcttttgccccagatcaaactgaacaatgtatataacactatctgtctgtaaaatactttttttaagaaagcatttatatttatatgacagcttgaactgacaacattgtgtatatagatcatcttgaagtattatttcacattgaaaagaagaaaatatattgataactatagatgttatgaagaagagggtatttctagttttgtactaaaaatcaattggatgaactaaatccaaaacatgacactgtaggcagcagttttaagtcttatttttactgtttatatatttgaatgctgctacaacagatgatcttcatccctgaagttttcagctaaacttggtttcctagaatagactgttaactttcaaaatttttattggtgaaatggaaatactgtttttccttgtgaatgaattttcatatttgtaagtgctaagtttataattcaggtttgatcaaggtgtgaataactgaagaaaataacttgctggctatataggaaaatgctgtggaaatgaactgtgtatatacttctgggaggaacaaatttaatcatttcttctgttaagcactaatcagtatagtgcaactcctggttctgtactgtattttatatgcaacatatatgctttaatattttaatgtttgtgcattaatattttcaatttgtttaaccactttgctgctaagattttgccgtcccattcccattttttcctttacaattttaaacaagtttcttcattaaaaact

SEQ ID NO: 5310 - DNA, 202 bp, Homo sapiens
aaactataaaaattagatagcagtgcttgcttctttatagatacattagaaatagtgttccaaataacatacttgaatatcatctttgaagtaaacaccatgttagactccctggtgataccactcttgaattggttaatatgtaagaacattgttttttattaccagttgatctctcaaatgaagtgatgactttttccat

SEQ ID NO: 5311 - DNA, 1493 bp, Homo sapiens
tgtcaaggcctagttacagggatgtcaaactaggaggttgatgtcggtgtggtgtgtaagatgttggggagaagctgcaggtgccttcttaccagctcttcctgaaaacttgtctctccctctccttgttagtctgttttataactcacactccagccggggggaagtaaaggagcttatcccgttcacagatcctgtaacccatggtggttattacctcatagctggtgcagtgttctttgagcctagcagtttggtttagactcaagtgtctattctttgcagtctttctggggttggtagcagagaaagagaagagaacaggtaattcgatcactcaggttattcgtgtgtaaaagttgaagccctaccacaaacgtatgagtggatgttatagtgtaataacctggacattgccaagacagcttcctcagggcttttgtttcctcaagcctacctgaaggctctcttctcagtcacgggggatggaattgtttcatccctggcttgctctgggcctcagtttccctattccaggatagtttccctattccctattctgcatcataaaaaaaaaaatacactcctgatagaagtcggttgatgcttttggcctgcagcctccttaaggttaatagtccacataatttcctcaggggccctggctggcctgttgtgggtgtacccatgaagtatcttgatttgctatgataggagccaccttggcttcctgtggagataagccctgcccctcgttcccactttaagcttgaaaagtcccttatccaactttggaatgggaactagaaagactaagcagtgtctctcaggggttccttctggggtcactcagaagaggagaaccaagcagtcttggcggagagacacctgaagttggtcactcggcacattaccaggggctcagcaatgaccagcctgcaaccatcctgcctttccccaggggtctgggctccagccatggagggtggactggagactcctttgcctttcaacactgtctggcctgtctcgggtccggcacgtcttttctctactgattttgtggctgtggttaacttagctaacctttcagtgaaataatgtctagtggcattcctttacattttccatgtgctgttttttccataactccattttcttcagggctgagtttgggtcttcatttttccacccacaggcctagttaagcttggtcttgtgctccaacttacctgccccagacttcttggatggacattgtcaatctggtcatattgagagtgaaactgccacctagtggtcactggaggtgtgcctgccttttcatgagctctcttgctgctggttaccggaaacatcagttgatggttttcttctaagctaactcagaagctgtgatgtgaatcagaccaaacaatttatctgcttcaaatccatattgtaaagaggtttaatataaagacatattttcaaatcaaaataaataatgaagc

SEQ ID NO: 5312 - DNA, 2160 bp, Homo sapiens
taactggcatcaaaggatttaggagagagaaacccagtatccagacccatttccgtcagtgacactctcctcgtattgggaggattggccagaatcgtctgattcctgtttctgatttccttcctcactggcatcagagtatttcactataggaaaactaatatctaactgagctccaagtgctaaataacagcatctcatgttcattccgggtcaccaagaggttcagggtgaccaagtcacaaactataaatttgaacatttgatgatttttgcaggagactgggtgaacaaaggaaaacccgagagatacataaaggtggaaactaggatttctcatttgaattatttaacatgcctcactctaatggttataaatgtaaaggaaatgcaggttcttcaagaaggtgaaacgaagttactgaatttaagtttttttttttttaaacctactttagaataggaaacatgcttactaatatttacaaggcactacaaggcaccagccaaaaagcctgatttattggcaggatattcttgttgttgttgtttctattgtccatataggcaggcaattaatactttttagaaaattaagttgccaactcaacactgcctacttttgaatttttattctagcaacagccgataatttattggaaattccttatgtgctgggcactacgctagacattgggagtacgaaaattaatatggtaaagatcctggctttaaagagtctttaacattatttcagcagttttattacaggtgtatatgttggaattgacagaacacttagctcaaagcaagggttcaagcatgactttgcagagtagatttcagctgagcttaaaggatgtgagaataagtatacacattttttaaattacccagaatgtagtgcctacagaagtgcttgagcctcagttgcttctaagagtccaacttcagaacttgtatcttctagattgagctcattgcttaatttctagccaacatagcccatctctctcagctgaatactaagctcatcaacttctcctttgatctaggtcttgattagaatgttgaacatgacaaggctgaaggcagaaaccatagaaacttctatccagagttacactcgtctcttaatagctgcctactgttgcaatcagaataaactcacttcttgcccaattatgacagttcattcaccttctactcaagggagactttaagaattgttgaagttgaacttctcaggttcttatacttagtgacactgttcatgcaatggctcagtatttcttgatttctcagaaccagcaaaagtcacaaactgaatcctcaaattggaattcgtaagtgactaacttgtagcataactttattatactaggaaagatggggcaagggacagaaaaaatatctgtaacatcttatatgttcaaatataagcgctttatgtatatttagtcattcaaactccaaatacacattaagaagtagtcatcaatattccactctctaattctacaatttctacctttttagattccacatataagtgagatcatatggtatttgtcgctctgtgcctgacttatcttacttaacataatgtccttaggttcatccctgtttgaaaatggcagaattgcctgtttttttttttaaggctaaatagtatcctattttgtatattcagcacattttaaaaaatctgttcatcagctgacggacacttaggttgattccttatcttggctcttgtgaataatgctgcaatgaacacaggagctcaaacatccctttgaaatactgatttaaatatctttgggtataaacccggaattggctgtggggagttagacagggaaaatgtccacattgctctacggatacaaagtttcagttaggaggaataattctggtgttctattgcacagcacagtgtctatagttaatagtaatgtattatatatttcaaaatagctaaacaaagagaattttaatgttcttaccgcaacgaaataattgtttcagaaaataaatatgctaattagcctgatttgctcattccacagtgtatatacatgtatcaaaaagtcacattgtaccccataaatatacaaaattatttgtcaattacaataaaacttttttttaaaaagt

SEQ ID NO: 5313 - DNA, 2097 bp, Homo sapiens
tcatcaaattgttgattgaaagactgatcataaaccaatgctggtattgcaccttctggaactatgggcttgagaaaacccccaggatcacttctccttggcttccttcttttctgtgcttgcatcagtgtggactcctagaacgtgcgacctgcctcaagaaaatgcagttttcaaaaacagactcagcattcagcctccaatgaataagacatcttccaagcatataaacaattgctttggtttccttttgaaaaagcatctacttgcttcagttgggaaggtgcccattccactctgcctttgtcacagagcagggtgctattgtgaggccatctctgagcagtggactcaaaagcattttcaggcatgtcagagaagggaggactcactagaattagcaaacaaaaccaccctgacatcctccttcaggaacacggggagcagaggccaaagcactaaggggagggcgcatacccgagacgattgtatgaagaaaatatggaggaactgttacatgttcggtactaagtcattttcaggggattgaaagactattgctggatttcatgatgctgactggcgttagctgattaacccatgtaaataggcacttaaatagaagcaggaaagggagacaaagactggcttctggacttcctccctgatccccacccttactcatcacctgcagtggccagaattagggaatcagaatcaaaccagtgtaaggcagtgctggctgccattgcctggtcacattgaaattggtggcttcattctagatgtagcttgtgcagatgtagcaggaaaataggaaaacctaccatctcagtgagcaccagctgcctcccaaaggaggggcagccgtgcttatatttttatggttacaatggcacaaaattattatcaacctaactaaaacattccttttctcttttttcctgaattatcatggagttttctaattctctcttttggaatgtagattttttttaaatgctttacgatgtaaaatatttattttttacttattctggaagatctggctgaaggattattcatggaacaggaagaagcgtaaagactatccatgtcatctttgttgagagtcttcgtgactgtaagattgtaaatacagattatttattaactctgttctgcctggaaatttaggcttcatacggaaagtgtttgagagcaagtagttgacatttatcagcaaatctcttgcaagaacagcacaaggaaaatcagtctaataagctgctctgccccttgtgctcagagtggatgttatgggattctttttttctctgttttatcttttcaagtggaattagttggttatccatttgcaaatgttttaaattgcaaagaaagccatgaggtcttcaatactgttttaccccatcccttgtgcatatttccagggagaaggaaagcatatacacttttttctttcatttttccaaaagagaaaaaaatgacaaaaggtgaaacttacatacaaatattacctcatttgttgtgtgactgagtaaagaatttttggatcaagcggaaagagtttaagtgtctaacaaacttaaagctactgtagtacctaaaaagtcagtgttgtacatagcataaaaactctgcagagaagtattcccaataaggaaatagcattgaaatgttaaatacaatttctgaaagttatgttttttttctatcatctggtataccattgctttatttttataaattattttctcattgccattggaatagatatctcagattgtgtagatatgctatttaaataatttatcaggaaatactgcctgtagagttagtatttctatttttatataatgtttgcacactgaattgaagaattgttggttttttcttttttttgttttgtttttttttttttttttttttgcttttgacctcccatttttactatttgccaatacctttttctaggaatgtgcttttttttgtacacatttttatccattttacattctaaagcagtgtaagttgtatattactgtttcttatgtacaaggaacaacaataaatcatatggaaatttatatttat

SEQ ID NO: 5314 - DNA, 512 bp, Homo sapiens
ccctaaagaactgtcgttaacctcattcaaacagacagaggcttatactggaataatggaatgttgtacattcatcataatttaaaattaaattctaagaagaggctgggtgcagtggctcacacctttaatcccagcactttgggaagccaaggcaggaagactgcttgaaaccaggagtttgagaccagcctgagcaacaaagcaagaccccatctctataaaaactaaaaaaattagttgggcatggtggcacatgcctgtagtcccagctactccagaggctgagatggatcatctgagcctcaggaggttgaggctgcagtgagctgtgactgcgccactgcactccagtctgggacaacagagcaagaccctgtcttaaaaaaaaaaagaaaaaaaaaatttttttctaagaagctgtcctacaaagttgagctttgttagtttttcatgtgtaatatattataaatttatcttttgggatataataaatgctttcatatacctgc

SEQ ID NO: 5315 - DNA, 375 bp, Homo sapiens
gctaggcaatcaagtctcacagattgctgcctcagagcaatggttgtattgtggaacactgaaactgtatgtgctgtaatttaatttaggacacatttagatgcactaccattgctgttctactttttggtacaggtatattttgacgtcactgatattttttatacagtgatatacttactcatggccttgtctaacttttgtgaagaactattttattctaaacagactcattacaaatggttaccttgttatttaacccatttgtctctacttttccctgtacttttcccatttgtaatttgtaaaatgttctcttatgatcaccatgtattttgtaaataataaaatagtatctgttaaatttgtgcttct

SEQ ID NO: 5316 - DNA, 1392 bp, Homo sapiens
gcccaccccaagtatgcctgccacctacgcccacaggcagggcacactgggcagccagcctgccggcaggacttgcctgcctcctcctctcagtattctctccaaagattgaaatgtgaagccccagccccaccctctgcccttcagcctactgggccaggccggacctgccccctcagtgtctctccctcccgagtccccagatggagacccctttctacaggatgaccccttgatatttgcacagggatatttctaagaaacgcagaggccagcgttcctggcctctgcagccaacacagtagaaaaggctgctgtggttttttaaaggcagttgtccactagtgtcctaggccactgcagagggcagactgctggtctccacagatacctgctgttctcagctccagcttcaaacctcgagtctcgagagggccacggggtggtttttatgaccggaatcccgcttcctccctcacgtctgatgtcctgaaggtgcagtcccacctgtacagcccctccccgcccagaactgtgaatggcctgctccaggccatggctgggggcagggagtgaggggacaatttctgagtgaaagagaaagaatggggtcggtggtgaaggtgctctcactttacagaatggagagaacatcgtgtgtgtgtgtgtgtgtgtgtgtgtgtgtgtgtgtgtgtaaggggaggaaagccaccttgacagcccaggtccctccaggtcacccacagccagtttcaggaaggctgcccctctctcccactaagttctggcctgaagggacctgctttcttggcctggcttccacctctccactcctgtgtctacctggccagtggagtggtccatgctaagtctaacactcctgggagctcaggaggcttctgagcttctcctgtactgtgcatcgtgagggccagagacaggaatgtaaggattggcaactgtgttacctttcaagtttatctcaataaccaggtcatcagggacccattgttctcttcagaaccctatctgggagagaaggcgaaccacctccgggtttccatcatgtcaaggtcacaggcatccatgtgtgcaaaccatctgccccagctgcctccacagactgctgtctccttgtcctcctcggccctgccccacttcagggctgctgtgagatggaattccaggaaagaacttcaggtgtctggaccctttctatctagataatatttttagattcttctgctccctagtgacctacctgggggcaaagaaattgcaaggacttttttttaagggtcagagttttcaaaacaaaagcatcttccctagaaatttttgtgaattgtttgcacttgtgcctgttttaaattaaattgagtgttcaaagcc

SEQ ID NO: 5317 - DNA, 737 bp, Homo sapiens
gggggacccggggaggctggacagggcgcggaaccctgtcatggatgacaaggcaagggcagcaataggctggagcccgaaggtatttctccagatccacagggagaggtctcaccctccagctgtggatgttaaaccctgccagatgtcccagccttgatctgtctgctcctactcctcacatctggaggattccagcaggaggggttttggaggggacctgcttgcgacctgctgagggcttgtctgctcccacagcaccatctaagacccctcctctagaagtggggaaggccagatgtgtagcttcgggtatcagaggaggctgacctggcccccatcccaagttacaagaacttcagtgagactaagggacccccatcctagggatcttgtcagggttccttactgaccagaggagcccgcagcaatctccacagcctcctgggtctcacccctttcatgggctcttcatcaggacacttccctctcttttgggagcttctctgggcagaattgggctgggacctctctccccaactgccctgctctcctcatactcaccggtttgaccagaaattctccaaatccagccatagatggctgctgggtgtgcagcaggagaaggaggatggtcagccttggagcatctctcaattacgggacagtccctctttggaagcaggctcctgtgctttcctgtgttaataaacagtaataatcctttccatctctgc

SEQ ID NO: 5318 - DNA, 209 bp, Homo sapiens
gaagaagcaagtggccagatggctccctcttgggcataaaatctcagaggaagctacttaggacatcatcttggccatgatcttctgggactcaccatctccagaatgaaaacaatttctacagtagacttaaggacagtttatgctgaaatggcaattcctcatttaagcaagttttcccaaccttcaggttggtcagccctcctgag

SEQ ID NO: 5319 - DNA, 601 bp, Homo sapiens
tcctgagacccttcgcccccttttcctgcacctagtggcctttcttgggaagtagagatgtggcggctttcccaccctgcccacagcaggccctcctgcccagctgctcttgtcagccctctggcctctggatgaggttgagttctccacaacagctcccaagcatcatgggcctcgcagccgggcctgtgccacggctagtgttgtgtgatttaaaatggactcagcaggaagcatattgtctggggattgttgggacaggttttggtgactctgtgcccttgctctctaacttctgagcccacctcccagggtaggcacctgggggcatgcaggtgcccacctcccagggtaggcacctgggggcatgcaggtacccacctctttctcttgggtgaggctctggcaaggagatctctctgctcaagcacagcagaatcatggcccctctccatgaattggaacttggtacaggttaagtatccctaatcctgaaatctgaaacacttgtggttccaagcattttggataaggcaaattcaactttcagtctcttttctgggggaaaaaaataataaacctagcctagccaggcgtggtg

SEQ ID NO: 5320 - DNA, 2112 bp, Homo sapiens
cctcctcatgcccatgctggggctacccatgggcaagtggggctcggggtagggggcactgcttgaagcacagcacttggttagggggccacagaggcctaagtttgctggcctgtggttttcttgggggggagggcaggggcccctgtgggttctgggctccaggggagggagctggggaggccagggtataagaaaagcatcagaactctcagcttggcccaaggtaccttctgtggttcccctgggtggagatttccgaaaagtagtcttctctgaggctgggccaagcctgagggaaatggggccctaggagggtgggggcgggaaggaggggcaaggtctttcaggaaccagacccaacaggcccttctgtagcctcccccttgccctcaaagggggagtgggggccagctttacctcacccactgtgacccgccgcttccccttcagcctgggaccaggctttcctagatcccagcacagctctgagcttgttcctttgaggcatagagagccagagtctggcttccagagcattgacttcctcttcctagacttgaggccttttctctggctttcctcctttgccctgcagtagcaactggtgctgggacaagttgacccacctctcacagtcatgggtgtggcccacttgtgggagtctcctgtccacctcccagagacggccacccagcgggtctggcttcccagaaagttaactgatgattgtggggtttgtcatatctgggagggaagatgggtgctgggagagggttgggggcagggggcaaggaaaattgctacctgatttgttgaagatttttcctcttgccttacacatggaggttccaggaaacctcttgcagaacttcacacgtgattcttcaagccacacccacctgaaatcaaaccaaaggagtgctgtggctccccttgccctgccaccctttccctagtcttttgtagattgcactaatttacatcctagcaagaatcaacactgtatcagtccacggacctgctgagctgcagccacttgctctaggagctaaggacttgcattttcagtttgttcctgttgcccagaggccctgttctcacctcatgctgctccccagagtagactaacaggctcagtcccctgttgtccttgtggagactaggccttggccctggccctgagactctgtgagggggctggagcagcctggttatttcctatctgtaccaaagaggagtatggtgggagagggagtggagtgcagtgtggcttgggcctggtgctgggaacctgctagctgagcacttccacaagggcatacccctgggggcaggggctggggctgagaactgcagccctgggtcttcccttagggaggaagggcagatgaacccagcaggcttaggaggtggcactgggtgaggacagctgggcaggggctgcagagggaggtggaaatgaaccctgagggctcccccaacttgccatgccctgtcccttagtagatgagttgctcctgattggtcattgggtttgggtgaggcctggaggcttcagaggtgaatttatgcttgggaagcctgatcccaaacctgaagggaagggacttggatctccttatattgaataagctgtttggaggaaggtgtctgtctgggaggatggggcagtaaatgaggttggcagagtggcagtgggggctctgcagagccagccttggagcctgctcattctgggcccttgctgccaaggagcccagcctcacctagcaggaaaggagatgaaggccctcctcccaggaggtagggtcttggctgccccgaacttaaatgcttttgaaatctcttagatgtggaaatattttttcgaacctgaaaatgcagctggtagaatttcaatggaagcataatccatgtaaaatatattttagttgatattttgtaaaatgcactttttgtgtgtgttgatcctggtttcccagatctgtatttcagtgtttacaagggaggaaggacctttcctcacctcccttttgacagagattagaagtacttctttaagaaaaaaataaatttgagaaattgtattgatttagaaaaggatcgttt

SEQ ID NO: 5321 - DNA, 810 bp, Homo sapiens
ccatgggtgtggggccagcagctggtggggactggtttcaacgccagctttctgtgcttctgcctgtcattcggagaaactctggctctggggcttggggcttctcaggatcctggatggcagagactgccctcagaagttccttgtccagggtgggcacccacagtgactcagaggacagggctaggcaggagacctgctgctcctcattggggggatctcttggggggcagacaccagtttgccaatgaagcaacacatctgatctaaagactggctccagaccccgggctgccaggattatgcagtccacttggtctaccttaatttaacctgtggccaaactcagagatggtaccagccaggggcaagcatgaccagagccagggaccctgtggctctgatcccccatttatccaccccatgtgcctcaggactagagtgagcaatcataccttataaatgacttttgtgcctttctgctccagtctcaaaatttcctacacctgccagttctttacatttttccaaggaaaggaaaacggaagcagggttcttgcctggtagctccaggacccagctctgcaggcacccaaagaccctctgtgcccagcctcttccttgagttctcggaacctcctccctaattctcccttccttccccacaaggcctttgaggttgtgactgtggctggtatatctggctgccatttttctgatgcatttatttaaaatttgtactttttgatagaacccttgtaagggctttgttttcctaatagctgactttttaataaagcagttttatat

SEQ ID NO: 5322 - DNA, 201 bp, Homo sapiens
gggtgtggccaatggagggattgcttcttgggttgtgacaaggatgggctatagggcaagggctgaccccatgggctagtacttggggtttctataggaatgaggacgggcttctaaagagacctgctcatacttgctacctccttccagtgggaatttggagactttttggtttgtaaatatatccctttttctaacatc

SEQ ID NO: 5323 - DNA, 495 bp, Homo sapiens
acccttggaccaccattggaacaaccaagcagaatgtacttgatattatttcagggtcccattgctgttcagcctttgtttttacgtcattacaagctgagtaaaattccttctgatgatgttatagttaatctgtatgttttttatatctctgcagaatgatggtgatgaagtctggatggtaggcctcatagcctactatcaacttactcatctttgtaccaaaggtttaagtaataggacacttaggaaaaatgtctcctaactaaactagtgctttctgctttagtacaagccctaaggattaacttaagtataagaagtgttatcactgacaagaacattagccattttcccataactagatagagctatgattttttaggttgcctggcttctgcctagcagatatttctggagtagaaatgtatctgtctacaaactattatcctttttctccgttactaaaatgctattaagagaaagtagggctgg

SEQ ID NO: 5324 - DNA, 980 bp, Homo sapiens
atcattgggtttttcctctgttaaaaaccttaagtgctgcagcctaatgagagtgcactgctccctggggttctctacaggcctcttcctgttgtgactgccaggataaagcttccgggaaaacagctattatatcagcttttctgatggtataaacaggagacaggtcagtagtcacaaactgatctaaaatgtttattccttctgtagtgtattaatctctgtgtgttttctttggttttggaggaggggtatgaagtatctttgacatggtgccttaggaatgacttgggtttaacaagctgtctactggacaatcttatgtttccaagagaactaaagctggagagacctgacccttctctcacttctaaattaatggtaaaataaaatgcctcagctatgtagcaaagggaatgggtctgcacagattctttttttctgtcagtaaaactctcaagcaggtttttaagttgtctgtctgaatgatcttgtgtaaggttttggttatggagtcttgtgccaaacctactaggccattagcccttcaccatctacctgcttggtctttcattgctaagactaactcaagataatcctagagtcttaaagcatttcaggccagtgtggtgtcttgcgcctgtactcccagcactttgggaggccgaggcaggtggatcgcttgagcccaggagttttaagtccagcttggccaaggtggtgaaatcccatctctacaaaaaatgcagaacttaatctggacacactgttacacgtgcctgtagtcccagctactcgatagcctgaggtgggagaatcacttaagcctggaaggtggaagttgcagtgagtcgagattgcactgctgcattccagccagggtgacagagtgagaccatgtttcaaacaagaaacatttcagagggtaagtaaacagatttgattgtgaggcttctaataaagtagttattagtagtgaa

SEQ ID NO: 5325 - DNA, 364 bp, Homo sapiens
ccttctcatgctgatttgcagacggggcacccctgtggaggggctgctgtgggccctgacctccaagctcctgcctcaccgtctgccttgctcctctcttcccaaatcatcaccgccatgggcccagccccaaagggcagtgaatggccttctctgaaaccctgcgtcaagcagtgggagagggcagtgcccggtgccctggtgctcccagctgccctcctgcttcgggcctgggccgagggccttgtgtaggccatgttcctcgggcagctgccccgggccggagctgggcactccagcggccctggcgcgtggctcctgcatagctagcccaagccaataaagggctgtgatgagtggctgc

SEQ ID NO: 5326 - DNA, 679 bp, Homo sapiens
gcctgggtctcaccggctctcacctggccctgcttcctgcttgccaaggcagaggcctgggctgggaaaaactttggaaccagactcttgcctgtttcccaggcccactgtgcctcagagaccagggctccagcccctcttggagaagtctcagctaagctcacgtcctgagaaagctcaaaggtttggaaggagcagaaaacccttgggccagaagtaccagactagatggacctgcctgcataggagtttggaggaagttggagttttgtttcctctgttcaaagctgcctgtccctaccccatggtgctaggaagaggagtggggtggtgtcagaccctggaggccccaaccctgtcctcccgagctcctcttccatgctgtgcgcccagggctgggaggaaggacttccctgtgtagtttgtgctgtaaagagttgctttttgtttatttaatgctgtggcatgggtgaagaggaggggaagaggcctgtttggcctctctatcctctcttcctcttcccccaagattgagctctctgcccttgatcagccccaccctggcctagaccagcagacagagccaggagaagctcagctgcattccgcagcccccacccccaaggttctccaacatcacagcccagcccgcccactgggtaataaaagtggtttgtgg

SEQ ID NO: 5327 - DNA, 633 bp, Homo sapiens
gagggtgtcacctttgatggggggtgggcaatggggagcagtggcttgaacccacttgagaaggctgcctcctaggctctgctcagtcatcttgcaattgccacactgtgaccacgttgacgggagtagagtagcgctgttggccaggaggtgtcaggtgtgagtgtattctgccagcttttcatgctgttcttcagagctgcagttatgccagaccatcagcctgcctcccagtagaggcccttcacctggagaagtcagaaatctgacccaattccaccccctgcctctagcacctcttctgtccctgtcattccccacacacgtcctgttcacctcgagagagagagagagagagcacctttcttccgtctgttcactctgcggcctctggaatcccagctcttctctctcagaagaagccttctcttcctcctgcctgtaggtgtcccagaagtgagaaggcagccttcgaagtcctgggcattgggtgagaaagtgatgctagttggggcatgcttttgtgcacactctctggggctccagtgtgaagggtgccctggggctgagggccttgtggaggatggtcggtggtggtgatggaggtggagagcattaaactgtctgcactgc

SEQ ID NO: 5328 - DNA, 1005 bp, Homo sapiens
ggcaggagcctacctggacatccctgctcagccccgcggctggaccttccttctgcattgtttacattgcatcctggatgggacgtttttcatatgcaacgtgctgctctcaggaggaggagggaatggcaggaaccggacagactgtgaacttgccaagagatgcaatacccttccacacctttgggtgtctgtctggcatcagattggcagctgcaccaaccagaggaacagaagagaagagagatgccactgggcactgccctgccagtagtggccttcagggggctccttccggggctccggcctgttttccagagagagtggcagtagccccatggggcccggagctgctgtggcctccactggcatccgtgtttccaaaagtgcctttggcccaggctccacggcgacagttgggcccaaatcagaaaggagagagggggccaatgagggcagggcctcctgtgggctggaaaaccactgggtgcgtctcttgctggggtttgccctggaggtgaggtgagtgctcgagggaggggagtgctttctgccccatgcctccaactactgtatgcaggcctggctctctggtctaggccctttgggcaagaatgtccgtctacccggcttccaccaccctctggccctgggcttctgtaagcagacaggcagagggcctgcccctcccaccagccaagggtgccaggcctaactggggcactcagggcagtgtgttggaaattccactgagggggaaatcaggtgctgcggccgcctgggccctttcctccctcaagcccatctccacaacctcgagcctgggctctggtccactactgccccagaccaccctcaaagctggtcttcagaaatcaataatatgagtttttattttgtttttttttttttttttgtagtttattttggagtctagtatttcaataatttaagaatcagaagcactgacctttctacattttataacattattttgtatataat

SEQ ID NO: 5329 - DNA, 737 bp, Homo sapiens
ggggctgagcccctgcggggagtgctcatgtggacatcagggccagacacccactccagtgcacaagacagacttgcgaccgcttgagcccactgagcagatatggtgggtggctggaggcttctctttctcagtccctgcctgtctgccagcctgcagctctcctgcttgacactgacttactacttgaaactttatttattgcaccatgttggtgtggtgggcaggtggagggcctgccctggacacaggggccctgctgagcagtggccccatcctggaacttgaccagattccccccagtgctgctgctaaccccacaccacccaggcctccacctccccagggagtctccaagagcctcgatcctctgctcactcagcccagccatccatagccctgggaattccacctgccaaggatcccagcaggctggatgagggatagtagggcatgaggagaaggagccctgtaaggactgaggccccggccagcccttctcctccaccagttccccagagcagagctggagctgatgcctggacacagctgctgagcctggcctgggcctcttacccacttggttgttttcttgtccctctgtctgtctgtctatctacttgtctgtctgggccactcctgcctgtgtgttggtctattcctgggaagctcatcactacaggccctggcaaccttcccagtctgtcccatactgttacccataaaactatctcttt

SEQ ID NO: 5330 - DNA, 2496 bp, Homo sapiens
aggagaccaaactgttccttgcggtctagtatttaagaactggaacttgaaagtcctccttctaccaactccacctccaccccctcattccccttctcccaaagtactactgctgttgcatgacaaccccaaatatgttctgtcaacacaaacctgcctttggtgtataaacagggcattacagaatggtacaccctatatatttctgttcagtatccattcactagttcttcatttataaatatcatcttccccattctgctgctgaatgccacacatccatccagtctgagaaagtgagagaggcaatcatgccaagaacaagccagcaaagctctttcaccagatgtagactgtagccctgctgccttccctccagcgagtctgccagcatgcttcttcatcctttttatatgttctttgcttcctacttccctgtcttccaacatactgttcacttactctggcagtctttctgcttttcattaagcctcaaaatctcctctgttctacttggcaccacaagctatgtcctatatatgtatttctgacttggcaggatagttcaggggtctggcagtttttatttaccttcattattaaatgggcctctgggatgttgcctcttcaggagctttttggtaatcaatacttctctcagaagtatgagaccatcctctgcactctgctctgtcatcaaaggctgctgggtggagataccctttttgaaaggtggccttggtgagaggtatggagccaagtcttctaggttgcttgcccacatcactctatctctggcctctgattctcaactttgtacctgtgtggctcctcttgttagtgcaatgttgactgttgaaaaagcagcagtatgcttacaggtttgcttagtttggggacaccgttaccaccagaatggctgctctgacaatatgcctagggactttctcatggcttttatttaataaggaggctgggcaccctataaagcctcatgcattcacacctttgcagcatggtttatgcctcagtgttatgtgcactggaatgttttccacttcacatttccaagtagaaatattagtgttacggaagtgcctaatatcccagtccaaatttttttttttttttttttttttttttgagacagagtcttgctctgtcacccaggctggagtgcagtggtgcgatcgctcactgcaacctcagcctcctggatttaagtgattctcctgcctcagcctcccaagtagctgggattacaggtgtgcaccaccatgcccggctaattttttgtatttttagtggagacagggtttcaccatgttggccaggctggtctcgaactcctgacctcgtgatccgcctgcctcagcctcccaaagtgctgggattacaggtgtgagccaccacgcctggccccagtccaaaatatttaaagattgtttccttagtgtcttgaagttttgcacaaaattcttttttttgagatggagtctcactctgtcacccaggctggagtgcagtggcgtgatcttggctcactgcaacctctgcctcctgggttcaagcaattctcccacctcagcctcccaagtagctgggattacagacgtgtgccaccatacctgggtaatttttgcatttttagtggagagggagtttcaccatgttggccaggttggtcttgaactcctgacctcaggtgatcctcctgcctcggcctcccaaagtgctgggattacaggcatgagccaccgtgctcagccgcaaaattctttatgaattttacacttggcaaatgttaatgacggaagccatagtctgctcctaatacatgtccaaagcattgactgttgtgtcattagctgcctggttacattagctccctggcttcttgtttagaccactgctaatcccttaaaaacaagaggtctggcactagtagcacaacctaaggtggcattacagatctttgagcgagccacagcaacttttctgccaagtcagcttagtttagacttcagtgaatcaggctattgctatcctaatgtatgtctctatgagtgtatttagccacacatctgcccttggttgactttctgactcattgcttgcttgcttgtttccttgctttggaaaactattgaagattgctaaaaaataccactgcaaagtgatggaaaagggtggagaacaggggagtagccaggctggatggctcaaatataaatgaatgaggaattctttatgaagtatcagtcagattttatgattaagtgatgtaatataggaattatgtaaaagggaagaatgtctgatactgatctattagagaggtactttagaggcttcttgattggcataaagttcctaaggttatagattttccccccttttggctgtatagcaaagtgttttaatccacggttgtgccttattgttccattaaaattgtatcttcgatccatcaataaatacttgtggttgaaacaa

SEQ ID NO: 5331 - DNA, 861 bp, Homo sapiens
taattttttaacatcttgtaaatattcctgtattctcaacttttttccttttgtaaattttttttttttgctgtcatccccactttagtcacgagatctttttctgctaactgttcatagtctgtgtagtgtccatgggttcttcatgtgctatgatctctgaaaagacgttatcaccttaaagctcaaattctttgggatggtttttacttaagtccattaacaattcaggtttctaacgagacccatcctaaaattctgtttctagatttttaatgtcaagttcccaagttccccctgctggttctaatattaacagaactgcagtcttctgctagccaatagcatttacctgatggcagctagttatgcaagcttcaggagaatttgaacaataacaagaatagggtaagctgggatagaaaggccacctcttcactctctatagaatatagtaacctttatgaaacggggccatatagtttggttatgacatcaatattttacctaggtgaaattgtttaggcttatgtaccttcgttcaaatatcctcatgtaattgccatctgtcactcactatattcacaaaaataaaactctacaactcattctaacattgcttacttaaaagctacatagccctatcgaaatgcgaggattaatgctttaatgcttttagagacagggtctcactgtgttgcccaggctggtctcaaactccaccaaatgtacttcttattcattttatggaaaagactaggctttgcttagtatcatgtccatgtttccttcacctcagtggagcttctgagttttatactgctcaagatcgtcataaataaaattttttctcattgtcat

SEQ ID NO: 5332 - DNA, 2869 bp, Homo sapiens
gcacacccagcctgctgcttctgaccctgcatgccccatcgcagcgtcccacctttcctcctttcctttgatttagcctctttgggctggagcagctgttgaactgggaagagactctaaactgccagtcatctgtaatataaaccatttgctgtatagacctcctttgtctgcacaccatctcccaccagcctcccctcccccagggccccacccagtgtgggcctgggctctcttgggctttatccatgtctttagatttgtgtttgccttttgtttttttaaccgcgcagttcattggccactctgcacgcattcagtattaccatggagctgggaatcttgctggagcccctggggcaatagcagcagcaccaggcggtctcctctacagactgccttggcccacccattgaacattcggcacgtgaccttgtggggggagcggggattgggcacctgcgatcctctttcctctcttcatctttctcttctgcccttctttttggaagaaggggtttcaaaaccagtttagtttccaaaaagtgtacatttgtggggggggggggtctaatttgagagcgagagtgtgtatgtgtgtgtgtgtaagtgtgtggatttttttatcatttttttaaaatgcagtactctttgtatcagtctgtcatgggtctatagctgtttcagatttttttcagctgtacttgagcatctgaaactgcaagaaagaaactcattaaatgtgattcttcttactaaacaggcctgactgctgtagctgtgtaacttccccattcccacctactcttcccatcctttcccaactttggagaaaactccccagtttagccccctgacctgcaggctgtgtcctggcaggtgtgggagggaagcccatggccaggtaccagggagggcagtgaatgtcttgctcttcccatgggtacagcccacagcttcttggctgaacgtagaacttctttttctcacccagtataccagcctcttcctggtgattctgttttgctgctttggcaagaactacattttgtttttaagagaaatttctgaatatgaatgtggagagcaaacacaaaaagatttaggttacgccgggtgcagtagctcacgcctgtaatcccagcactttgggaggcctaggcgggtggatcacctgaggtcaggagttcaagaccaatctgactaacacggtgaaaccccatctctactaaaactacaaaacttagccgggcatggtggtgcgtgcctgtaatcccagctactcggggggctgagacaggagaatcccttgaacctgggaggcggaggttgtggtgagccaagatcgtgccactgcactccagtctgggtgacagagtgagactccgcctcaaaaagatttaggttgcaaatgtttcaagcatgtgcagttttgtgtgtgtgtatacatatatatggtcagcatatatattgtgcagctagggcgaagccagcagaggtgtgtgtatgtctttatgaaatgtttgaaaagagataaactgactgcttgataatcactctcaggtgtaaagctccaagtgtaaataaaagtggcatttaacaaatctttcagaacaaagtacagctgactatatataccaagagctaagctaaaggaacagctgagagctccgatctccacgagagactaatctaaaagctctgctttgtacttcctcaccctgctttcgtacaaggaagggggacgatgggaaatcatggacttgtaagttgtatttaaacataaaaatgaacttggtaacttctgggtttagtagagcctcagtgtcgctttaacttagtttactttttttttatttttaaagcagcaatggatggttttaaaggagtattatgattgtaaaattgctaaatatgactgtaacacagctttgtggtagctgtgacacagttcacttgggcaaaggagtggtgatggactcgttaaaatcatatatacttgaatagtccattgaccgaaactctttatagactattgtgtaaatgtggaatcacagactgttaacattgcctggacttcagcagagtcctggagctgctgggacctctcctatcatgatgaacttggacttttttttttgatttctggttttaaaaaacataaaattatagaatccagataattcgctggagtcattctgatccaccatgtagatctgtatttagtatcatttggatttggagaagtgttgattacattatggctgtgtaataaaatttttattaaaactgcatcacactgtagccactttgccaccacctccccacatgtagccgctgaaacccccacgagatgccaatgcacacagcagggagaaaagccaaccaaagaagaccgaagggtatctttccacccgagtagcctctgtagtgattgggaccaagactaaggacttgtctccaatctcagctgaggcagtgcctctgaaccaagatcttggtcaggcattaagacactggctttgtcctaccaactaggatttcttggtggttcacactatttcttgtgctggggaattccctcattgggcccctcctccctccacagtgtggtttcagtgttgaagggtgcagcacccaaggttgtttttatgcattttttcagttccttccaagaagcaaaaaggccagtgtccatctgcctagttcataatgtttataggtctgtttgtctgtcttgcttctggcaggtgtagggaaagtctactgcctgccactcccttcaaaaagaatgtttttgcttttgtgaagtcctgacttgccactcaaactgtaccaatattgtaaataaatgttatgccattttaac

SEQ ID NO: 5333 - DNA, 381 bp, Homo sapiens
ggctggactcctgtccccgcgggccgctcacctgacatgtggacctgcagctttgtccccactgtgcatgccggcttgagactggagccccgcggtgcagggcagttcaccgggtcctgcaggaccaggtgccagccactaagggggggcaccgccgatgccaggggttttgcccacccgggccccagcgttcccagagccaaatgacactaacttatagaaggggagggggcaaagggcttcttcctcaggccagctcttctgaggaggctctgccctctccagaggtgccagaccgcggattttatttagcaagcccagaccttccggtctaacgtctcacaccacgacggactccccttcctaataaaactcaaagac

SEQ ID NO: 5334 - DNA, 1052 bp, Homo sapiens
cccacaggcagagggcatcggggccatttggccggctctggtggccactgagctggctgactaagccccgtctgaccccagcccagacagcaaggtgtggaggctcctgtggtagtcctcccaagctgtgctgggaagcccggactgaccaaatcacccaatcccagttcttcctgcaaccactctgtggccagcctggcatcagtttaggccttggcttgatggaagtgggccagtcctggttgtctgaacccaggcagctggcaggagtggggtggttatgtttccatggttaccatgggtgtggatggcagtgtggggagggcaggtccagctctgtgggccctaccctcctgctgagctgcccctgctgcttaagtgcatgcattgagctgcctccagcctggtggcccagctattaccacacttggggtttaaatatccaggtgtgcccctccaagtcacaaagagatgtccttgtaatattcccttttaggtgagggttggtaaggggttggtatctcaggtctgaatcttcaccatctttctgattccgcaccctgcctacgccaggagaagttgaggggagcatgcttccctgcagctgaccgggtcacacaaaggcatgctggagtacccagcctatcaggtgcccctcttccaaaggcagcgtgccgagccagcaagaggaaggggtgctgtgaggcttgcccaggagcaagtgaggccggagaggagttcaggaacccttctccatacccacaatctgagcacgctaccaaatctcaaaatatcctaagactaacaaaggcagctgtgtctgagcccaacccttctaaacggtgacctttagtgccaacttcccctctaactggacagcctcttctgtcccaagtctccagagagaaatcaggcctgatgagggggaattcctggaacctggaccccagccttggtgggggagcctctggaatgcatggggcgggtcctagctgttagggacatttccaagctgttagttgctgtttaaaatagaaataaaattgaagact

SEQ ID NO: 5335 - DNA, 2417 bp, Homo sapiens
gttctggaagcctgtcccaagtgaatgaatgctccagcgattccaaactgcagcccctctgcccctcaccaaaacctgcggggctgcttggagtggaaagcagggagcagtgttcagaggcaaagcagccttcccagccgctcctcgtggggggcctgtatttattaatttatttccctgactgttgcctcacttccttggaactcctgcctccacagcccctccagtggcagggacaggtcttgggtctttgtcatcttggtgctgtgagaggtaggagggcagcctgccccatctaggaatctgggaagggctggccctctcttagaagccatttgaaattactgcagggattagctccctgtggtggagcatacacagggtactctggggtcgaggtgagaggtgatgtggtattcagtgcccgtcagccaactgtgggccttcacctctacctgcacttcccctctcacaccagctgcactcccgtggctgccagagcagggtggttttccccaatacctggagctcagaaaggcagagccatctggccctccagggtgtccccagccatcaggagacttgagttggtatttggacctgagcccgcacattccactcccattctccctccaagaggggcccagcattgtatttccctgtgaccccttactctcctggccagaacttgagccagctgtgggatgttgctgcaggacagtaagccctcacctgggcaaacatgaagctctggcctcctttcctcagccccttgttcttccctgtcctccaccctggaccccagccggctgctggagcccagaggccaccttctccctgcatcctgaatgatgcttagtcagaagcctgtgttggaacatccctcgtttacggggcgctggcctacctcctgaggacctcagccacagatgagatcacacgcatgcacgtgcacacatgtacacacacacacctacctgcacagcacgctgttgagtgttggttgctagagtatctggctggctgctgtgtgcctggtttcctcacatcctgcctcagcttcaccaccctggcttatgtggaacacctatcagggagcagaaaaggggtgcagtacactaagtgaacccagattctggattcttggtgtccacagcctagctgatacgagatagcccataggacacctggtttaggtagaaggagcctcctcaaaggcagtgctgggcacccacgggtgtgctggatactggagtttgagaggagggaggtgctggggccaaaggagacactagaaaagtggtagatgggacaggtaagtggcagaggtgaggggataagttagaatgtaaaagggcagtaattaggggtgagggaaaggagataggggaccctaggaggtagagtgggaccatgtcgtgaggcagttgaagagttgaggaaaggtttttctgggccctactgctcccctctgctgcaggtaagtcagagcagctttaccacagcttcaggccacgagagccccttcacccgccctgctgcgccataggcagaggcttataaagaaatgggttctgggccaggtgtggtggctcaagcctgtaatcccagcactttgggaggccgaggcgggtggatcacctgaggttaggagttcgagatcagcctggccaacatggtgaaaccctgtctactaaaaataaaaaaattagctgggcgtggtggtgggcgcctgtaatcccagctactcgggaggtttaggcaggagaatcgcttgaaccctggaggtggaggtggaggttgcagtgagccgagatcgcgccattgcactccaacctaggtgacaaagctacacgccatctcaaaaaaaaaaaagaaaaagggttacaaaaggttcccagctccggggcatcagcctgagtgcgcttgagctgctccaaacctggcccttccccactcctctagcatcgccacccgcatggccctggaactcccgcggcggcgggggcgggcccgtgcctgctgtgccccgacttcccacaccagccgcgcccaccgcaggtgggactcaggttcgccctctgggccaggtccttcacgaggagggagctacccttcgccagaagtttgtgagaatgtggccgcccttttcctgccctctgccccatgtgggtggggggcctcgtggcccggccggcgccccgtccccttctgcatgtctgaggccaccggcaaccgccgccccactccagatttgcccccgccttgttttgaaagccccttatttataacttttatactttgtgcaggtcgcggcgcttcctgcctcatcctcggctgcatggggcgggggcgctgtttttaacgtgcccgtttgtactgatgtatgaacttgtcaataaacacaattgtttgtt

SEQ ID NO: 5336 - DNA, 280 bp, Homo sapiens
tggccggggcccctgccacccctaactctcattcattccctggctgctgagttgcaggtgggaactgtcatcacgcagtgcttcagagcctcgggctcaggtggcacggtcccagggtccaggctgagggctgggagctcccttgcgcctcagcagtttgcagtggggtaaggaggccaagcccatttgtgtaatcacccaaaaccccccggcctgtgcctgttttcccttctgcgctaccttgagtagttggagcacttgatacatcacagactcatac

SEQ ID NO: 5337 - DNA, 1526 bp, Homo sapiens
caaagaactgcccctggtgatgtgagcagggacctgcctgcccctttcaacctttcccctcaccttttttgagatttttgctgcaatctgtttgccttccctgaatcaaaataatctttcattcgtcaccattatactaatgaacaatagatttcatgtttcaaaatttcagattttacatgttaagatgtactaacaatattccttgtatcaaacatctccttttctccctgatacatagccctgagacatttatagcgttcaggagtcttctattgcttccattccttcagcagggctgcgtgggtctgttttaacgtgggccaagcctacctgggcagcccatttgccagggcttgcctcaggccatgcagcattggcgctctggctgcagcagctgagttgctcaaggccagtgtccaagtggacagcagcctctggtactccccccagttatcttccacccacatggactgggcagagcagccctcttctgtgtgcactgcatacgctgcagccgtgggagttattctcccctagagatcgacttggcagcacgaaggattcttttctctttcatgcttctcaggctcaatagtttctaattaatcttaaaatccatgtcttttacattgtttttttaattaagtgctgtttactaaccaaataatatttataacatgagtaagctataattaataacaatgaaataaatacccatgtacccaccactggacttcagaagtagaactcatgactgggactaggatgaggcaagggagaccctggccttgggcacaaaatgtaagggatgccaaaaaaatacagtaatcaaagtaagtaatatttcaatccaatatttttaaaaatcagaattaatgcaaaaaaaaccatgatgaacaaaatattaaaatttaaaataaagacaggattagtattactgagttttccttttgtcccaggctctaatatggcttggcatggggcagaacattacaacataccagtcgtgtcatggtgcccaaggctccacagacctcagtggctccctgctgcctgccacagcatctgttttagcagcctcgactcctcagcactcctcagcacacacctcttcttatcaggcttcctccacttagcaacttgctaacggccacctctgtgccttctgatccctgggcgccaatatcctcctgcccttaccatccttccaggcccaacttaaatcccactttcccatgaagcctaactgcgtgaacacccctacccccatacccattagcagtgattttgcccttccccgtaatgctgtcccacttataactgtgctctacttagcattctcagggatcataccttaatgttttcagtatgtctgcgttctcctactagattgtatgtccctcaagagcatgttctgtttctcttctgtctgacagagcactattatacctgactttcagtaactgttagctgtgattagttagctggtggatttaattgattaaaaaattacgattgaatgt

SEQ ID NO: 5338 - DNA, 571 bp, Homo sapiens
tggctgcagctcaccatgtatgcctgaaccaggctggcctcatccaaagccatgcaggatcactcaggatttcagtttcaccctctatttccaaagccatttacctcaaaggacccagcagctacacccctacaggcttccaggcacctcatcagtcatgctcctcctccattttaccccctacccatccttgatcggtcatgcctagcctgaccctttagtaaagcaatgaggtaggaagaacaaacccttgtccctttgccatgtggaggaaagtgcctgcctctggtccgagccgcctcggttctgaagcgagtgctcctgcttaccttgctctaggctgtctgcagaagcacctgccggtggcactcagcacctccttgtgctagagccctccatcaccttcacgctgtcccaccatgggccaggaaccaaaccagcactgggttctactgctgtggggtaaactaactcagtggaatagggctggttactttgggctgtccaactcataagtttggctgcattttgaaaaaagctgatctaaataaaggcatgtgtatggctggtc

SEQ ID NO: 5339 - DNA, 1580 bp, Homo sapiens
agctactgctgttcttctttatcatttattcacttccgtagctcctccttgaaagttattaccttttcagagtttaagttttcggttccacgctcttctaattgggagataatatggaagaagggccagagcagttacagccctccttcttttttgttttctgttgagggccgactgctgctctgccttccttctagtattttctttctcaattcatacgcttagattggttttcatatgtcatgtttagtgttttcatcctcctcatatacttcagcaggttcttttgctttcaagatttggaagcattgccaaagacagccatgaagaaggaagctgtagaggtgttttttgttgttgtttatttttgcttttgtggttgagggaaggacaagagataagaggttgttacctcagtaaaaaccttcaggccacaaagcaaaaagttgcatagccacaacgaagatctagttggatatagtttttgatttaagttgcagttatagccaatttaggctaatgcttggttttggagcttttatacacaacgtttttgttaggcatcacagttttgcaacctctgctccaaagagaaaaatagaatgagttttctttcttttttttttttttggagtcagagtctcgctctcttgtccaggctggagtgcaatagcgcgatctgggctcactgcaacctccgcctccctggttcaagcaattctcctgccttgcctcctgagtagctgggattacaggcgtgtgtcaccacgctcggctaatttttgtatttttagtagagacagggtttcaccatgtcaagctggtcttggactcctgacgtcgtgatccacccgccttggcctcccaaagtactgggattacaggcgtgagccactgtgcctggctgagttttcttaaagtgagcttaatttctgaactcttagtgattcatatatgtacataaatctgtgatcccatttcttattgcaccattcaggaacactttatataaatgagtggctttttatttcatattattagtagtatcatggttccattacaggcctattaacatcatacattgtcattagtctttgaagaaaaaatatgtaaatatatatgtgtaacatgagaatttctctctaaagcagggcttaaaattttttggaaaagtttgacaaagcataccacatgaattcagatttacctcaatgctaagaattatgtttagttaggaaaaaggaaagtcattttgacctcaggtagaaaaatagattgctttgagttttatgtagctttagactttaaaaagttagaatttattctgtaactaaaaattatttgaaaaaattatgcctctggtttaattattggtgattacacactctttctcttacccttgtgtattgaactatgtccataatcaagttgatgtggatcctgaaaagtgttatgaacatctgattggtatttgtcacatttattttaaaattagcatctgaacacttcaaagctgtcagtgtgtattggtttcaccaataaccactgcttgatccttacaattaaattttttaactaac

SEQ ID NO: 5340 - DNA, 1028 bp, Homo sapiens
tcatcaactttatttttgcttaattatgtgtagtcatatgaagtctatttctagttgactgtaacatgggtattaatagtctttgctgctggtaatactgaaagaacctgctttatattggagtatcaagatctcaggttcattaagaccaaactgacttttcctttgtttttcatatatttttattctacctttcagtaaaactagagaagctaaaaaatagccatgacaatttattaatataagtgaattaaccatttctcaggtgggaaattctctttttttaaaaatgtgtgtttatcgtctggtgtggtggctcacacctgtaatcctaacacttggggaggctgaggcgggcagatcacttaaacccaggagttcaagaccagcctgggtaacatggtgaaatcccatatctacaaaataaacaaaaaattagccgaccatggtggtgcatgcctgtagtcccagctattcgggaggctgaggtaagaggatcacctaagcctgtgaggtcatggttgcaatgagtcatgatcacgccactgcgctacagcctgggcgacacagtaagaccctgtctcaaaaaaaagaagtgtgtttctggccaggcacggtggctcacgcctgtaatcccagcactttgggaggcctaggtgggcagatcatgaggtcaggagttcgagaccagcctggccaacatggcgaaacacctgtctctactaaaaatacaaaaattaggccgggcgcagtggctcacacctgtaatcccaacactttgggaggccgacccagatgggtggatcacctgaggtcaggagtttgagaccagccttgacaacatggtgaaaccccatctctggtagaaatataaaaaattaaccgggcatggtggtggacgcctgtaatcccagctacttgggaggctgaggcagaataatcgcttgaacccaggaggcagaggttgcagtaagccaagatcgtgcctctgcactccaacctgggtgatggagcaagactccatctcc

SEQ ID NO: 5341 - DNA, 552 bp, Homo sapiens
aggccatgtctcaccactggcagctgggcagaagcccagcctctgtgtctgtagcccaggcctctaccccagtagcaggtggagggccaggattggtgggtgagctttagggagcagctgctcgtttggagtcctggacgttggagggattacccactactgatacctgcagaatggactgcagaaaagtctcaaaaataatgcctttattccttccctccctaaggaggcaaagagttgatttacctttgtgaagagaaaacccttatctaggacatccacagggtagaggttgggtgtgtgtacgggagtgtctgaggcccagtgtgttttttagggttaccccatgtaaagcacttaccgctgtgcttggaattcagcagctgtcaaaggtgcaatttcaggggcagggaacctttgaggatctgggcccgaccctcactacccctgagatattagttcccaggcctgttttcccacaggattgtgggctctctgcttccttagtcggaagtgttttcaactaatcaaataaatgaatgaatgatgaat

SEQ ID NO: 5342 - DNA, 354 bp, Homo sapiens
cttttcaggctcatttgtactctcttcccctctcatcgtcatggtcaggctctgatacctgcttttaaaatggagctagaatgcttgctggattgaaagggagtgcctatctatatttagcaagagacactattaccaaagattgttggttaggccagattgacacctatttataaaccatatgcgtatatttttctgtgctatatatgaaaaataattgcatgatttctcattcctgagtcatttctcagagattcctaggaaagctgccttattctctttttgcagtaaagtatgttgttttcattgtaaagatgttgatggtctcaataaaatgctaacttgccagtgatt

SEQ ID NO: 5343 - DNA, 333 bp, Homo sapiens
ctctctgtctctcccccaatccccaggttgcctggggattacagagaagtactgttctaaaagtacgaatgtcatctagctattaaaagatggagtgtgtgctttctgagccttatttaaaacagaaagctttagcttccattagaatataagctctatgagagcagggcccctgcttgtcttattcgttgttacattctccaatgcttggaactcaataagaattttttaaaggaataaagggtcatctagaattttaaaatgactttaacaaaattgacatgtgttatgaaaatatgtaacattatttaaaaattaaacatggaaaatccc

SEQ ID NO: 5344 - DNA, 826 bp, Homo sapiens
aaatttctggctcataaattgaaataacagccacgttcccaaggttgtaacagaagattcaaaacatcccattctagccacacacaaataaatatctgcggcttagtgataggactctaccttttctcctagaagcagttactgaacatccaggagtacaactccttcccatcattcccatgtggaagggtctctcccatcaaggagaacatgtggcatctctgatcctttacattgagaacatttgttggatatgttcatttattcaatagtcatttattgagcacctactacgtaccttggtactgttcaagctgtgggagatacagcggtaaacaaacaatatagagcagaaagttaaatattttatggttcatatgtgaaaaagtaattatgtttataaatagactaactgctggatgttaccaccaagtaagaaagcaacaggtaagataggctttctctctccctataccaagtaatttatacctacacagattgggcaattctagctaatgaaaatatacttaaaagtatttcttaggccgggcatggtggctcacacctgtaatcccagcactttgggaggccgaggcgggcggatcacctgaagtcaggagtttgagaccagcctgaccaacatgatgaaacctcgattctactaaaaatacaaaaattagccaggtgtggtggcatgtgcctgtaatcccagctactcaggaggctgagacaggagaattgcttgaacctgggaagcagacgctgcagtgagctgagattgtgccattgcattccagcccgggcaacaagagcgaaattccgtctc

SEQ ID NO: 5345 - DNA, 1395 bp, Homo sapiens
aagagccgccctcccttccccaaggatccactcccccagctcctttagagaatggctactgctgagtcctttggggttgagggagatgggagctagggggaggggagggagatgtcttgttgtggggacttgggctgggctaaatgggaggggttgtccctccccatcatccattcctgtgaggtgtctcaaaccaaagttaacagggagaggatgggggaggggacaaattagaataggatagcatctgatgcctgagaaccctctcctagcactgtcaaatgctggtattgaatggggactgaggatgggtctcagagagcaacctcctccctcgtagagggagattatatccccaactccagggacctctttatctcaatctatttatttggcatcctgggagggatttccaatagtaatttatgtgacctggggcaggataccgtcagtgaggtgcccagagctgcaccctttcctccatttcccatcccccatctcctcaaccaccagggtctgagttctagcagggtcctgggggtatcccactgctatactgttctactgcttccctcagtatctgaatgtctcaatttaaaacttgaagctctttagaccaatagactggtgagaggagaaaggagcttatcccccagaccctgctttataccattcacatcccagggctgtgtccagacagcacaaaacggcaaggagagcccaagccccaatgccagaattcttccaaactccctgactctttgaagtttttactcaccccatttcaattatcctgatcccttctcatcccctgcttggcttctctgcatgtggtcatctgctgtggcttggtgtttaatgggttaaaaataagccactgcctgacatcccaacatttgacaccccagcaatgtgtgactcccccaacattccactatgccatcctgcagctgaaatgggaacactggctgcctctccaaacccgctcttggacagaggatctgggaggtggaagccaggccagaggacttggggaaaatgagatggaggaaggaaaaagggagaagctgagccacagcttaactcctacagagtgaaatgaaaacgggctgaaaataccaccccaggagaggacctcgccccaagcaagccagtgagcagccctgccagactactgccagactgagaaacccagaagctggtagtcatgtgggcttgccttctctgccaaacgactgggaaaccaaaatgagcccaccttgtgttcttcctagctccaccctccccgtgctgctgtgttctgctcctccccacgcttccctgctatagttcccagctgctgtaacggagccacctccaactctaacaataaaccaagttcattgcagatagtgt

SEQ ID NO: 5346 - DNA, 132 bp, Homo sapiens
ctccccatcgccagctgatgactcaagattcccaggagttctgctcattctaatgatggcccattctacttgctctggacctgcccccgcatcccctgcctccatcctagtaaagactccttgctatgctgc

SEQ ID NO: 5347 - DNA, 132 bp, Homo sapiens
ctccccatcgccagctgatgactcaagattccaaggagttctgctcattctaatgatggcccattctacttgctctggacctgccctcgcatcccctgcctccatcctagtaaagactccttgctatgctgc

SEQ ID NO: 5348 - DNA, 1387 bp, Homo sapiens
agcagtagccaaacaccactttgtaaaaggactcttccatcagagatgggaaaaccattggggaggactaggacccatatgggaattattacctctcagggccgagaggacagaatggatataatctgaatcctgttaaattttctctaaactgtttcttagctgcactgtttatggaaataccaggaccagtttatgtttgtggttttgggaaaaattatttgtgttgggggaaatgttgtgggggtggggttgagttgggggtattttctaattttttttgtacatttggaacagtgacaataaatgagacccctttaaactgtcttattttccaccagattgagaaccagatgttctctacacactatcactgttcaatagagctttcttcagtgatggaaatgctctgtaatctacactgttcagtacaggtagctacggagcatctgaaatatggctagaaactacatttttgttttgattaatttaaatagccatacagttgctaccatactggtcacggcagctgtagactgactgggtccatagttcatcacctcaaaattctttcaaaatttattatctctttctctccttacatgtttatttcccaggcctaccctggtgattagaacagctgaagggcctttcttgttaggctgtccatgccctaaggatgggttcctgtttatccttgccacgcagctgagcttactgcatgtttatatctcccaaggactgttctctgctcagaaatgccctgtcaagggtgtggcatcacgcagtttcatccaagttgtttcaggaattgctgacactgctgggtgcagttctatcccctaaagcctagggtgtggccctttaacttccccttcagtagaactgggaaaggcagtaccattcctagttatgagtgaagcatccactttcttttgtaacaatgaggaacagaaaggataagactgaagagtgatcttttgtccaactaaaccatttatctccttttgtaggtaaattcaaatcctgcccagttatagttttcagtcactggagaattccaggtaggagccctactttaggtgatcctaggaactcctatgttcagaaaagaattttcttcctactatataattacagtatttagctgtcaattttaagatgaatttggtagagccttatagtaaagtatgtatcttggtcacacacaaagcttggaaaaagtaaaagatgtctaaaccataatcttgtaactcataacatctgggctggggcccggggatctaattgtttagagagccccaaaagtggctcagatgtaaagccagggttaagaaccatctgccttggaagatttaagggaaacatataaacttgtacaaaggac

SEQ ID NO: 5349 - DNA, 2316 bp, Homo sapiens
ctttgtggcttcgtgtccaaccctcttgcccttcgcctgtgtgcctggagccagtcccaccacgctcgcgtttcctcctgtagtgctcacaggtcccagcaccgatggcattccctttgccctgagtctgcagcgggtcccttttgtgcttccttcccctcaggtagcctctctccccctgggccactcccgggggtgagggggttaccccttcccagtgttttttattcctgtggggctcaccccaaagtattaaaagtagctttgtaattccttgagcgcctggtttgactggggacttggggggatggggttggaagaatgactgccctttcccaccaaaaaagggagaactctttagattcagattgtgggtatgtagacttaataagtgaaacatcacagaagaagcctttattatacaatgacaaccaaacaagtactccggatatgcagtagaggaatcctctaagaaccatagagacttcttttctgtgatttttgttccccacccttgaacaccatctctaggatggagttggcctaagagtgaatgctgcaagatctgtgtttatgcctcttttcctcattcttcctcagtttgttcgtctgcttgaaagttggccaaaaaatcctgctgctcaccgacttcccgtggtcagctgctgtcaagcgttcactttctcttctgtcattcctcatggaatgagggtggttttgtcttcccgcttcccttgacctcaaaatcaggattaaaacctggggtagcctctgtgctcctttcttctatgccctggtttgttctgtggttctgggcttcttatatccgtgtgcccagggctgaactccttattttcctttctccaagggcagagccgagtcttcagtccctgttggtctttccccacccccacttccagcccaagagccaggaaagggctggtgccacactgtctgctgggatcagcggtggttctttgagctgctgatttgggtgttaggctcttgagctgggatgcagatgtaacagtagctccagtgagtcagacactctgcccagcacattagactgtgtttgaccacttcttccagttcatagtattgacttcagcccaaacggagataactccctgtgtgtccttgaggtattgagctgggctggacagctccccttgagccaactctaggagtacaatgtcaggggaaccccagtttgtgaaaaggacttagactggaggatatttgttatctggggatatgatgcggtggcggcggcgcctcaagataaggggctggggtttctgggtggggggccaacagagtggtgccagtaacagccccagatagaggagtacgcaggcccagcatgaggcaaccttgacccagaaggtggcccagctacccttgatgaaggtcttttccagttctgctccctcatagctgtgtaaccaaaggctctggttagagaatatgaagggccttagcttttagacctgttctacctcctcaccaaatataatggcagacccatgtgtgtctggaatggccttgaattgctctttccttaaaatagctagctcttcaggagagtatctaaggcccactccatcttacctgaaccagttggtaagggtaaccatgacatagagtgaggcaaggaagaagacgaagtggaaggcagaatagttgtaggaaagatgctggacttggactggaggagctggaggggtttcttggtcagctggcctcgcagccccacccctttgccctggagagaggaaatggctgctgggagcagagctgctgaaacacctcttcccctctcccccaactacctttgttaaggctcttgagggttcttatggcactccacagagatctaccacttcttatggttcctcacttggcactcacctttgtctgcctccactgtttcagggcagcagaaacacagtgagggcttctgcaaaacagaacgcaggttttggaatggtcttaaaagatgtgagggtgttaatctaggaaacttcccccgtgaaaagattggtctagtattaaaaagtggaggcacacctgggttcaaattctagctccagcatataagtggctgtgcagactttggtaagatgtttaatcttttgtgcctcgatttctccatttgtaaaatggagcaaatacctacctcacagggttgttgtgagggttaaattaaatgagattatgtaaaagtatctagcacagttgcctagcacattgtgggtactcaataaaaggtaacagcagctataatctgagcattctgggtagaggttggta

SEQ ID NO: 5350 - DNA, 763 bp, Homo sapiens
tgcgtgctttctcaaatatacctactggattaatttatggcaataaaatttttttttgtctttttcagttttatcatcttgggtcaagtagagtgtatactatatcctatgttgtggagaatttatatgttggagactaactgaatttaagtgacccattaaaatctagcacacctgtatgaaaaatcagtgtagaagaatacctcatgtgcagatgctaggtggcaggccagtctcattcatctgactagctctcaacagtattcaaggtacatctggagtctcagcagagttactgtactcaaatggcatgtgtctccaagacagcttatgaatatctaaaaggccagctacctgcctaggagccactatatatatagatagatgtaggttatgaacccagttcataggccaccttgagttagaattttggtacctacaacatgcttgattttgagtgattaaaaaaaaataatttggctgggtgctgtggctcacacctctaatcccagcactttgggaggtcgaggcaggtagatcacgaggtcaggaattcaagaccagcctggccaacatgtgaaaccccgtctccactgaaaatagaaaaattagctgggcatggtggtgggcgcctataatcccagctattctggaggctgaggcaggaatcgcttgaaattggaaagcagaggttgcagtgagctgagatcacactactgtactactgtactccagcctgggggaaagagtgaaactccatctc

SEQ ID NO: 5351 - DNA, 620 bp, Homo sapiens
gtttttggtttaggaacatcaatttgttcaaattgaccactgtctaaggagcctagtaatcggcgtgccttagtgtgtttatgtggtaatgtgttacatttagcaattataacattgttttattaataagactataagaagagtgtacttttagtaagggagaagtcttggagggttgcttctgcaggacggggagggaatttgaggggaggctgaggtgccgtcaggactttttttttttttttttttttgagatggagttttgctcttgttgcccaggctggagtgcaatagcgcgatcttggctcaccgcaacctccgcctcccaggttcaagcgattctcctgcctcagactcctaagtagctgggattacaggcacctgccaccacgcctggctatttttttgtatttttagtagagatggggtttcatcatgttggccaggctggtctcgagctcctgacctcaggtgatctgcccgcctcggcctccaaaagtgctggaattacaggcgtgagccaccatgcctggccatcagaacttgtaatcaagacagtatgttgagaaattctaacattataaattacaaagctttgactattaaagtttttgtgatct

SEQ ID NO: 5352 - DNA, 2351 bp, Homo sapiens
gtcctaaaggaatgcttcagaaaacctaaagtgctgtaaaatgaaatcattctactttgtcctttctgacttttgttgtaaagacgaattgtatcagttgtaaagatacattgagatagaattaaggaaaaactttaatgaaggaatgtacccatgtacatatgtgaactttttcatattgtattatcaaggtatagacttttttggttatgatacagttaagccaaaaacagctaatctttgcatctaaagcaaactaatgtatatttcacattttattgagccgacttatttccacaaatagataaacaggacaaaatagttgtacaggttatatgtggcatagcataaccacagtaagaacagaacagatattcagcagaaaactttttatactctaattctttttttttttttttttgagacagagttttagtcttgtttcccaggctggagtgcaatggcacaatcttggctcactgcaacctccgcctcctgggttcaggcaattttcctgcctcagcctcccaagtagctgggattacaggcacccaccaccatgcccagctaatttttgtatttttaatagagagctaataattgtatatttaataaagacgggtttcaccatgttggccaggctggtcttgaactcctgacctcaggtgatcctcctgcattggcctcccaaagtgctggaattccaggcatgagccactgcgcccagtctacacactaattcttgttagcccaacagctgttctgttctatctacccctcatttcacgctcaaggagtcatacctagaatagttacacacaagagggaaactggaagccaaacactgtacagtattgtgtagaaagtcacctccctactccttttattttacatgagtgctgatgtgttttggcagatgagctttcagctgaggcctgatggaaattgagataacctgcaaagacataacagtatttatgagttatatcttagttcttgaaattgtggaatgcatgattgacaatatatttttaatttttattttttcaagtaataccagtactgtttaactatagccagaactggctaaaatttttatattttcagagttgaagttggtgaagacattcatgatttaaacaccagatcctgaaaggggttaaatctactttgaaatgaatctgcaatcagtatttcaaagcttttctggtaattttagtgatcttatttgattagactttttcagaagtactaaataaggaattttaacaggtttttattaatgcacagataaatagaagtacagtgaggtctatagccattttattaaaatagcttaaaagtttgtaaaaaaatgaatctttgtaattacttaatatgttagttaagaacccgtcaagcttatatttgctagacttacaaattattttaaatgcatttatcttttttgacactattcagtggaatgtgtaagctagctaattcttgttttctgatttaaagcacttttaaatcttatcctgccccctaaaaacaaaaggttttgatcacaaggggaaatttaagattgttaaccctgtttttcagaagggctactgttaattgcacataaacatgaaatgtgttttcccctgtgtactaacacattctaggcaaaattcaaacttatagtggtaaagaaacaggttgttcacttgctgaggtgcaaaaattcttaagacttctgtttgaaattgctcaatgactaggaaaagatgtagtagtttactaaaattgtttttctaccatatcaaattaaacaattcatgcctttatagggtcaggcctacaatgaataggtatggtggtttcacagaattttaaaatagagttaaagggaagtgatgtacatttcgggggcattagggtagggagatgaatcaaaaaatacccctagtaatgctttatattttaatactgcaaaagctttacaaatggaaaccatgcaattacctgccttagttcttttgtcataaaaacaatcacttggttggttgtattgtagctattacttatacagcaacatttcttcaattagcagtctagacattttataaacagaaatcttggaccaattgataatatttctgactgtattaatattttagtgctataaaatactatgtgaatctcttaaaaatctgacattttacagtctgtattagacatactgtttttataatgttttacttctgccttaagatttaggttttttaaatgtatttttgccctgaattaagtgttaatttgatggaaactctgcttttaaaatcatcatttactgggttctaataaattaaaaattaaacttg

SEQ ID NO: 5353 - DNA, 3055 bp, Homo sapiens
gtacaaagacttgtcaaatcactgaagggggagagaatgcaggacccttttggactaagacaaaaacattgccattactgttgaaattttgcatttttgtaccccgtcttgcttttcttatctttggtgcccaataataattaagggttacagaaagagactttatctatctcagatcgaatacatatagtaggtaggctaaaacagaagagtctttagaactagtgcaactccagtgaaattttttatgtacaggacatctgcagtttataaagaattctgtttctgccaccagcagtttgacctgtagtcacacaggattttatgataataacagagatgaaaatggacttttattttctctctgtttggtgctctaagtgggtttgtagccacttttctgttactttatgattctcatttcaacaggaatggccagtaaaagttgttttatttttcctgttaaggtttataacctttttacatttttgacctgtattagattagaatttcattatgcattccttttagttgaggcgcttcatagttttctggagatagtcaatttttagttttttattatacatttgaatggccgttttcctgctttgtctgcctgcacattgtatatttgtttaaaaatattctctacttttagtctatgtaagtttcatttagaaagacatgcatttatattttgtttctgtaatattctactgtaggtgaaatcttttcaaaaatcaagagactgggtagataagaatatatgaatgactaatatacaaaagatttaaaccattgtgatggcgtatattctcaaatggtaatatcttgcaatggcacacagatttaatggataaaggtatacctcagacttcactgtgctcacaaatctttgaggagaaagtttggtcacctgtttggcttgatttagttactgctgcctttggttttctccaggaatgaagtattcagcacagtgactcagtatttttagttattttgcatgggctggtagtacctctgttatgctctcagttacaatcaatttaaaactgtataacagtcttggtacctaacagtagctatgcataatcctgtggcacagtacactcccaagccaccaatgcagttaatatgctctcatagtggtttttctatgctatatgaaaatagtcttcaagccttggttctctaatgcagctaccacaagaggttgatatttttatagtggcgtgtaatctccttttcgggaggctttttatggaaggtagaatttgtaaaagttcgtatgctttgcctctcaactgcattaacatgccacaggctcagactgtttttgtgtaaaggatgtcaaagaacggcactttttctaaagagaagtttgatattttgtatgcttgttaagaaagtacagtattggaaattaaaggtggacaactgataattgaggagtatgtcaattaattttttatgtatattacctgtttacttgtacaacttactgtacaaattacatgcagcttcattttcaaatgaatccttaaaataaggaaatctttttaggaaaacatttaatttttgtatttttgattttaaaggcatgagttatgtcaattttcagtgtattaatgaagattttaacttttcatcaggttgagtgttttcttactatattatctgttgtgtatgtagttagcatattgtgtcactgaactgtttaaaaatctagcatgtagagcaagcctgttttgtggaaaatccttattcattaaaaaaataatcatggcagattttctgcaaaaaaaaaacaaaagcatttgcaattcagaatactgatttttttaattttatttaaagaaaggtattttgcttgcaggaaaaaaatactacagattcattttaatgagaatctttgaaatgtatttatctttagggcatctgggcatctttatgctgtttgtcttctgtctttcttgaaataaaatgtacatacgttacctttacatatgctcttgctcaaaattgtgaacctagttacatttctccctgctcccttcctttttatgctcaaacagcgaaacccaaaacttaaaagatctgaactttcagcatgcattctgattgctgaaagatttcctgatttagtgcattctcaaaagggctttcccataatctaaagggaaatgtaagcacctatactcttgtgcctgtgggcacttcaataataaaaaccaactttttaaactaatcatcttttatcaatgataaagttgttttcagtcccacactaggagagttcctttaagtcagctgatcaagcataagatacttccgtaaagaaataaactaagaaaattttttatggcttgagaaaattccttgaggccaaattaatatatttttctttgttattttatttgagtcattttaaatttgttaatacaaaatttaagataatttacagagacaatttatccagcttccttctaccttaatacaatgttttgtcttcccattatcctctcttttctttatctgttggtagatgtaaaaaacttccatttagttaatcggaggtgtgtattttttaaattgaaatgtgcccagccccttcagctcacacaggaaacatgaactcttaaaaaactgactagtaaatgcaggagaggtggatacctgatgagacacagcgaaagtgacctgtatacacattacaactctggagtacatattaaagtcgtgctatttccagtggtaaatgtctgacttttaagacattcttttaaatatttgtatcattgttaggatgttttaatcagttgttttttaattccatgtaatatatgtagccctcatcagatttatatcaccatatttctccttgtgtcctaagagaattgatgacaattcgtaaccataaattgttttatattagctagtatgtatatttatttttacccaatggctttatctgtttcccaaaatttgtttgggatttgttgaaagcattgtgtaacttctataaacggctattttcttgtaactgtcagtg

SEQ ID NO: 5354 - DNA, 1652 bp, Homo sapiens
cattttatcttttcttggtgtcatctttatgttgcccacaatcccttgaacatgtagcacaacttcctttcctttcagttctgccaaatgctacaatcagaagtgcagtatcttttgtgctggttatttaaccccttgacacttaggtgctaatgtgcaaatgagggaacttggatcttgctgccaaggggttaaaattgggaacctaagttgctactaaatcatagttcaaaacctaataatgttgtcgttgttgctatctgatttcatagcagcagtcactaaattggaaacaaaaggttgcaacgtgacaaaaaaaattgtgtagtatttaccagcaccattcagtaatacagccttaaccatacctccttgaactacttcataacttgtcaagaaaagcagtttgcagcaagggcatgtggtgtgcacctagtattaaaattgctttgtcttaaaattgaacatgaggatattaaaaatacattgtgaagaagactgcttatctcagagtgaagatactgcggctgaaaagcactagtttgatataaaattaaaatgaccaaaaccctccaactttgaagctaaagaaggtaaacctttccattattgcattacatgttgtggaatctctcgagtgcaaagactgtctagttatttatcaggctatttctactgatgaactgcttcaggtgggggagggaaacttatttttatttgcctgatttaagtgtctgagaaacaaatctttgttctcttaggctgcaatggaacaactttaccagggttttggcatttcctttcctttcctttataaaacatgctcagcaaactgcaccagttaactacagtttggtaaattgttatgttaacaattatgacatctgcaatgttttataaagcaactaatttaataaaatcactgttgtgaggacttaaattttgtgttacctcccaagagatactttttgagagtatagaacacagctcttgggagtacagttctctacgttctctactaaatcttaataaatgcttgacatagttacagctttaaaacatgagtgatttgccaggtccttatgttgtcaccatagagcaacaaaggtatagggctgccttcctcttatttatttggggacattattttgttatttagataccaaggcctaattaattaagtacctataagaactatttatttggagtaactgagcctgtaactcaggtttatggctgttaagtatagattggggaatctttattatgtcttctcctaagcagtttaaccaaatgtgtggttagtgtttttttattcccctaagacagaaagaacaaaaaatgttttaaatttctcttatataggaaataataggaacgtcaaagctctgtatacctactaagtggaaaacaagaccatcatctaagtgatttgagaaattaacaaaagtagtgactacacagcaataattacagtaaattaaataaagattcctttaaggcagacaagggctaagatttccttagcagtaataatgacatacactgaattgaaaatctattttattacagaaagatcagtttctaacaaatgaaaatgtatcacctgttccttaactgtgtaaataataattaaatttctttgaaactgg

SEQ ID NO: 5355 - DNA, 552 bp, Homo sapiens
gtttgaagatgccgcatttggattggatgaattccaaattctgcttgcttgctttttaatattgatatgcttatacacttacactttatgcacaaaatgtagggttataataatgttaacatggacatgatcttctttataattctactttgagtgctgtctccatgtttgatgtatctgagcaggttgctccacaggtagctctaggagggctggcaacttagaggtggggagcagagaattctcttatccaacatcaacatcttggtcagatttgaactcttcaatctcttgcactcaaagcttgttaagatagttaagcgtgcataagttaacttccaatttacatactctgcttagaatttgggggaaaatttagaaatataattgacaggattattggaaatttgttataatgaatgaaacattttgtcatataagattcatatttacttcttatacatttgataaagtaaggcatggttgtggttaatctggtttatttttgttccacaagttaaataaatcataaaacttgatgtgttatctctt

SEQ ID NO: 5356 - DNA, 55 bp, Homo sapiens
tgagtcataatattatacaaattcagagtgttattaaagaggtattgaaatattt

SEQ ID NO: 5357 - DNA, 593 bp, Homo sapiens
taaattaaattgtaaataccttggcatttattttctataaaatattatacagatgtgcatatcataaaatgctcccttttggtactgggggatagtgaaatgggaaataatttttctgtttctcaaagtatatctttaggaaatacagaatcattttggttctgtgttttgacatttttcccctagcttttaacaacatgttcaaatattctcaatgcacagttgttaatgagtaattgccgttaaaatatatttcataagaagtctcaatctcaaactctccatctctcaatcctcctcctcctcctctttcttgctttctcttttccctctctctttctctcctccccttctctctttctgtctttcaaatgttcttttggctttaacattctattaattatattttttctagattgaatactgtgaatgctaagttttattaatctggtcatcttattttgattttaaaaattaggatgctagttgcattctgaattactgtttctggtttgaaacatggagaaaaacattttaataattcatatttcatgttggatggtttctaataataaatatctcaaaagtgactt

SEQ ID NO: 5358 - DNA, 1310 bp, Homo sapiens
tgttaatgggctctgccctcatccccacagtcttgggatctcagggcacaatggctggacatgggtgggctctgatgcagaactttctcttttgaatgttaagaataactaatacaattcattgtgaacagaagtccttaagcagaggaattggtgtgccttaaagatacaatctgggatagtttgggggaacttgtagccagaatgccctgttcatgctgagcaaagttcagcaagtagagcagagtttggcaggcaggtgccaggaactccccttcttcctggagtgccttcattgaggaaggaaatctggcccttgggtttcctggttccactgctactgacccagaggggaatgagggctgagttatgaaaagataacttcatgaagacttaactggcccagaagctgattttcatgaaaatctgccactcagggtctgggatgaaggcttgtcagcacttccagtttagaacgcaatgtttctagagacatattggctgtttgttttgatgataaaaggagaataagaaaaggcatcactttcctggatccaggataatttttaaaccaatcaaatgaaaaaaacaaacaaacaaaaaaggaaatgtcatgtgaggttaaaccagtttgcattcccctaatgtggaaaaagtaagaggactactcagcactgtttgaagattgcctcttctacagcttctgagaattgtgttatttcacttgccaagtgaaggaccccctccccaacatgccccagcccacccctaagcatggtcccttgtcaccaggcaaccaggaaactgctacttgtggacctcaccagagaccaggagggtttggttagctcacaggacttcccccaccccagaagattagcatcccatactagactcatactcaactcaactaggctcatactcaattgatggttattagacaattccatttctttctggttattataaacagaaaatctttcctcttctcattaccagtaaaggctcttggtatctttctgttggaatgatttctatgaacttgtcttattttaatggtgggttttttttctggtaagatttagacctaaatcgcatcatgccaacttgtgactttgagactattcatcaagaatgaggatatagtagccatgacatagcttgagctatagcctttaattccttactttggctatgggtggagggtgagtttgaagaggttctgattttcttgtaacctgggaaagccatgaccttgtgcccgattctttcagattgctttgggtaataaatattggtggtggtatctg

SEQ ID NO: 5359 - DNA, 192 bp, Homo sapiens
gggggacccaatctggactccttccccgccttgggacatcgcaggccgggaagcagtgcccgccaggcctgggccaggagagctccaggaagggcactgagcgctgctggcgcgaggcctcggacatccgcaggcaccagggaaagtctcctggggcgatctgtaaataaacctttttttcttttgtttttt

SEQ ID NO: 5360 - DNA, 675 bp, Homo sapiens
gcccctgcccgggggttctgcccactgcccagttgagcagaggtttgagcccacacctcacctctgttcttcctatttctggctgcctcagccttctctgatttcccacctcccaaccttgttccaggtggccatagtcagtcaccatgtgtgggctcagggacccccaggaccaggatgtgtctcagcctggagaaatggtgggggggcagtgtctagggactagagtgagaagtaggggagctactgatttggggcaaagtgaaacctctgcttccagacttcagaaacaaatctcagaagacaagctgacctgacaagtactatgtgtgtgcatgtctgtatgtgtgttggggcggtgagtgtaaggatgcagtgggagcatggatgctggcatcttagaaccctccctactcccatacctcctcctcttctgggctccccactgtcagacgggctggcaaatgccttgcaggaggtagaggctggacccatggcaagccatttacagaaacccactcggcaccccagtctaacaccacaactaatttcacccaaggttttaagcacgttctttcatcagaccctggcccaatacctatgtatgcaatgctcctcagccctcttctccctgctccagtagtctcccttccaaataaatcacttttctgcctt

SEQ ID NO: 5361 - DNA, 422 bp, Homo sapiens
ggctgcttgatctatttctataacagttttgatcttaaaagctttgtgattgcaaaggtgtttatgtactcagggtgcccacaactcactcaccaagatgtttaacagtaagtaacagtaaatgtaaaagattcattttgggccgggctcagtggctcatgcctgtaatcccagcactttgggaggccgaggcgggcggatcacaaggtcaggagatcgagaccatcctggctaacacagtgaaaccccgtctctactaaaaatacaaaaaattagccgggagtggtgtcgggcgactgtagtcccagctactcgcgaggctgaggcaggagaatggcgtgaatccgggaggcggagcttgcagcgagccaagatcgcgccactgcactccagcctgggtgacagagcgagactctgtctca

SEQ ID NO: 5362 - DNA, 203 bp, Homo sapiens
aaatcaccttaaactcttgttcagttcacattaattgaaatgtgaacttgcctgtcgtttgcaacttcacacttttagaatttgtgtttatatttcctgtaagtgaataaataaaacaaaacaaaacaaaaaaaacttgtgcctgataagctaaggctcatttatttttaaaaggcatattaaataaaatactgtaatttagg

SEQ ID NO: 5363 - DNA, 431 bp, Homo sapiens
cgagccctcgcctctttcttctgaagagtactctataaatctagtggaaacatttctgcacaaactagattctggacaccagtgtgcggaaatgcttctgctacatttttagggtttgtctacattttttgggctctggataaggaattaaaggagtgcagcaataactgcactgtctaaaagtttgtgcttattttcttgtaaatttgaatattgcatattgaaatttttgtttatgatctatgaatgtttttcttaaaatttacaaagctttgtaaattagattttctttaataaaatgccatttgtgcaagatttctcaaagattaggtatatatttaaatggaagagaaaatatttttatgggagaaaaatacatttgaaccatgaaatttcatcttttaaataacatccagtacagatttctgtgt

SEQ ID NO: 5364 - DNA, 759 bp, Homo sapiens
ctgtacagtttgaaatactattttttaatcaagttttataaaaatgcagattttgtttagcttttttttttttttttaagctatgttagtacacagaatacttcattgttgttttggggagaagggccatatgtcactaatagaaagcccctgaagctggactgatgtggggaaaacaccttttccttctggttttgagagacttcctcttgggtcccaggaagagggattccctgactttgatacacatggccaccttggtataaaagccttgtggtatggaaaaacaaattcgttttttatgtcctcttctctgtttctacctttcagaatggacttaaatcccttaaacccagacatcttctgggacctgacccccaataattggttaccagtgtgtcaggcaatctggactttgccctcaaaagagcagtggttcctgtttctaggttgtggatcttcagataaattctgtcattttcctttcacttcctgaaagccagggtcggttcatgaaaagctatgaaacagcatgctaaatgtgaaatgtcaaccctcactaaactttgccggttcagagcatcagatgaagacttcattgggttttacagtggctttctgatttttggtagtccattgaagaagggagtttgaaagttgttgtatactgttaacgattgtctgcccatgtcctgcccaaaataccatgattctttatggaaattatctttaataaagctggatacagtttggcttggg

SEQ ID NO: 5365 - DNA, 3196 bp, Homo sapiens
aaagttgtgtttgtgtgttttcttctcctgtcccatatttgggttatgatgactcaagtgtagactgaagttgaggtagtgccttatgccattatgtcatatgttgaaatccttattccggtattactgtgtctccatgccttttttccaagtagcagacgtcatgttgcatggtttttgatatttatatgtaagtttttcaaattttgcttaattttaaaatttattattttgatcttgaattatttataaactggaaagtggtttgattattgtgagtcaaaactctaagtggttaaaaattagtatgaattttttagcttcttaatgaatatggatttaaaactctccagttcttattttatgaaatgacttgcctttctggtaatacaatgctgattttttagtaattgccttttcattactttgttaagaagaaatgccagctgtttaatcacacctacccctggaaaagaggtaaaccttttgaacagttgaatttcatcagaagctctatagctttttggtgagaggaagtgatactctttattacaagaaacaaggaattaacaaaaataaggaacttgttgctacctttcttttctgttgaacattaaaaataatttggtttgtggactgggcatggtggcttatggaaaagaggtgagcctttgtgaagaacataatggaaaagtgcatgtacgggaaataacagcactttaggtgtagttcaggtgagcaagatgccagatagtttctactaaccatatactctttctgcttcttagcgtcgttgtcactgcttctgtggcttttgggttcaaagtagattatatatattcctaaagcttggtggaggtagtggagctatcacacactcaaatgagcttgtatatttataatacaatatagtattatagtaacagttatcatacactgagatatagtttctgtgcttgtaaaaaattcttgaagtgaggccgggtgcggtggctcatgcctgtaatcccaacgctttgggacgccgaggcgggtggatcatgaggtcaaaagattgagaccatcctggccaacatggtgaaaccccgtctctactagaaatacaaaaattagctgggtgtgggggcgtgcgcctgtagtcccagctacttgggaggctgaggcaggagaattgcttgaacccaggaggcagaggttgcagtaagccaagatcgtgccactgcactccagccttggtgacagagcaagactccgtctccaaaaaaaagaaaaaaaaatttcttgaagtggaatgatgtacaccaaatacccactttatagataattacagggatggtgaaaaattagtaaatagcttcacaaaagaggcagcgtgatacctttagtgttttctagaatttttttctggatattatatgtaagaatttattgtttgagggaaatacgaggtttcattgtttaaaatcaagagtgtattgtttactgttttacagtattatttaatatccaactggtctccaatctccattacatagggactgtacagagcctgtgaagatgtatgaatggtatcttttataatccacaatacatttctggtaagatggaatcactacctctgatcacatatcaggctaacgatagagaaagcattaggtttaagttgagggctaagaactggtttgtttaaaggtttaaattgttggaaaagagcatttgccttctttaatgaatgatggtctcacaattcagttgactttgacctaatatttaagaatataaatatattttatttgaaaggctgagtgttgccctcaaacacttgctaaaactgcctagggcaggattcattagggcttgcagacaatgtcacctaaattgctgaatgtactcattataatatgatatctgacaaaggtagtacagcgtttctgagtcatttgggaccaactgcagtggttgtttaaaatgctggttcctgcacacaattctctatctactgaagcacatctgttttctttgtttgttttgctttgctttttgtttttaaagtttcccccagtgattccagtgcacctgaaaagttgagaaccacaggcttagtggtacgttggggtttcccacgctaggctgcatagcattataacctgggaacgttaaaaaaaatacagacattcttgattcttagtgtagttatgatgtggatcctacgtattttttaaaaaactctccagataattttgatgtcacgagtcactagtatagactatctatctagtgagttgtattataagcgatgaaatactttaaaagctacccagtaactcttgggattaattttatgaaataaattctgagctgctgcttttgatatagtcagacttaagactgaaccccagtagacaggcaatagatatagaattctggttagctaattgaacttttgtgacctgtttaaaaacaaatcaaatttattgaacaaatgacaaggcacaaatactttcagaattgtatttcagttttgaagatttaaaaaaaatgtgaaaataaatatatattagtatcctttattttaaagtcaattgtaaaccagaagtactgttattttggtgattaaaatccaaaactttagctgtatttcagtaacaaaaacataccttactagactgtgatggctcacacctgtaatcccagtgctttgggaggctgaggtgggaagattctttgagcccaggagttcaaggctgcagtgaattctgatcgcaccactgaactccagcccgtatgacagagtgagaccctgtttctaaaaacaaaacaaacaaacaaacaaacaacgtatcttactgactaaactggaatggaaatcttataattagtgttgtatttttctgcaaaatagtgaattggtacttgggagacttctgttctttgttgaaaaaaattgcctttgttttgaaattatatcacctgtgttctgaactaaaatgatgggagttcattttgtatttactttgcagtaagtatcatgtaaatatgcaaatgttgaatgtaatatagattgtgtcctcattgagtttttgggtgatacagtttataaatataacaattatacaccctcatacattcgtctgattttgagcttgtaagatgagaactgctttttacacatttaataaaaaaaggtctctgaatt

SEQ ID NO: 5366 - DNA, 250 bp, Homo sapiens
ggatggctcagcacttgctcatcttggatggcttctgggccaaaactgcagtcactgaatgaccaagagcagcacgaaggacttggaacctatccttgtaaagagttccttgatgggtaatggtgaccaaatgcctcccttttcagtacctttgaacagcaaccatgtgggctactcatgatgggcttgattctttgggaataataaaatgaaataatacttttattttctgaataaaagtttgtcactg

SEQ ID NO: 5367 - DNA, 3675 bp, Homo sapiens
atgtcctcatcacctgtgtctttgctgcttttgttttgggggcattcattgcaggtgtggcagtatactgctatcgagacatgtttgttcggaaaaacagaaagatccataaagatgcagagtccgcccagtcatgcacagactccagtggaagttttgccaaactgaatggtctctttgacagccctgtcaaggaataccaacagaatattgattctcctaaactgtatagtaacctgctaaccagtcggaaagagctaccacccaatggagatactaaatccatggtaatggaccatcgagggcaacctccagagttggctgctcttcctactcctgagtctacacccgtgcttcaccagaagaccctgcaggccatgaagagccactcagaaaaggcccatggccatggagcttcaaggaaagaaacccctcagttttttccgtctagtccgccacctcattccccattaagtcatgggcatatccccagtgccattgttcttccaaatgctacccatgactacaacacgtctttctcaaactccaatgctcacaaagctgaaaagaagcttcaaaacattgatcaccctctcacaaagtcatccagtaagagagatcaccggcgttctgttgattccagaaataccctcaatgatctcctgaagcatctgaatgacccaaatagtaaccccaaagccatcatgggagacatccagatggcacaccagaacttaatgctggatcccatgggatcgatgtctgaggtcccacctaaagtccctaaccgggaggcatcgctatactcccctccttcaactctccccagaaatagcccaaccaagcgagtggatgtccccaccactcctggagtcccaatgacttctctggaaagacaaagaggttatcacaaaaattcctcccagaggcactctatatctgctatgcctaaaaacttaaactcaccaaatggtgttttgttatccagacagcctagtatgaaccgtggaggatatatgcccacccccactggggcgaaggtggactatattcagggaacaccagtgagtgttcatctgcagccttccctctccagacagagcagctacaccagtaatggcactcttcctaggacgggactaaagaggacgccgtccttaaaacctgacgtgccaccaaagccttcctttgttcctcaaaccccatctgtcagaccactgaacaaatacacatactaggcctcaagtgtgctattcccatgtggctttatcctgtccgtgttgttgagaggatgatgttgtaagggtaccttaaaacaagagactcgcttgtattttaagagaaccaagtggccaaagaaactctttctaactttggcaacatcagaacttgccacatgtagctactgcagcaaggcttctgtgtacttgcctgaaaacaaaggaaggtgctggtcattccatttcttttgtttgaagctaaagagatgtgtagctcacaggggctaccttaccagtataaagagctgataacagtactcagaagaatctgtgaacaaatacttgaaaatgggttcaatgtagactgccattatgtgtggtcttcccattaaatgtgaacattttaatatgtatgcattcaccttgcctcttgcacaaatgtcaaaaaaaagatggtaatatctcaaagaaatgaacttgtagattaccaagcagtttgctaaaaattcaatctttgacccaagctgtagcatttttttttcatgtgtggcatctttttcatgccaccaacaaacttgttgtgtgtgtgcgtgtgtgtgtgtgtgtgtgtgtgtgtgtgtgtgttctgtacccactaggatttgtttaggtgcccattgcatctttttgtgctatggagttgtttacattaagcatgaccgaacgagagacaatactatttcccacaggagtccattgggttcagctttgaaagaggaatagaatcgaggctcctttgaccatcaaaatgatgaactttacttatgtggtacccaatgccagaatgtaagagttgcaagtgattttgtgctgctattcattaaaacttgtattccagtcttgccagcttaaggagatcaagatattaagaggtatccttgatttattttccagtattcagtagtaaaattttcctgtccactgtgaatcaaagcctgagtcactctatttaaccttggacacactaataaggttttattttgattgtgttcgtttccccccccccaatagtaaaatttctcctcctttaactcctcctaccccccaaggtaagaaacaaaaaacaaacaaacaaacaaaaatagaagacaaaagaaagacatatgaaaggaattgtaattggcttaacagaaacagtctgtaaaaacctaacagtggtgcaatcatgttgtctgtgttgtgttatgtgagaattttctcctaagtcatgcaggtaatgacaatatactgtaaataccacatgtgagtttacctgaatctgtgcattttgtgccttattcatgagaatgatagaagtactaaaatctgtcaagtgttttcagtatagcacattatttactgagtgccagttgtaaatgtttttcaaccagcacctaaaaagactcttttcaaaaaatcacagaaacaacctaggacaattatttgttacataatccgacctcatagcagcattacattctttgccgtgataaacattccactcctgctttcctaaggatgaaacagtgataatgtgaactcaaatgaggtttcctgggtaatgtgacacctgcagaaactatagagcgtcatttatacgtagtttggcagaaaccacttacggctgatgatgcgcaaccctgctgactgtttcagttaatatgctgcacaccacacacttgtttagtgaaccaaatctagaaagtaccaaggcagaggtatgctcctgctgtaatcaggcaaatgagttcaactggatttcttttgacaatactgttggtacctattacttgggggaggacatgttgcagaagaccagatcatttttatacagaatgtgaaatactgatacagttattcttttttttaaagaacattgttttataaagaacgtgatttccagtgatctctggaagcgctaaagctaaaatttctgttcttgaaacacttcagctttgcaactaaaatattacagattaataataaattaaaccaaccaatgataaacactactcagtccaccaacaacaaacgtgtttgaattcaccttaccaatattaatcccagcgtgtgtaaaacagaacagtaactctatgtgaccccagataacattttgtaacattgtgcttccttgtagtttgtaatgtgagttcaatcagtatttatgttgaaatttctaacattaaatctagtctctatcctgttaatttaatttttaaatgctttatccatttgtgcaaaggtaaacgcagattgtatcttttttaatggtacggcataaaaagtaaccctcaagtgaagtgtctctatactgttttatagagtactttaacatgaatagataccttgtaaacttgtattgtggatgtgtaaataatatgtactttgggtttttaacaccgcatgtaaagtcaaaataaaatatacaaatcattat

SEQ ID NO: 5368 - DNA, 420 bp, Homo sapiens
gtatatgttacgagaacgcccttcagcactgctcaaaaattttcggcatgtatttcatctagtcatgtccttttggtcctctaaattagcagtggtttggcataatagtgttttgtgttttttttctcattgaaataaatcttgggtttgtttttttcccgagcctgctagggcgaggggggtgaatggttgatgagtttaaaaataatgcagcccttgtttttcacctgtagaatatgagaacattttaacagcacctctcttatcttgcagatatattccaagatgctacatgcagcagacagctgtgagcttgcatacacacacacacaaatatacatgcacatacatacacagaatgcagtactagttaagtatttccttcctatctttaataagtaagagaatatttagaccatt

SEQ ID NO: 5369 - DNA, 40 bp, Homo sapiens
tattattaatagtgttatgcagaaaatatgaatggcaggg

SEQ ID NO: 5370 - DNA, 1194 bp, Homo sapiens
aacatgaaagattggaatacattttaacttaatgtaatgcataattaagaaacatgttccagtactttatgttgtaaatctgatctatggatatgcaaacctctggagaggatcctaccagattctacatacattgcataatttttatcagttaatgcgagcttttttttctcttctcagcttaaggggttgtcaaagccaatgttatccctagaaaaacatttttgtcactgctgttgataaacaagaaaatcaaggaaactcatgttggcttatgctcatgaaaaccaccaatgtgattgtaaacttctccagacaaacttaaccttttgtttcttaattttttgttttgagtgtttgcttctcagccctggtataggtctcagccccacagcaggatctcaataaatgcttattgacaggctggcatagtaaccacaggtggttatcaaaggaaaagaccaataggctggggaacataattatgcttggccccctcagaggcttatacctccaaagcagatttaaaaatcagtaactcaaaactttaagaagtagttgagtctacaaaatattcaaagcagttacctaaataaggttatttaatgtaacagattatatacttaaagtgatctgagcaatcattgataacatatggcttaaatttgctgctgcctgaaaagtatattaactagattagaagacaccatatactccaataaaatgaaatatattctattctcaatatataaactttaattgtactccctatcaaatattttgaaatttccatcacggcattactttgcatatttttttctaattaaatggttagtacagatgaaatctttatagatgactacttgaaaactaagtgctacaaattttcaaaccattattaagaaatatatcctgaatcatatatttagttactttctatagtgattgtatggatttaaaagaataattaaaatgtgaagttgaaaaacttgtaaaatttggaatatacagatactgatttttttcatttttgttagtatacctataatacataatcacattgacaaaccaatgaaaatattgattttctgatgaatggcttgatttttctccttgacatgttttgactgttcattctaactgaaaacatatatgggaaaatatgaacctgaaataaaagcactcaaattcaat

SEQ ID NO: 5371 - DNA, 1293 bp, Homo sapiens
aatttatgccaagaacagaaaacaagaagtcatacctttttcttaaaaaaaaaaaaaaagtttttgcttcaagtgttttggtgttttgcacttctgtaaacttactagctttaccttctaaaagtactgcattttttacttttttttatgatcaaggaaaagatcattaaaaaaaaacacaaagaagtttttctttgtgtttggatcaaaaagaaactttgtttttccgcaattgaaggttgtatgtaaatctgctttgtggtgacctgatgtaaacagtgtcttcttaaaatcaaatgtaaatcaattacagattaaaaaaaaaagcctgtatttaactcatatgatctcccttcagcaacttattttgctttaattgctttaaatcttaagcaatattttttattcagtaaacaaattctttcacaaggtacaaaatcttgcataagctgaactaaaataaaaatgaaaaggagagattaaaggtattccttgttcttcccttctcttcactagtctaaaaacttctttttaatcttaagattctttgtgatgagggtgagaaaaagaatcctcagtttatttttccactattaatctttcttttgataaatcctctattgactgggtagaggtatgtttgtgaaagacatgtaacttggggatttgttactttaggtttgttcccttgaatttcatctcatcaggcaaattgtactagttgtagttacgagttttccctcagtgaagtagcaataggctgtaatcaagaaaatatgccatttatagagataagataaatgaaataatacttcagccaccaggtttttctgtctcacatacataagcagcatttcattgcagatatgggactgattctgtggcttaccttgattaacatcttttggaagttttgctagtgtgctttcctttctttactatgtttctcagattcctttgtatcagggttttgggtgtcacttaggttttgtccatcagattctgtgagacaccaggcatcgttttgaggatgtgggttatacacatggagtgcttctggaactatcagcccacttgaccacccagtttgtggaagcacaggcaagagtgttcttttctggtgattctccaggccatttaataccctgcaatgtaattgtccctctgtggctcacatttcattagtgagccatgaaatcaactcagtgggacatagccagcatttttgcataccaggttgggctataaaatatttctgttgtcaataaattttaaatgttttcctgctaaact

SEQ ID NO: 5372 - DNA, 1443 bp, Homo sapiens
ttagatgctgttaaaagaggaggaaactacttgaggagggacccaactttccgctatcttttgggttcattccaaatagttttgtgccattgaaaaacttgaccttcaaaaaaatttgtttttcagaatagaacacaataggacagtgactgcacagttgtgaaaaaggaagagaatcattaaagaaaaagaaaaaagattttaagaccgttgaaatcaattatcaagaacgtcctaaaacacctatggctttgactttgttattgatccagattattttccttgcattggggaaaatatctttcatatttgtttgctgtaaagatggttttgcaagaataagtcatgaccaagacaaactgccaatacaaaagcccactgatactaattatataatgagaaaaaaatgtatccaactaggacacatatcttttgagttatttggactgaaagcttaagaaaacttggaaaattctattttgtgatctagtcaagccacagttatcaaaggctacattttcagtgtaagataaatggatgagtaaactcaaatatgtatcacgtgtgctttgtatcttaagatgtgtttccaagagcatctgaaattttgtttgtacatgtatcttgatcatttataaagccactgtgatctataaatcaagaaaatccattgtcataaccatttttaaaagtcaaaaattaagacatccttaattaaaaagtttcaaatctagacactaaatgtgtgtgaatgtacaaagaaaacaaaccattgcttatgctgttatatactagagaaattttgttttgcttgctgttttaacttgacagatgaaggactttagttgaacttcatattgtaagaactgttaataaaagttgtcaagtaaaaagcgctatatctaaaaagactttatgaacagttattctatcaacttttaaaggttttaaacctgcccagaaattaccttggtatctgaagtttccctctgtctcctcctctaattaagcttgttatttgtcatgcaccagcattggagataataaaatttcttgttctgtgtattttgtttggctaatagtattgcatacatactttctctgtatactactttctattgtatgtgttaaccagtattaagggaaaatgatccagcttcagctatctaattcacaaattaatttctggaaattaaactttgtaaattaagtttttgcctataagaatttgctggtctgggaaaacctgccctatcaatgagtatgttgccgtggttaccttactaagatgctgaagttctaggagagtaatgattacatcagaaggctaggttcagcaaaataagtgtatcagcaggttttatcatgatcagtaaaaatgttccaaatgcttctgctccattatagcagtaaagaacgaatatccaatgcaacaggacaatt

SEQ ID NO: 5373 - DNA, 1646 bp, Homo sapiens
aaaaatgtaaaaagtctgagagaaactacttagggcacttaggaattggcaggactttctgtgccacagtaaattaatcttccttctgttttgtattatgatgaacggttgctattatatcaagatatattttcaaagaaatggttgaaagctctctatgcttcataatgattctttttccatcttaaaatatggttttactattaagagccaagatcatgcttggacagatcttttaagaataacttactgagatttattgatttgaagattttaaagatgaatggtaaaacacactcttaatactgattacatggattggacttgaattaaatatattgttacaattaaactgataccactgaattgtatgcattattcttgaatagagttcatttctggtttctcttagtattcttcttcctcaaagttgtagttgtctgttgatgatggtgatgatgatgatgatgacgatagtgatgccacacattctctctcaatttcagcttcggaacgctatgaaaataatacatgattaaagtttcacagatcttcttggacattgtataattgaatttgaatgtgagatttctccagttatcaagagactaaggatttttttttttttttgacaaaaggaggatacaggaagaaaattcagactcatttgaatatttgtaaaccatgtaatatataaataaccactttcaattcttttggccctgagctatctccattacttaatagaaaaacttagataaaaaacactttaagactcttctattcacattgaaataaagaattatctagatgataattcagataattcagtttgttcatagaattactttcttatcactctttttctactactttttctcaaatacctctctaatccaagaggcacttccaagaaattccacacattccttatatcccttttttgcttgtctagcaaagcttgtttgtatatatgcaccccattgtaaagcaggtatgcaggtatgtgggtgaaagtgactatgaaaagacttaatgaattctgggatttgtaatggtattgatgggtatctctgtatgtatatcaagagtgggcagaaatgtttggctggtgatggcaaatgactggctttctcttgtggatggactataggaagcactttctgaattatgtaatgatttggaccaaaaagtattttgctgaaatactcaggtaattgagatagcaatggttttatggcatgaattatccaaaaaaatatcagaattacttattattctgtgatttcattagctcattaatgtttaactcacagattgggcatcaccatctagaatttcagtttaagggaggcctgcgcaaagctagttttatttcttaaaggataacagtcatacatagaatactaggaaagccaatattctatttaaaaataaacttctgatgcattttcattcttagcagaaaggtaaatgcttgagaaagcttgagtcaaatttgttaaaagaattttgagttctataaatccaaaaatctgaaacctgaatttatttaaatttataatcctttattttttaataccgtgccattttccacaaaggatttgtggttggtatataattctttaaagatacctggatcagtg

SEQ ID NO: 5374 - DNA, 2821 bp, Homo sapiens
ttgcatatggtatataaagaaccagttccagcagggagatttctttaagtggactgttttctttcttctcaaaattttctttccttttattttttagtaatcaagaaaggctggaaaactactgaaaaactgatcaagctggacttgtgcatttatgtttgttttaagacactgcattaaagaaagatttgaaaagtatacacaaaaatcagatttagtaactaaaggttgtaaaaaattgtaaaactggttgtacaatcatgatgttagtaacagtaatttttttcttaaattaatttacccttaagagtatgttagatttgattatctgataatgattatttaaatattcctatctgcttataaaatggctgctataataataataatacagatgttgttatataaggtatatcagacctacaggcttctggcaggatttgtcagataatcaagccacactaactatggaaaatgagcagcattttaaatgctttctagtgaaaaattataatctacttaaactctaatcagaaaaaaaattctcaaaaaaactattatgaaagtcaataaaatagataatttaacaaaagtacaggattagaacatgcttatacctataaataagaacaaaatttctaatgctgctcaagtggaaagggtattgctaaaaggatgtttccaaaaatcttgtatataagatagcaacagtgattgatgataatactgtacttcatcttacttgccacaaaataacattttataaatcctcaaagtaaaattgagaaatctttaagtttttttcaagtaacataatctatctttgtataattcatatttgggaatatggcttttaataatgttcttcccacaaataatcatgcttttttcctatggttacagcattaaactctattttaagttgtttttgaactttattgttttgttatttaagtttatgttatttataaaaaaaaaaccttaataagctgtatctgtttcatatgcttttaattttaaaggaataacaaaactgtctggctcaacggcaagtttccctcccttttctgactgacactaagtctagcacacagcacttgggccagcaaatcctggaaggcagacaaaaataagagcctgaagcaatgcttacaatagatgtctcacacagaacaatacaaatatgtaaaaaatctttcaccacatattcttgccaattaattggatcatataagtaaaatcattacaaatataagtatttacaggattttaaagttagaatatatttgaatgcatgggtagaaaatatcatattttaaaactatgtatatttaaatttagtaattttctaatctctagaaatctctgctgttcaaaaggtggcagcactgaaagttgttttcctgttagatggcaagagcacaatgcccaaaatagaagatgcagttaagaataaggggccctgaatgtcatgaaggcttgaggtcagcctacagataacaggattattacaaggatgaatttccacttcaaaagtctttcattggcagatcttggtagcactttatatgttcaccaatgggaggtcaatatttatctaatttaaaaggtatgctaaccactgtggttttaatttcaaaatatttgtcattcaagtccctttacataaatagtatttggtaatacatttatagatgagagttatatgaaaaggctaggtcaacaaaaacaatagattcatttaattttcctgtggttgacctatacgaccaggatgtagaaaactagaaagaactgcccttcctcagatatactcttgggagagagcatgaatggtattctgaactatcacctgattcaaggactttgctagctaggttttgaggtcaggcttcagtaactgtagtcttgtgagcatattgagggcagaggaggacttagtttttcatatgtgtttccttagtgcctagcagactatctgttcataatcagttttcagtgtgaattcactgaatgtttatagacaaaagaaaatacacactaaaactaatcttcattttaaaagggtaaaacatgactatacagaaatttaaatagaaatagtgtatatacatataaaatacaagctatgttaggaccaaatgctctttgtctatggagttatacttccatcaaattacatagcaatgctgaattaggcaaaaccaacatttagtggtaaatccattcctggtagtataagtcacctaaaaaagacttctagaaatatgtactttaattatttgtttttctcctatttttaaatttattatgcaaattttagaaaataaaatttgctctagttacacacctttagaattctagaatattaaaactgtaaggggcctccatccctcttactcatttgtagtctaggaaattgagattttgatacacctaaggtcacgcagctgggtagatatacagctgtcacaagagtctagatcagttagcacatgctttctactcttcgattattagtattattagctaatggtctttggcatgtttttgttttttatttctgttgagatatagcctttacatttgtacacaaatgtgactatgtcttggcaatgcacttcatacacaatgactaatctatactgtgatgatttgactcaaaaggagaaaagaaattatgtagttttcaattctgattcctattcaccttttgtttatgaatggaaagctttgtgcaaaatatacatataagcagagtaagccttttaaaaatgttctttgaaagataaaattaaatacatgagtttctaacaattag

SEQ ID NO: 5375 - DNA, 87 bp, Homo sapiens
tttttaacaagccacttatgtctttttattttgctaacattaataaacttatatttgtgctttgttttttcttaagaaataatcata

SEQ ID NO: 5376 - DNA, 277 bp, Homo sapiens
atattcccaggaggataactcaacatttccagaaagaaactgaatggacagccacttgatataatccaactttaatttgattgaagattgtgaggaaattttgtaggaaatttgcatacccgtaaagggagacttttttaaataacagttgagtctttgcaagtaaaaagatttagagattattatttttcagtgtgcacctactgtttgtatttgcaaactgagcttgttggagggaaggcattattttttaaaatacttagtaaattaaatgaac

SEQ ID NO: 5377 - DNA, 680 bp, Homo sapiens
ggagacataggttataaactagttatcttttaaaaggctcagcaacacaactcttgaaatgcttatcaggataatggtagctatagctggccatttagaggaattctaggacagtgggagctgtgttactagcactatataattccggtcagtgctgacaaataacatttaacaagtattgcagtaatcatcacttacaggtaccatttatttcaaaacaacttttttagtctgctccaaagttaaaataattaactagctaagcattattattcgactggtctaaaaactattgttatcttttttttttccttttcactgttatggccttttcacatttctaaatcccatcttgatatactatgaatactctagaatgatgtaaagcagataggaatgtatgtgtacatatttattgcatacttgcacatcaaatcgatgtacatagtttaacacgtggtccttttgtgaaacctagaactcagaggattgctttttttctttcagcctattttgagttaacttcagtgctttcttagggaaatgacagggcaaagcaatttttctgttggctttgggctgtatttgtgcactaaatctttattctaaaaaaaaaaatggaaactttaatttttttaaaacgagaatttcatttacagctacattaaaatcttaatgag

SEQ ID NO: 5378 - DNA, 3238 bp, Homo sapiens
cagaagccctgctaaattttactccatcaagatcaatggtttacatagataaacttatttaccaaagtaaaaagaactcatggtacttctaatgaaaatggggattattacaagtgtggtttatatgttttctttgtgattcctggtcaagaaagatccccaaaactgtatccctaacctttaactcaggattgtacagtatgtttaggtccctcaaaaagtgacctaagctaatgttataaactgctaatgatttatatatcacttagtgtgtagagggactgaaaatatttattttgttataaataattttatagcacgtttactctagtgctagctaatttgtaataaagccaagtctcagttttctgcattaaatggaagggagacatgaaattgataatctcaaacttaattcatatttggctttggaatgtagtgtatggtttttggtagggaagtcaatattttcgattatgttttgcttagatcagtgttgaactaagttggcatagcacacactaacagttgtaggagatccatgagcatgctggatattgaggggatccaatctgtgatctattttttattatagataactgttacacataatttcagatcgtttggctgtaaaatttgtctgttttccacttggagttattttaaaattcaaagtaaatcactctattcttattttgaaaactcagagccattttatatagaaacaaaacccataagagcacacagtaacaaagcaaacagatacaaaaatgactttttagttatgacaaatattttagttggttactacttaggtccttttggcaaatgaaaatttgtgattagagtataaatggcaaaactatcttttcctggcctttgaatccactagtacttaatggatatagctgaagcagagactaagtataacatacaggttcttcagtaaaatatatcattttcatgttatagttatgcctgtgtggcctctgtcagaactattatcagtaaaagaggttaagcctatatatgaatgatggaccaaaaccttgaggttgtacattaactgaaatagtattttataaaatcttatggtgctgtggaaaatatttattatttcaccttttctgacacttcaccatggagactattcaggtaatacaattttaagtcattgcagttaatactctggttaattggtactgttaatcacccaggtcaggaattctgattttaggttatctcattaatcatggctgataaagaagctaaggggattctccagatctaatagatttcattagtcatttgtgtcgagtattcctccctaaaaacaaaagcagtattttctttctcaattaatttttaagttattcattaaaaaatatataacatcttaattttattcttttaaaaacatacagtgaagccttgctacaagagtcataagtgactggaatttcttgcataataggttcctccttttgaatagatcagattcatccccaggctctcagcagtgtcatgatgaaatgagtgtgctgacttcaggggtgtggtggacactggtagctagccttatcagctccctccttattcctacctctgtcagcagcatgcctcgccccttacctaattctgctgtgactctgacagagaggaagtgccttctcactttgcaaaggaatgcagcatgtcacaaaggaggtgctccaattttttgtgtccttacttccctatgtttgcctagttactgaggctaggtcgagtgtgaagcaataggtgtaagatgctgagagcacatggacagctaccagggagatctgttgcttggttacagggtgtattcatgagtggtagctgcagttgtcgtgagagacatgcttggcatacagagctgtctaatgggtgggagacatgtaatggtagatttagggctgggagcatgattttgggtctgcccaaaggaacatggtgtcacttttgttctttctgacccactaaataaaaagtagtgtaacagggtttcactggaatgtttattagaaagtttacactttttatatttttatgattttaaaaacaaacaataatagaaaaacagattttaaggaacttcagagcagtatatattctgtctaaactcactgaatattttaagttgtaaatcaggtgtccaccaacctttatttttgcattgcaggagatgtgactgtaaagtagggagtttttttttttgagacagagtttcacccttgttgcccaggctagagtgtaatggtgcaatctccgctcactgcaacctctgcctcccaggttcaagcgattctcctgcctcagcctccctagtagctgggattacaggcatgcaccaccacacccggctaatttttttatatttttagtagagacaaggtttctccatgttggtcaggctggtctcgaactcccgacctcaggtgatctgcccgcctcagcctcccaaagtgctgggattacaggcgtgagccactgcgcccggccaaattatttttgtgggtagattcattctctttacctaatagtcataatttagtcagtgaagggacaacatctggggtaagagctatggaggaggtgctcagctttgtgagttttgtgccaggcatctttgctgaaaatggagatggcagcaagtgtgaatctgggggaatataagggaagacagaaaagccttaagagtagacggaggaagaagggtaccagaatagtccctgtggaggcaggcagatcagagctcagggtttgaaagtgggcctgagtaagggtcctgctagagaaactgcagatggaagctgagcagttaccaactgctaatgtgccaagtataccaagcacagcatgtgtcctgtagaggagcattattttaaacaatgttctactatcatctaccaaaataattgtggtaaaagtgtagtattttattttttccttttatgtcagcaatattttaaaatattgatctgtttatcttatatttttatggataaatgtagtatttgcctcatgattgtgagccactgagagtgcactgaacctattcacatgtctttaagatgttttgctgtgttaaaattttaggagagaaaaatacaagtgaataattatttaataggcatttattactttattttggagttgaattctgtcatttgaaaaagttcagtaatgtaataaatacaaagtgatctgcactgtt

SEQ ID NO: 5379 - DNA, 3256 bp, Homo sapiens
tgtgctgcattcggctcccttcagcaaatttcaggggttttctgggaccagttctcccccaacaggaaacttgtttttttaacgtcagccagatatttagaaaataacctcaaaagtgtttatatggtcagtgagccccgcttagtgaaatagcaacagattggaagttgaaatggctgagatttggtgatctccccacagctggctctgcaagttacctctttctccttgggccttagtttccccattggtaatctgaattggctaagatgattggggagattttctgtacctgtaggtaatttggtgattcttggtggctgctcttctcacaacttttatgtatctgcttctgtcgtttagcttttttagccacatgctgaccaaatttacctttgagttgataagtccagtggcttgagtagtgaatccctcagtgctgacttatatcttgttctttgaaaaaatgcattgactctttaagacatctaaagtatcacattatccataatttattgcttttctttgcatctgcacctgccaccacagaataaccattaccctcagctgctgattgggcagctctgagattagcaaaagccagggacagctacatgttcaggtttttttttttttttttttttcaataagctattttttttcttttcttattttaaatagagagagagtcttgctatgtttcccaggctggtcttgaactcctggggctcaagtgatcctcctgccttggcctcccaaaatgctggattacaggcatgtgtgcctggcccaggtttcttaataaaacagaatcatgatcttccaggttccccccagtttctgatcatgttgatttgtagctgtggatcatgaacactgaatcctcagatcactctgacttcttatgcttctcctgtggatccactatcaaagtactaaatgctgtgtaagtagacgttaatctggctggaaccatgggaagcactttgcagtgttcagaagagaggctccatttgtggctattatgtagaactgggccagagccagtccattgcctgtttttttaaataaggttttactgagcacagccacactcatttgtttatgcagtacggcctgacattgcttttgctctgcaacagcagagtcgagtcattgcaacaaagagcatatggccccacagtgcctaaaatattgaccagctacccctttatggaaaaagattgctgactcctgataaagaatataaagtgagcctgattcttgaaaaaatcagaaccagagcctgttttgttttgttctaaactaagaagccgcataggatgtgacttgcgttttgagtagaggggaaggctgataacggcgtaagatgaagtggccctccacaaaggctggttaggggacagttctttctctaacatagttttaaaggatgtgatctggtccccttggatgccaggagagaatccagttgaacttgctcctaaatgctcttaaatatgcatattttctgccaactcacttctttaaacatctttcagcccagcgctgcggccccgggaagggccactgcgaatagagaggaagctggaaaagttcctggggctctgcagccaggaaggggaaccagggcaaatcttatgtaaagatttttcagcaacttgtcccaatttgtgtgtattctgaaactttctctttgggaccaaattcattctcaatggccctgagttcaatatattattaacagcagtattttaaaacttagggttgaactgggcatggtggcacataactgcaatcccagctactttggaggcagggatgggaggatcacttgaggccaggatctcaggaccagcctagagagatcccatctctaaaaaataaaatataagaaaataaaacttaggggatatacagatttaaatattcaaatctccctgctcccctgaaagtccccaggcagctgtcaatgacttgtttgttgtgttctcaatatgatggctatttgaaacttcacctacttttcattagattggttgtaccatgtcaccttagcttttaaaaatactcttttcagattcacgttctctaacaaagagtctcatgttcaagatcaatatgtctaataagtgctggtgtccttttaaagtatttaaatatatatgttgctgttgctgaatacaggagaccaggttaggaatatagtttcataataatagtacatacaatactaattgtatataaggtagcaaccaaaagaggttgttaattagcacatattccttttagaaaaatgtttcagaaacctcagtcttgatatctgagctatctgggctcccttacttgtgagtaagggatcatgctcaccactggagaagcttacaccgggactttttttcttttttcttttttttttgctatgacagagtaatgctaacgtaaggacaactgagtttgatcagtgtttaatcgcagtgggtaatcttatctgattgtctttaaaagtgaaaaggattaagattttattctttcttgtaaacattacttgattttttaaagaagttttgggctcactgctaaaatagagtatacaactgaatgtttttaagtcaagatactgttttaggagtttaccctctcatttataaccaaagttgctctaaaacactttccaaatatctgcacttctgatgtcagaatcaaaccagataattctctaattcttctttaatctaaagtagatagcttcccactggaaagtaaacaaaaccatccctcccaacctcaaagctaggccacactctatttcaaggcattttctttcagctgataaggtgtcctcctgaagccaagtaggtggttctggtctccaagtatcgttaagcacaggtgctatgacagaaaaagttctggggtggaagttttaagatgaggagttctgatcttaggcatcttaacagtcacaaggtgaaaagtcaaatgaaacagtacaattcttgatgagtgaggtgtcatcttccaaccacacagaggacgttttggctatgatcatctgatggcaagtgaaggagaaatgagtgatagggctttgcgttttcatccagatgctgtggccctgtgtttcacagcattaagagccataatttccaacctgcacagatcctgaacaacaaatgaataacgatgaatgtctttttggttgtaatttaacaagtcaaataaaataatcattgctgagcacaatcacatgttg

SEQ ID NO: 5380 - DNA, 837 bp, Homo sapiens
gtctgcaaaggtgtaatctttggaagacttcagaagatcaccaagggctcatgttggtgacatcatgtaaaattttcctgggtagaagggaaaagactggaaaaatttttttagtgacatgcattttttttttagttgttatcaaattgtaaaatcagtaatgtgatattttatattctgaaacatttctactttctgctaaaatcaattttaatttagtttaattgaatgatttatgatgaatcttgggcaaaaaaatacaactgtaaaaaatttcacaggtcatttgtgtagaataatttgaacattgtgaggaccaatcttttttaaatcaaaagggatgttgctggtatcagaattgttattgcttcatttagacataaaacacttaagtgttttcttcactccgtgacctggagagttttccattttttaaaatacatgaacttggcaagggtgtgatttttctttatcaagagaacaaaatgccagaatgttaaaacagttaactcaaaatctagtcatctgtgtaggagctaaagcaggtctccagggagagagggtggtcgtctgtgcattccaggttactgcacttgtctgatgtgacgtagcaacacccaggtcttcttaaaacaaagtcatcagctttgccaggttacatactttatttaaaagtatagtgaggtcgaagttcattccagtgtttcattttaataatgtgggcattattaaatttttgtggaagctaatagtaaaaaataaaagctgttttcaccacctccctccccaccccccaaaaaaggcgtacagccaactcttagttatttagggtaagag

SEQ ID NO: 5381 - DNA, 1499 bp, Homo sapiens
aaatggcaaaagatccaggagtctttcaactgtttcagaaaacataatatagcttaaaacacttctaattctgtgattaaaattttttgacccaagggttattagaaagtgctgaatttacagtagttaaccttttacaagtggttaaaacatagctttcttcccgtaaaaactatctgaaagtaaagttgtatgtaagctgagattttgtatacagaatccttatttcctcatagacttatattttataatcagaatatgttgctttgaaaaagcctctaatggactgaccttaaaactcatccttcttccactgtctcatccacataagcactccccgaagaattaagggggttctgttttcaaggcatgccaagtactaaagcaccttgcagagcgtgtctattacaagatgtcatttccaccagcagttcccttaggggagctgaaataaattcacattttctcaaagtctcatagctttggaggagccatctgcttttttggctgctctttttagctggctttttattaggctcagtgacataaaaaggatccaggtaaatgggtataggatttgctggatttactaacaatttccccctgttcttaacacttcctattagtgacttttcagacattgagtttacttataaagagagatatttatgtactctctaagaagacaaatgaggtcataaacactgcataaagcaaggcaaaaatgtatgccacatctcagttatctaaactagattagatccaagccaagttttctcaacagagagcaaagggccaggcagtaaggtagaaatagagataaaaatcattccttccttgtgatccaaagctggtcgagcagctttcctggaggaaaaggttaatgaacttcaggtccctgcaactcagcccccaccacaaacacagccctggaaacatacagtggcgcaaggtcctcttgaaatgttaatggttaatgttcccaaaccagagaatgctttgaaaatgtatcattcagtgtaaattaattacatacatatttttctatatatttgtttcaaactgtaaaaataacataatatgtaatttgtgtattagtgagaggtgaagccagctggacttcctgggtcgagtggggccttggagaacttttctgtcttacaagaggattgtaaaatgcacccatcagtgctctgtaaaacacaccaatcagcgctctgtagctagcaataggtttgtaaaatgcacccatcagcactctgtaaaacgcaccaatcagcactctgtaaaatgcaccaatcagcaggattctaaaagtagacaatcacagggaggattgaaaaaaagggcactctgatagggcaaaaacggaacatgggaggggacaaataagggaataaaatctggccaccccagccagcagcagcaacctgttcaggtcgcctgccgctgtggaagctttgtccttttgctcttcataataaaccttgctactgttc

SEQ ID NO: 5382 - DNA, 1691 bp, Homo sapiens
acttccttgaggagaagtgaagtttcactgtggtatggccattgaaaaacaaaaactcttcttcttccccatcaggaccattttatcaaagttcgttcatttccgttaaccacataactaataatttaattgttattcttttttagcactacttatttatcttggattttgtaatatatgcaattgttttatttgctcatgggcacttctggcaacttgacaaatggaccgatgcagattttagagagtgacgacatggaaaatgaatttaaccactttcttattgggttgtcttgctttcttacatgaacttgtttttttaatcactgaaaggaatttagtgtataatatgtgtttgtaactgtgattatgatagaggcctatctctgtttacatgcatagctttgagttaggctaaatacatcagaagtgttctactgaccacataagaagttagtattgccaatctttcactgcatgtgaaaatgtgaccaatttagcacaaattctctcttagttccagaaaaatcagtaaatgcacatgccctgttgattggagatcagtagtgtcatcttcataaagcaagacaacattatgacactttaaaacagtagcaaagaagtctatttattaacccacaaatgtagcatcaagccagactcacaggtagcaaaatgaattacacacctacttttactgactattcaacataaattgaatctttaacatgactttaaaggctatttacaaagctgttttaaagtttttcaaacatgatagaaattttctaaattttagtaagagagaagcttttaaaacagtacattcctgaataaaacaacaatattgtatcttaatcaaggctgtctgatgcagatgattgcattttttggcaaattttagaagcatttattgctttgtctttagtgtaacaagatcactggattaaatataaacattcaggttaattatctagatttttgtccacagtatatgatccatccagacatttgcaaacgtcaggagaaaaatgtgaattatttatccagatgcatgtcatctcaaggacaaagcctgtgaaagtacaagtgagatggttgcattgtagtatgcattaatctttcaatgtagtggtgtaaaaatgcagtgctaaactaatgaagcaggtgactgcagcctttggctcaagctcacaactctgataactgtcagtgcctgaggttgtgattggtgacattctgacactgcccaaggcaactcaccctctattcctcctttctcccctccctttcttccaattcattgtcttttttttcctcttttctctgtaatttgttactaaacaaattccagaatttgtttagtagctgagtgttcctgagttgcctagtagcaataaaacaagtgaataggaaaataattaatatattattctatttagcttgtaaaacacatggaatctgtttaagatagcccttgtaaaattgaacatttacctgtattgtaagtacccacatctgtgtctctgaagtcctttgaaacatctcattatcttgaaatttttttaatgtttgagaacaccataagcagaatattctaacacctttggcccctgaaaatcctttaattagtttatggcttcatctccttatctatttaaaaaacatagtaaataatgtttatggttttc

SEQ ID NO: 5383 - DNA, 1262 bp, Homo sapiens
aacactcagcagacatttatctttgtattcttcatgaaatgtgttttgtctttttttattactagtgtttaagtcattttttacttgaatcagatggtgtcatttagtaaggattttatgagttcttgttttttaaaatccagactttctttttctacatgtgagatagttttcattttaactggcatgtcatttgcacacaaaaataaagactagagcaaaataatgcaacgcaggaggagaaaagaaatgcactaagacaagaacattctctcatagaacattgatctgttttacaggaaacaaaccttgccttgaaatttacacagtgagactgtacataattgcatgaaaatagctatttttttcctaagacatttttcattcatgaatattttcaagtttttcatactgtacacatttcttaaaacacatgataccagcagcaactgaaaatgaatgccgaatttggtacacatgtgttatctacctcaaggtaacaagagtatgtggcaaaacatataccacccatagtgcttcacaaaatgcacttctatttagccagcgtttattgtagtaaactattcttaataaaactcactcactgtttataaatgttctggtatgcattctttatagtgaagtgttaatacatcacatcttatttattttagcaaatcagtatattttctgtatttaattataaaaaattaacttagtttttaaaatttatttgcaaatatactttactttttccatttggcactatggtttgttgcctacctagctgcatctataatgtcagcttatcctaaggctgtccacgtacttaatttacttaagtgttcattttaagtaacgtgctcactgtgtataggaatttgtattttggaggtgcttgatctatctacaaagaaaaattaattaggaattactttattataaaatgctcctagaagtcttaattgtgtttattttttaaaaaaacaaatgttagacttgtgtgcatggaagtaattaaggtacatcattattgtagtttgaaagttgtacatgataagacattttgtttttactgtatgtttttactgaatgatctattccccatcccaaggcaagcatgaataaaattaggttaaacgtagcatgtggcatcgcagtctcttagaatttgtttcatctattttattttattgaatactgtctgtatctttggttatcctgtttgaagaaaaaggacaaataaaacatggccagcaaat

SEQ ID NO: 5384 - DNA, 215 bp, Homo sapiens
actttcctagataaattaacattgctgggtggaaatattcagatgctgcttaaatacttcggtaaacactgggtaagattcatggaacttagaaaaaagctgtatgaactgctttaccaaatatcactactgaggaaatgtataaaataccacatagtataaaattacatgttaatacaatgccagattttaaataaagacctttagttttcctc

SEQ ID NO: 5385 - DNA, 203 bp, Homo sapiens
ataagaaaactaaggctcagagaaaaagccaaaactagtacttgcatgacacctagtcaagtcctagtagtattcgactttcattttgtggatcaatttttatttggaaaatagcagcaattctcgtaggagtcagattaaaacgtctacaactaccttgaataacttcaactatcaggataattaaaactgcaaaccactgg

SEQ ID NO: 5386 - DNA, 2358 bp, Homo sapiens
ttccagagttatcagtaggctagatagaaggtgacctctcctcataaggacttggacaactcagattatctgaagacacaaacctgacaggagggagaagaaaaaacaaaacacttgaaccaagaaactcaaatgtaatcctacgatcaaagcaactggtcaacacttccatcagaagtgaagataggaagctcatcagatagaacatcagcccatgagatgtttgcaacaaatcttttgttgcaagcagtgtgtcgcttctgcacaatcagagactgtctcgatctctccactcaccgtggaagttgccttgtgcctaaactgaattgacaaatgcattgtaactacaaattttatttattgttatgaaactgtaaggtctacatataaagggaaaaagttaatgtggaaagctgatctacactcagctgatgccagcatacattaaagcggttcacgtgcagagaacaaagcagtgacaaccattggcccttagcattcccggcatacctattagtgtcttaaaaaggaagggaaaagtcttttgttgccctctcctatcctcttgccatatgaatagcgttttccatgaaataggaaaatattacttggtatagcatttctcttgctctcattttttgatttatttttattttctctttgtgggtgttatatttgatctctaaatctgaacagtttatggtcacagtccagcctcctccgtgcagccctgtgtgctttgcacatttaccttacagtggtaagcagagaccatctgtgaccatagcctagctagcattttaaaaggggaaattttgttctctaggttttcccccaaataaacattgctttatttctaataataaccaagacttttcaagcttctagatctcataggaaagcttgtaatagcaaaattgtaaattacaagggaagaatctactttttagaaatcgctttgttttccaagcagtaagtactacatacagtacttgtaaagtgttagctgtaagtaagcacaaaatacatttaaaatacaaagacgattttttcaggctgtgattatggtgaacataacaaaacccagtagtcaccaaggcaggtagtgtgataaatgaacacaccactctgaggctaattacctaatggaatacaagagcaatggtcacccgtatttccttatcctagcctttatttctctgtcatttggatggctggtcaatggggaagaattgagtgggtgatttaatcaactgcaaaccatctgcccctgtcccaaaatgatgagccagattagcattaaaccagtacttgtcagtccatcttaatactgttcattaaggcactctctgtctctaatccttaggagttgttttaaaagacataatcactttgaacttccatgaaacctgtcttccaccacaacaaccctgggagagaaaaacatgctaaaggaggtatcttggcttaataattccttatagccaatatcaacagtggcaatcagcacacagaggaaaggacccaaatcactatgtagcttaaagatttctgttaatttgaaagaacaaaaacaagacagaacttctggtactctaatcaggatgattcctaacaagtcagtcatttgtgaacttagtggactttttggttactttaatttgcatatattctccagttacatcggactctatctgtggccttgttcttcatttcagtgttaatcagctaaacagaagttgttgcttatgatgtgtgagtgaacatatgccactgcctggcctttttttcttcagagcttgttgtctttttcgctatattagactttgcagtatgcccagaagctttccttcataaaatagaaagaaaaaaacatttggcttatttttcactgtagctagtcttttatacaataatcttgtaagaaaatttcttgaattctaaatattactctttctagatttttgaaatcaaaaagttttcagtaaaaagtttcttactttattttattatattaggtagtaaaaaatgtagggttatttaccataacctgttcattaatatcagaaatttacaatagcattttaagaccatagtaggattctagcataccgtgtagtacctatggagtattgtaagagctaattgttggagatgaattgcttctcatcttgttctccagtttccattgttggtttattgcagatttgtatcctgtgtcaaattcaaggtattattgataaaccttttcaaccagcagcaagaagttcaaatttttttctgtcactgtaacagaaaacacaatatgtatataacatttatgtagcaataaatgtgccatcttttttttaacacagt

SEQ ID NO: 5387 - DNA, 3232 bp, Homo sapiens
gtgctctcccgggctgtggaagtacctgtcattcctgcaggagctgcagccacccaaagtgggaggcagggaggggagcatctgtctgccactgagaccaatcacagcctctttgcacagcatgccagctcctcagtgttacattcctcgccagggtctctcagtgggtcttcgacagagagcttttgcagtttaaaatgttgggatgcctgaggaccaggagccaccacccactggggtgttgtgagagatacactttggtaggctgaggcccctgttccacagccactatttgcattgctgtccctgccccctcatcactccccctgccaagacaaagggtccagaaggctaggacttacttaatagcactgtgcagggaggaaaccatgtatagcttgtacatattttaaaccagaccttctcacgaactgctgctgttgggtttggaatgtgatggaggcttggtagggtggctggtttgtaaagttcatgcatctatattgagtattctttttttttttttttgagatggagtttcattcttgttgccgaggctggagtgcaatggcgcaaccttggctcactgcaacctctgcctccctggttcaagtgattctcctgcctcatcctcccaagaagctgagattacagatgaccaccaccactcctggctaattttttgtatttagtagagacggggtttcaccatgttggtcaggctggtcttgaactcctgacctcaggtgatccacctgcctcagcctcccaaagtgctgagattacaggcatgagccaccacgcccagccattgagtattcttttttaaaatatgaagctattagattttaagtgttgaggagcagaggtgagaagagagagagagagagaaagtcaaataaagtcaaagaccagtttggaaaccaaagttggaaaagaagaattgtagtggtcatggacagctaagactgagcatagcagttcacatggtctgggtaaacaagtcactggcacaggggaaagccagaaggttgcttgtgtctgtgactgcagctatggccttgtttgcttagtttatctggaattctgttataatttctgaactgttctgagacctgttcccagtcactgattgcaatttcttttacacaggttgggtagggagagttgtaggtaaggccttaaacaaatgaggccgtttctggaaggatagggctgtgtggtcatgtcccacagcaagcttttgggatcgggggaataagagggtatgggggaaaggttcatagacttaggtgtgagaatgaggtgggaggtgtctggtaaggtcatgggggaagggagatgagagaggagataggcagatgtgggtatggggcccagtgtgagaaggaagacagagaagttcttgaaagctgggggatgtgtgggcaagaggtggattgagcaggatctcagggttatgtcgaggaagggaagaaagaaacagaagtcaggcagaggcgtgtctgtgcaaactggaggactccttccaacttcctggaacaaagcgacatcgccagcagcaggctggcagggagtggttgaggtctgggggccaggccacatggctggagaggaatttcagggagcatagcatcgggaggatgctacatatccagggactccctcctggccttcctgtgtcacttcacaatgtgacagtccccaggcatgcccacaggccaggcccagtcacagctgggcttccacaggtcagaatatgggacaggacatggtcagggagaggaccctgtgagttggtgacatatatgtggcagagatggtagtgttcagctgcttcagcagtgtccccaaccatcccaatagggtgggggcctgtgggccagaggactccatgacagtagccatggagtcccacctgtgccaggtcagagcccacccggcaggtttcagagtggtcagcccagtttaagggtgggagtctggagccagacagccaagccccttccacatctacagggtcactgtcatcctcaccacagccaggggtgattctcacctctgcctgcttatgtggggtgtggccgattcctccctttagtcattcattcatttagcacatatttattgggcatcggtgatgtgtcaggcacagtccttggcacacagaatacagcagtgaattaaacaggcaaaaattcctcccctcctggagctcagtgtcaggaaagggggtgataaatgacaatcaaatcgacatggaggttgagcacctctgtactcagccctctgtctgtccttctgaggacgcaacaagcctggttccctagagctcactttgaccctcaatatgttcataatttccctgctgcttctcccatcgttagacatctgccagtaagcctgctgagagaagcctcagcccactcatacctagagacgctgctggggaaggtcagcacacccaagaactttgggagtgtgtgtctgttttggtttgtgagaaagtagctgcccctcattctggccagttctttccagtagccatggggctggctacaagaagcaaaactgcccatgcaaagagaacacaggtcacttttcaaaacacttgcatcattaccctaaaaataggctgttatgcgttttgacaattgcgctatcctacactctgagggagttggcaacgcatgcggtatagtggagtgggaagagttgagactgaaagttaagagaagggttttcaagtcccggctcatctcaccccagtgactttgacagtgtgctcactctcagagccatggattacctggaacaaagtgcagattagtgcccacggtcctttccaggtataacatgctatcgttctttaattttattatatatacatacttttcttctgttttttgctttaagaactaaccccgatcaagagtattttctttagctagcttaaaaagaaaacatatattttatgtaaaaacacatacatggccaaatgcaatactgaagagacaatcatcctgtatcttttatggtttttcctgcttctgagtgtcgttctacaatgcccgttgacttattccattgcgtctctgctttagggtatggtttggtcgctttggttgtcatgagaaagagacattctccttgcagctacctccatgtgagtgaattcctggataaagcaagatttcctttcaataaacgctgtcacccaatgggaattttg

SEQ ID NO: 5388 - DNA, 2985 bp, Homo sapiens
ctgaaagactgaatattaaaatgcggagttataatccagaaggggagtcttcagggagataccgagaagtaagggatgaagatgacgattggtcctctgatgaattctgaagataatctcctaaatcactgacgttgagatgtcatcatcttacatcagactttctaactagtatcaagatcagtgtcagatattgttgagggaagtaattttataaagttacacaaaggtagttataaaaaaagcccagtttgtctttcagaaggtgactttcatgtgcttgaaaagtttaatatttgaatattgtgtttaaccacatggtattaaaattttgcaatatattgtgtattggtctgatattttagtatatagtagaacatactttttttttctttaagccaaatgaaaagaggtaactttgcttttttcctttttcttacctatcaaatagcatttattacatgtctttcagtgaaatacttagttgttccaggcacctaaaatcaattaggaagacatagttcccttcttttttgggtaatgaagggagcagtctaaagaattgtatgcatgtttgcatggggttattgagacattggatgtgaaatacctaggaagacatgtatggagaatgcttaacaaatgctcttctcctttttctgtcttcccttaggaagaacgttatctctcttctgattaggaaggacttcccttttgagtagatgctggaaagtggaggttttttttgttggtttgtttgtttggttttgtgtttttttttgagatggggtcttgctctgtcgcccaggctggagtgcagtggcaggatctcggctcactgcaatctaggtggaggtctttttaaataacctcatgttacttcaggcaaatctggtacaggagaagcccaagctaactgagctgggtgaaggcttgtgcatcacctggcttgagttccttgctgtcacagatgataggttcatgtacacaacattaatgtttgataaggaaagcattttttttttgttaaaattgaattgtcagtactttacttttttccccccaaataggtatatatagactgcagaagcttcagtcccatatataaacgttcatgtcattttagaggattatatggttgtctccagagaaattaacttacattatcaaaaaattctttgtctaatatattggagtctttaaaagtgttgaagaataaaatattaattagaacaacttcaaatgctaaggtgatgttttaccgggacttaattaaatacaactttttcctttcgaaaaagactgttcacatttgcttccaggtgtaattattgctttcattccttacccccctcaagcaaatgtgaaaagtatactgacctaagattctcattagttttagttcttaaaacgaatagtaaatgatttcacagcgtaaaatttgatgttatttctggaagctggatgatatggaagagttcatgtgcctggacacacagttccctgtaatcctgccatctagggagataaactctgttaacattttgatgttgtgtttttgcttatttttctatgcatagttatgcatttatattctcaaaaatgaaatcataatgtacattgctttgtagtctgctctatatattgtcaatatgttcccatattaaatattttgctttttagacagctgtaggatattttatttcatgggtataccataactttaagatttatttcctattcagcaatttgattatgtattataatgtaatctgtaaatagtgatatgattaacatcttaatcacatccatagaaaatgacttatttccagaagataccgctctaaaaatgaaattgttaggtgaaagtgtttttgagaatttttatatatattactcactgcagagatcatgttcatttacattcccattagcaatatatccaatgctcagaattgaaaattactacttaaaatctttgcaaattgaataattacagaaaagggctacatttaaaatttgtatttgtttttcttacttagtgaaggttgtgttttttttcatattcattggccatgctatattcattcttttgagaattgctcattcatattttttctgttgcttgcttggagaatttgctctttttttggcatataagttcttaagaatgtccgtcctttgtcatatattgtaactttttttagccttatttgtcatttaacatagtttgtggtatttcagtatagaagttgttttctttaggagtctacctttgtgtatgtgcttgaaagtatttttgtaatccaagaatggataaatgtccttattttcttctagtattttcttatttcacttttacacctatctttaaaaggaatttaaattttgtttatatacattaactaaatcagtacaagtttggggtgaaaaggaaatttttaatccatctcaaatgtatttggttatattatataaggtagggatttgattttatttcgaagaatttaccaattggttcagtatgtgaaaccaccatttcccctctgattagtaatgctatttttatagaatattaaattcttatgtgtcttttgtgtcttaggccaatttctgggccttctgggttttttctacactgtcaataattatcgctttaattggtgttaatatttggtagtacacaggttctcccttgttcttttaaattttgtgaaatataacttacaaataagtacttaaaacagagcttaatgggtaaagcaacagctgtgtaatcacaaactagatgcagaggaggtcttgccagcactccaaaatctctgtgtgtcccctcttgacactcactgtttcccccagagctaactatcctgacgtatggtaattctccctctgtccttttaagaattattttaccagttatgtgtataacaatatggtttacattttgctcacttttgacttatataaaaatagaataatact

SEQ ID NO: 5389 - DNA, 864 bp, Homo sapiens
gcactcagaggcatacactttttacagatggacaaaagctctggaaccctgtggcttcaaatcctttgggaagggtgactgttgtttcccctacacacagtgtaagccggaatgggaatcgctgaggctctgatccacttctaagacaggaaggaaagtgaaggcagagtgagcaggtaagagagggatatacaaggtcacatttcagacacccactcggcataccctgccgtactgcatcatcatttgttttctttgtagacactgaaatcctatcaggaggattccttcacaatgtattttatttgctagactttggttgggagggaaaaggacattaatttgaagtttcatgttattcatgccaggattgtttgatagagcatgaaggttttgtttacccataaaagtattagaggcagcgtttctctgatacagagaggcctgtccacaagaagcatgggcacccagccaaacttgaacctggaagggagggttcccggcctgcaggtgctctttcctcttggtcccaagcatctgtgcagggtcgtgggagccacactgagagacttgtgtgggccagacaagcttcattctgatgcgctagtcccttggtttaatttgtgccttatgctttcattggaccagctgaaatcactgtatttattcaactagtgatttttttttctttctcactttaacttaaagagaattttatatgtcttggaaatttaataatttagtgttctcagtatcaattggtgtttttgttaaacgaatgaatcatctgttcatgcatgctctactttgatattataacctatgtcacatgtgtttaataaataccatatattttgttctact

SEQ ID NO: 5390 - DNA, 438 bp, Homo sapiens
aaagatctttgactcttttgccaaactgaaagctgccattgcagaatgtgaagaagttagaagaaaaagtgaactgtttaaccctgttagtttagactgtaagctaaggcaaaaagcaattgcagaagttgatgtgggtacagataaggcccagaattctgacccgatacttgatacttcatcactagttcctggatgttcctctgtagataacatcaagtcatctcaaacctcacaaaaccagggacttggacgtcctactcttgaaggtgatgaagagacttcagaggttgagtacacagtgaataagggcccagcttccagcaatagagacagggtaccaccttcatctgaagctagtgagcatcacccgcggcatcgtgtttcaagtcaagcggaagatacttccagcagctttgacaacctgtttattgacag

SEQ ID NO: 5391 - DNA, 1775 bp, Homo sapiens
tggcatgctcagctctggatttgcagtcagtttgggattctcttcagaaagatggcatctaagtgtctgtgttcttgtaagcctgaggtggaatccacccagttttgtctgctagccatatgggacatctaattggaaaagcatctgcataaaagtttggaaacaatgaccacttctctaccattgtcccccacccccaccccccagaataacgctgactgtcccctgaaacagccttctctcctgccctgtttatttcatcctcgatgggaattcttgctaggtaagcactaataactcggcatcttgacgatagtcccatttgggtggtttcagctgcactatctgtatgaaatggtgtcaccaaaacccttttcttcagtatcgacaaagattacattctgagtaccaaccaaaccctaaattgaaagacaaaactatggtttcagtcaacatattcatgaattagggagctaatgggttaagcttccagttcccgctatgctactggatttgtataaatactgatattctccaaacctagtggtgtagggagcaagagaatgcagctggaaggcacaaggggaggacattgtggcattcagaaactgcaggagacaagatgaatttgagaagccaaatggaatttttaatggaaaccatttatcagattaatctcttgctctcctgcattttagaggacaccaattaatttcctggtctttagtatataataacctaaaataccattgtaacctcagtcatgaaaaatacatcactctgtctttttagctcaaatgtattttcctaattgcccacttgagaacagacatttgacaagttatatcaacgactgtgcttgtccattattttacacatgccctagaagccaaaactgaaagccactggatcctggtctagctgaatcttcagagtgggaggtctccaaaaagatattaccttattgggcttaacaattcacaaggcactttcacacccattatctaatttaatcctcataatgactatgtgaggcaaatgccacattgcccatttttcagataaagaaacaaaatcttagggaagataagttgagttgtccaagagcacactgaaagttgaatgttatctaatgcattcctctacctttcagaagatcagtagctggctgacaatctttgccaaatcttccttgctagccagaagtggaattggcagcttctagaatatgtacacctctggacaaaatgttcctcaatcttaagatacaaagaccctcattgtctgggtctattcccacacttactgagtacagatgaaggaaagtggtagcaatttaatcataactttcatttgctgaaaaacattatgagaaggcctcccttcctaagccacctctggtcttgctaagtcttgatcttgcttcctgccagcaccaaacattacattcaggggatttcctctggctcagtcttttccccttgaagttctctaatagatgttacttttgacaaaagatcgcctatgagttacaagcaccaggggatgctctacatcaagggatgcaccttcagtcaaactgtcaaaaagcccagaattcccaaaggcattaggtttcccaactgctttgtgctgatatcagaacagcagaaattaaatgtgaaatgtttctgatgacttatgttctacaatctatggacatacgggatttttttttcttgctttgaagctacctggatatttcctatttgaaataaaattgttcggtcattgtt

SEQ ID NO: 5392 - DNA, 46 bp, Homo sapiens
gatttaatgaagacccagtgtaaagaataaatgaatcttactcctt

SEQ ID NO: 5393 - DNA, 2152 bp, Homo sapiens
caccatgtttcagaactcttgccctccctctcattcccatccttcctggtactgcagtcaaccaaagatggcatgacttacctgcgcagatttggaagcattgaacttagagtgctggctctgctatatggtacaactaatgctagacctacagtttatgtatacagttgattttgatgtatttataaaagcttttttttctagatttgacatttttctgtatcattttactgtatttttgcatggttccttgtattgcatttctttgcacatattatgggcttgtgaccctaaacttgcaggcaaggttagctgctttagtaagtagaattttgtggtctttttgttttttacatagtaccaagccttgataattatgaattttttatccattactaacctttaatttaatcaatcatgtactttagtttaatgtataaagatcctctagaaaatgataatattgtgtattaagacattccttaattaggacaaaatggctgctgtatatttactatatggagttctgagttaaataccatccttaatactgggaacagaatacaacccatataaatcagatgcaggtggtagtcacatcaccagagtgatcagtataaattttcttggtgtatccttttcctttcaacacagtgcagataagagttgaatattgatatcatacatttagactgctgttctgattgcatttatctttttcctacatcatttagaattttatttccctgattcagtttttgctgctgtgaaacagctctgatgaacactaaatattaatttcaattagctagattgtacatacttgcagatttaacaaaattttagggaaattgaaaaagacatgtagaatttgttgtcttctgctaagcacgaaaagttaagatatctgcttacattgattttgtagacacattaagtcaagatttggaatttaagtcactggcaggtatctgtgcattcatagaacttataaaggtcccaggatcacttttaagggatttttattagtttaaaggtaaataaagtcagctgaatctacatgtctcttgttttatttctctctaaacttgaaaacagtaaatctgcagatactgtgaggcacaaattatactgtcaacctactgttgctatggttatatactcccacttcatacattaccaagagtcgatcactgatttaaaatttttaatttctatagttaagatttactgcataatatagaatataaagttaagttaacatactaacatttctcctttggaggaagttttaatctacttcaggatgcatattattatcaagatactttcatatacaggatagcctaattttatttgtttaaatatgcttaatatgccccagattgcaaatgcatccagtcagtaatatcactgtctgtatgtggaggacatgttcccatggatcatatgtgaagatgtcaataagcttgcattaagccacctgctttgtaagtggattgattaataaataacttatatttctattgtctttgtgtttcataattagtttttataaaaacagtttacattaaacatcttggaattcaacaatagtgatctcactcaaattgacatttgcataatttgacatttatattcattcagttatgactacttgcccttttcttcatattagtaaatgttacactgtagtagttgtcaatgttaacaggcttcaacatagtatgtgtgcagatggacgatggatttaaagagcataccttatgattaaaccgaggttatagaaggtcaggggagagtgaaggagtcagtgacctatgtctgccatcttactggggaaaagagcaagtagcctgtcttcctttaagtaagtagcctgtaatggatgtactactttgccactggaataccccgggtctgtgccaagggactgaagaagtgtaagatggggagaactgtatgtcatggagtcctcttgacgttcccccagatacaagtaaagcacaggtggatttctctatttttgaatactacatcagatttagatgcacgactacctgttgacttgttttataattgctactgatttttttaatgtaggcaaagctttgttactttgaaatttatttaataaaagtatttgtgacat

SEQ ID NO: 5394 - DNA, 167 bp, Homo sapiens
gctgccgtggcccctggggatgtgtgcttcattgtgccctttttcttattggtttagaactcttgattttgtacatagtcctctggtctatctcatgaaacctcttctcagaccagttttctaaacatatattgaggaaaaataaagcgattggtttttcttaaggt

SEQ ID NO: 5395 - DNA, 422 bp, Homo sapiens
agttgcctaaaactaccattccgaaattattgaagagatcatagatacaggattatataacgaaattttgaataaacttgaattcctaaaagatggaaacaggaaagtaggtagagtgattttcctatttatttagtcctccagctcttttattgagcatccacgtgctggacgatacttatttacaattcctaagtatttttggtacctctgatgtagcagcacttgccatgttatatatatgtagttggcatttggttcccaaaaagtaggatgtaggtatttattgtgttctagaaattccgactcttttcattagatatatgctatttctttcattcttgctggtttatacctatgttcatttatatgctgtaaaaaagtagtagcttcttctacaatgtaaaaataaatgtacatac

SEQ ID NO: 5396 - DNA, 2174 bp, Homo sapiens
agggagctgggacaaggtcctaaaagacagttttgccagtggggctaggagccggatacctctgtagccaggccatcgctgcattcaggattgttccatccatggcgtgcatgtgccaagaaatgtgtttttatgggtctaaatgtttaccttgagtcttgaaaatactcttttgttaaaagtatgaaatacagtttttaccagtttatttcacttctctaaattcaatggaaatcccccgccctggattttgaaaggcttttatcttcttcattttacgaatggaaagacgacaatttttcttcaatgcttgatgcactaatgaagactgtttactattttgaaaaatgtcatggggatttttttttaattaagaaactaatgaatcatcacaggaatgtgttgctcctcaccctaaattaagagaatgtcccagtagattagacttcaacctttgagtccaatttggattttattatcgttgtctatgcacttcttatattggttatcttcttgtaaatcttctgtcttttgtaaggggaaaggatttaacatttagaataaaccccaccatttatgtaatggaaatagtttaaaaattgctaactgccatgtggattgcaaattaaatggaaacttatttagataacgtaaggctcaatatctgcgttgaccacctagatattacaggttttaatatttaaaactatttttgaattatccacaacctgtatagtgatagccatatatttaataatggaatggtggttaacagtctatttactgcacaattaattgttcactaatcaaatagaatgtggtaatttttcagactttatgatctgtttccaaaattggcacaaagtgctagggtttatatacacttatcgtaactgtatttttgtgccttggttttatcatgtcaatgcactgtactctgtaaaagttttgcagacaaaatagaaagtatgataatccgtcagaagtatgatgtaaaactggaatcctctgtattttttaaatgttctaaaaattttatcgctgttaaggtattaatcattcagtattactaatggaatagaaattcatacttttgtatggacaacaattcaaattgatattgcatttatagcactgtaagaaactttcatcttgagcaactttgtagatgatgggtgttttattttcaatcgccatatttgatcagtcattgaaaattggccccagtgctgtttgttcatctctgtatgtaaaaactgacagtgagacacaacgttctgaactgtgagggtgtcccaggaaaaagaaaaacaggaatactttaacaattaaaaagaaaaaaatgttttttgtttgccaaggactcaggaaaataaaaagcattttctatttttaggacaaatcacaaatgaagtgtctaactggctattactgtttacccatataaaatatgctgctaaagtacatattttgctgtcaatggcttgacaattttttttttcaaatttggacatgagaggttatatagggactatattatccaacacatattttcttattttgccacaaatttccacttaacaaataaaaaaaggcgaatgctgttttgcaatcagaaagtgaatttcttttgtggtagcgtacacgtggttcatgtggttctccacgtttaagcacaaaccacagcacaggaagccacaccccctccagcatctctgtcttgtggggtctttgaggagaaggaatcagaacatcgacacctgggaagagggaggcggggaacaccagctggactctggccaaggagtgatgtaagcaggtgacacttggctgtcagctgagcttctcaggtgcttctgacattgccagccccttgagatgagccaccgcaggtgtgctcaccttggctacatgttgaaatcatccagaggagttgggaaatctactgatgccccgctgtgcctcccagaccgattaagtcagaacctctgggaggtgggtcgcaggcatcagtgcgtgcccgaggcctccgcgtgtttgggtgtgcagccgaggtggtgagctgtcgagccacagtgcagttctcttctcaccaaagctcaaatgagaatcagcttccatgttctttcctttaccagaaatttgcaataaaaagaaaaataaaattttcacat

SEQ ID NO: 5397 - DNA, 448 bp, Homo sapiens
gacacactatgagagcgttgctacctgtggggcaagagcatgtacaaacatgctcagaacttgctgggacagtgtgggtgggagaccagggctttgcaattcgtggcatcctttaggataagagggctgctattagagtgtgggtaagtagatcttttgccttgcaaattgctgcctgggtgaatgctgcttgttctctcacccctaaccctagtagttcctccactaactttctcactaagtgagaatgagaactgctgtgatagggagagtgaaggagggatatgtggtagagcacttgatttcagttgaatgcctgctggtagcttttccattctgtggagctgccgttcctaataattccaggtttggtagcgtggaggagaactttgatggaaagagaaccttcccttctgtactgttaacttaaaaataaatagctcctgat

SEQ ID NO: 5398 - DNA, 2194 bp, Homo sapiens
gggcccagccctccccggggcgctctgcccgggggactccggacactgacagccgcgtggtacaaaataaacgtgtatttgttgttcttatcagtcccgtttcagtacaacactggcagagatgattctagattaactatcccagtaaaagatatgatattttccatagatacctccagaatttttttcagcaaatggaatggttctacagtgtttcccaatatagacagccatttgcataccatatgtaccacacacgcctaggaaataatgaatcacatgaagtgttagaactagaaagtgtcttggcgatctgtttgctccaatcacctcattttaaaattggtgctttccacaacatgcatggagaccatcttggagcatttacttttgaagcattttgtttaagaccccggataagaaaatgagggcaaaagaggtgaagtgacttgtccaagatcaacagtgaattattagttggaacgccagcctgatactcctagctatatctcactggaaaagcattggagaaaatgaaaccattttaatattctaagcttaaataatagttataataggctaggtgtggcggctcacgcctgtaatcctggcactttgggaggccgaggcgggcagatggcttgagcccaggaatttgagaccaggctgggcaacatgggaagaccgcgtctccataaaaaatacaaaatttagccggacgtggtggcacgcacctgtagttccagctactctggggctgaggcgcaaggatcacttgagcctgggaggtcaaggctgcagtgagccgagatcgtgccactgcactccaacctgggcaaccggagtgagaccctgtctgcaaataataataataataataaatagttttacaagcgttaatttatgttttaacccccaaaaggaggcactgctatgcccattttacagatgaggatattgaggcacagaataaagagcagagccagaatttgaacctagacaatcagcatttcactcattactcttatgtaggtaataccacagtgtctaaagggctcgctattaaagttgcgagtattgtgcaacttctctctgaaactgttgacactgaagttcgtgtctacttgtattcctcatcctgcttttggtgaaaaaacaaattgcttgaaatgaataatttattatctcatgctaataacttcaggcattgagatgagctgatgggtctaaagctctgaggaggaagctaaccggcctcagaatcatagaaatgggtgccagccttgttgtaaccaggtgagtttatctgctggaacaggcagtggagagtgtacagatagcatggttttacctctggcttctgataataattccagatttaacaatcctgttttagaggacgattttccctcatcccttgaattcactgccagcagggcatttttttcttttttttatgcaaataggaaaatgcatcctaaatgagggtttaaaaaattgaaaatatttaaatatacaggatggtgttaaatatgactccattatcaatctggattcagaaatggtttctgctttattttatttcattttatcttttagaaacaaggcgtcactctgtcacccaggctggagtgcagtggtgtgatcatagctcactgcagcctctacctcctgacacaagctgtcatcccgctttggcttctcaaagtgctaggattataggcgtgagccaccatgcccgaccagtttctgcttttattaaaattgttcacagttttatacattcatgttcattaaaaatgctatttagaaaagagtttgataaaataaatattatacaaaattcgaagaaaaaagaaaagagtttctgtttcagtcacaaattagggttattgtgatgtgtatttatgatgaccattgaacaaatgtgaagaatactgtgaattctatgactttatcaaaatcagccacatccaggagcttgcagttgttgaccaaatgaatgatgacatagagtagttcagatctatcatgtgctcttctatctaatcagtcaatatttccttggccctcaagccaacattcattttttatgtataaccttcttcatgattttgaaattttgatagggtaactgctaatgagttcacaaatgtagcactttaaaaggaaaataaatggagagtgaaaacaa

SEQ ID NO: 5399 - DNA, 871 bp, Homo sapiens
aggtgcgagcccagatggcgagccccaggggatggccctggctgaactggacagacagtgttcctgagaggctgggcacttagctggaaaccgcccacctccctcccgggtgagcctggagccctgcgtgcttgttctcacatctctgtcccgtcggcactggctgcatgatcgtgatgtcacacggtacaatgtcctacccacaactcctctgccgcctcccctcatgcctcaccgtgtctcaggagagaggggtgcacgtttcatggactgttaccaacaaagaaaagtcagtattatgttgttctcagacactttggcttttgttggtccttctcttaggcctgctcctggacctctttatgatattgtgatagggaaaaaaatcattgacgtcatagaatattcttcttcctctcaggagaagacggaagctggagttggacatggttcataaaagccagaaacacaaacccgtgtggactccgggagggtgactcaggtcctccttccatgtcttgagcactggctcacccagggggtgaaaaattcccgcccctgtttgcacgctttcttgcctccgtgtgtaagctccttgtacaacccagacccatcttgtattttgtggcccagaaaactgaacgattattttgttcctccgtagtccaaagggcagagttgcggaaggccgtcggggcttggtgagcaggggctgtaatacagtctgtgggctccttaccctgcagaggctgtttcagctcacacagagtcatccacacaaacccacggctcccagttgacagtcagtggaatgctcgtctccttagcgtccagggtggggattctgctggaataaagagcttcctcagtg

SEQ ID NO: 5400 - DNA, 740 bp, Homo sapiens
aaacctccttagctgcgaccacattctttcgttttgttttgttttgtttttaaacacctgcttaccccttaaatgcaatttatttacttttaccactgtcacagaaacatccacaagataccagctaggtcagggggtggggaaaacacatacaaaaaggcaagcccatgtcagggcgatcctggttcaaatgtgccatttcccgggttgatgctgccacactttgtagagagtttagcaacacagtgtgcttagtcagcgtaggaatcctcactaaagcagaagaagttccattcaaagtgccaatgatagagtcaacaggaaggttaatgttggaaacacaatcaggtgtggattggtgctactttgaacaaaaggtccccctgtggtcttttgttcaacattgtacaatgtagaactctgtccaacactaatttattttgtcttgagttttactacaagatgagactatggatcccgcatgcctgaattcactaaagccaagggtctgtaagccacgctgctcttccgagacttccattcctttctgattggcacacgtgcagctcatgacaatctgtaggataacaatcagtgtggatttccactcttttcagtccttcatgttaaagatttagacaccacatacaactggtaaaggacgttttcttgagagttttaactatatgtaaacattgtataatgatatggaataaaatgcacattgtaggacattttct

SEQ ID NO: 5401 - DNA, 688 bp, Homo sapiens
acttaagagtgaaaaaacttgggctgaattctaggcgtggagcccatgtgcagaaaatctaagactgtcctaccttcaactaatagagttgaaaacagttgctttctgcagaaatgcaaatgcaaggaattggctgaaaggctggccttgcctgcttgtttctctatatggctggaataattacgttctctttaatcacaaaacagcttttatggtagaatacttatatcaattcagcactgctccttgaaatagcaggtcctcttgtttgaactgataaataatgaggagcccccccaaaaaatgttttctatttcctgacagccatgagtcctactttaagtatgtatatatatatatatatgtgtgtgtgtgtgtgtgtgtatatattcctatcagatactcatattcctaacttctaaatatctggtatagtgtttgaaatatgattaaatgtacctatgcttgggcaaaatagcttttgaaaacaggaactcatgccagaagcccctggttgtctgaaaggtatgctttactcagtctaatggtgctgttggagtctggggagaatgtcatgctaataaatagaacactataaaaatattaagagaatgtcctaatgaagtgtgcatgaaacatgttgacaattttttatgagcaacagaaataaatcattttaaaagttctc

SEQ ID NO: 5402 - DNA, 197 bp, Homo sapiens
ataagtttctttgcttcacttctcccaagactccctcgtcgagctggatgtcccacctctctgagctctgcatttgtctattctccagctgaccctggttctctctcttagcatcctgccttagagccaggcacacactgtgctttctattgtacagaagctcttcgtttcagtgtcaaataaacactgtgtaagct

SEQ ID NO: 5403 - DNA, 250 bp, Homo sapiens
taaccttaacaccataggtgcaaaatgagttgttctgaggtttttttgaaacattaaagttccaaaacatgacatttttaagaataaatttgaaatagagtataactgaatgcagagaattatgtacctctaattgcttaattttgtaatggtcttttattgtagaattggttctttatactcagggaagtaattatattgtttttactttttgaaaaaagtgttaactcttgaaataaaatattctgat

SEQ ID NO: 5404 - DNA, 172 bp, Homo sapiens
atgaataccttctgctgtgtctagctatatcgcatcttaacactattttattaattaaaagtcaaattttctttgtttccattccaaaatcaacctgccacattttgggagcttttctacatgtctgttttctcatctgtaaagtgaaggaagtaaaacatgtttataaagt

SEQ ID NO: 5405 - DNA, 4153 bp, Homo sapiens
tgaactctttctgagagactgcagcacacctagagggccctttcctgcttctctgaaagcacaggtcacccagcctcagaatcacacctcccggctgctgctgagagcaccactgaacttagacctctcaacacagtatgccaagtggattccagcctcatggcctagcaaaagaacagactccctttttcaaacatggaagcaatgaagtggagacacatgcaggacctaactcgttttttccttgttttattacctgttgcagaagcggttatctttcttttttactttgcacatcagtgttagcctttccctatttcagcacaatcttagactcatatttgcacacttttgtgtcgtgaagttctagacaaatttgtacatgtggcaatgttaaaagagcatttacagcagaggttaatatactaaaattaaagggtatttggtctggttcatatggtcaaatattactgccttggtagcatttatttaagggctttttcttaaataagaatcattaaagtcattaaaaaaatttactgaaatgcccatcttgtcatcaaaggccacaatttctttatttcttcagattaagagctttgcctcatccccgacctgttttccagagtctgggtagctgaatgaatcactttaaaatgattacctctgcctaatctatagaaactgcatttggaaatcaccataatctcatttttccctggggtttgtatttgctattctttcccatgtttgacttaagtgtaatcactcttaagtaatatttgaacattattatctgtttctatttgtgaacttcttgagctgaaattttacgtgggctgagagatataccatttagggttttagtgcagcatctaactgtgattctgtcaataaggatatgtaatatattttttcttaggttcactccttagctggctggtttagttgtaataccaaattcctaccataatccctgtctacaaaagttaggtttagattttagtttgcggaaaccttccctatatagagacagattaacttgttgatataaatttaatagagctagctcttggtaatggtgaaaataatgagttttggttggttttatttggcagatgtttttagaaataaaagtacttagacctagtgcagcctctaggaaaagtcttgccttttcattagagaaaacaggaccaaggtttcagttttcaaacagctgttgttgattgtgtagaacccagttccatctgttttggttcattgttacagaacttagtccagtcatttgggctaaagccaaccaaaagcttagttgcctttctcaacaaacactggtactggtatacttttgtagatgaaaccatcacaaggtatttagtgttaacttgtgtgccaaattcagatcactatgtcgttgttgctctagccttcagtgtcataacacaggggggataaaacagaggggatgagggaaatgaattctgttaataattattcttcctggtatgcctgttttgcttcacaaaggctactatcatgctggatagataagaacaggagatggcagtggaaagggattgcttgttaccacagagaattctcttcaaattaagatatgtcattagaatgcttggaccagtcaatcttttgtacttatttgaaaatataggaacaatttagcagctgcaaatatgcccaagctatttttaatagatatactaaacttattgttgacaaatttcagcctccttaatttttttttttttggtaattacctataggcttaaaagtcattcgttgctgttctagtataattagtagttccgtgattgaaagtttattgtaattctactatcttcaaattagatacattttcaaaaggaaaagataattttttagaaacatcttaatattcactatttcctgaaaaaatccaagcagttaacgctttctggatggtaacaaagtaccttctaaaagataagtgctatgacaccatgtatgaatgtaattctcttagtaatttacctctgactatttggtgtcttaacgctttggtttatataatctcaggggttgtctgcaaaccaaaactgacatattctgtggttagcttttattacttttttttttaacagaatgctttgctttggttatatttcttctttcttcttttgtcttatatggattaataactagtctccatgaacttcacttgaaagagcctgtaaaagttagatgagtctaaaagtgctctttgaagtagcagcaaattgggagtatatgctctgttatatagaaataaattgtccttgctattttcttacatttagctttgctagattgtatatacattgagctaagaccttaggaaattcactttctgcatgataaaatgacccaataaatattccactttgcttaataatgtacatacagtgcattattttttctatttgtagatgaatttaatgacagataattgtctgttccccgctgaaactgaagaaatctagtttttttgtgaacatttttgtggtcttatggataaggtacatgaagatttttgcagcagtattagtggttcagtggctgcactttattaatcagtgtgttaatttttgacagtgattggactagaccttttcaaatagagtctgagggtatcagacagtgaaaatgtgctgtaactaagtagcatgtaaatcagttgattgtaaaacgtttcgctgggaacttattttagctatattttacttcagacagattatgatacaataatctacctgtgcatcagttagtaggtgctgcagggtttcttactatttacagaaacattttgtgcagtctttgttataaattttcagaagactatactctttactttgaaggtctattttttaattatacctcatttagctaactagtattctaatacctggtagaaaaacagtgagccagcctttaagcatctaacaaaatttagactctttgttttgttttgaactgaagacatcattgggaaaggtaggaaatattagtttaggatagagcatacatgtcatatccagtagcataaaaaaagtattatctccctgtctccattaataaatttagctgtgcaatataggtgcgtttttgcagaagtttctagtaagagattataactccattttacaggttctgaatgctcagagtctatattaaggcttataaagtttttcctgtgatcagtaagtgacacatttaagcagacattcttttcaagttcatgacttagattcctttacaaatttagttctcaatctttaaaaaccacatttcattatgttggttaattattataaattttaagcactcatttctgcaatcaggtttctcagaattttttttttttaaacagaagagacattcctttttccttgttacatccaaggggggcacaggggtgggtggaaaggaatgtctaaaaatgaaatcccttgatatagagggacctagacggacaggatatgctaaaataatttcaaattctagcacaattttagagtagaataagtcatttttttagactaataaaattaatggctgtcatgttcactctgaaaaaaatctaaatgactgaaatgtacagaaataaaaattagcaaacaattattctagggatattttcagattttacttcatttcttgaaatgcgtgtgccatatgcaattgcatttcttgtgccaagaaactaatagaacttatttcactttacctttttttaaaatgtgaatttagttattatagttcaattttatggccttacagatggcttttattttgtttgcagctgacactgcagttcctttcatgcaaaataccataaactgtttgatgaaaatcatgcccctaatggaaactctctagtttttccatataactatcctactgtacatgtttaaacatattttatttttgctccaatggcttaatgtgaaaagctcctgcagataagtggacctgtcatgtggttaatcttgtttaagccaattcattaactgtgtactgatactgatgctatgttttttttaaatggattttattccaggtgaactttttttttataataatgttcgtctaaaataaaaactacataatgaaaatg

SEQ ID NO: 5406 - DNA, 132 bp, Homo sapiens
cctcagggaaccagcacttcccaaaccgcagactacatctttagaggaagcacaactgtgcctttttctgaaaatccctttttctggtggaattgagaaagaaataaaactatgcagatatgcgttccattc

SEQ ID NO: 5407 - DNA, 634 bp, Homo sapiens
tacctcctccaaatcatcattcaccaaccataccagagaaacatttccagttttccacaaatacttgatacaagatttaatttcattatgcacttttcaatttcctattttggatttagttttgtcaatggtagtgacttactgaacatgggcaccaactaattttgttgttgttctaccagaaaacctcagcagatgttttgatttgctgctttagttgtaataattcaatttttataggtagttgtaagaacttagtcttatttgacttttttattttatgttaatgttttcagttctcactttgaggcacatttacatcaatgcttttgttcctctcacatgctgaaagcaagatgtgttccttattgtgaagagcgacacaactgcctgctgcctttccacagctataatggacatcaggttgactctaaatcaaggatcatgtgtgcacaatacttgtggcccacaaaatttcacaatgactgctgaggaatcattctttttgcctgtaaaatataacaaagggcatcattaagtagaccaggtaattactgcttgtctctcaaggctgctgtctttatcagcactaactaaataaatttgttggttcagttgtacttgtcctgcaaat

SEQ ID NO: 5408 - DNA, 733 bp, Homo sapiens
ccgcactcgcgattgtagaaaattcgctcccaattgttgaatgcttacataaactgcatagttacccatattttctactgttctcataagggaaaaagaaatgatttggaagaaaaaaaaagcctcaaactaaacaaaaacaaaaccagcagccctggctaagcttttgataatggaaccattataagctgacaagctagatttttcacctgttggatttgctggacatgagcacaagcctaggcttccaatttgaatttcagggctgtagtcactgatgtgtcacatttagtgaaggctctcggccccccggcagccgcctggtcctgggtcactggggagaattctgggtgggtggaagaggcgaggagcactgtgatgggcgctgttcacactccggctccacccagcgccagctgcgacaaagccctttacccctcccaggccaggtgtttcttctgtgtgaaagaggagcttgatccctactcacaggttccttaattcattgctcaaatagggaaacggcaaggaaaaagacaaattctgttctcatgaagcttaccttctagtgggggaagagacaacaggtaactggtatataagagggtagaagggccaggtgcggtggctcaatgcctgtaatcccagcactttaggaggccaagatgggcgattcacgaggtcaggagatcgagaccatcctggctaacaaggtgaaacccccgtctgtact

SEQ ID NO: 5409 - DNA, 6614 bp, Homo sapiens
tggaccaaggaccccagagcccacctgtgtgacgctgcctttttatacactgtcctcctccaccttgatggacccctagtgatgcatcctgcctaggctggacttaaccccttcctccctgtccccacgaccaactgtccccagttactctaaccgttatttcatttagcttccatatatattttcttacctaagagaatagtttcctgctttaagcaaaagacctacaataggtggtggaattatgggatggggtggagtattgatataaatatataaatacaaatgtatatttttcaggatgtggtttaggaactgggaataacgttttctgttactcctgatggtgccatgaaaaggttatgtaataaaatattttaaaatcaggtcacatgactcagaatgttggtggtttttgcttaggctggggagcagttgggaatcaggtctggaatactcctaaccaagaagttgcccaggtatagtaagtttttctctaccgttcacaagttttgtgctgctgcttccctctggaaatggggtttctttctctccgcctacctcagctacctgttctgagggtctcaatctgtttcgtattcccacttctttagggaaggagttttaaaaacatctcttaaaataagaggagcaaaatctattaaaacctattctcctgcaaaggaggcagagactttctctctctcttttttttttttttttggtgtccctatcattaagcaagagcctttctcttttattcttcctgcttccctaagctgctcagggttctctgagtcttgccctctgatggcaagtcttatatataactaaacctatttttgtcacccatcaaaacacatcctcagtagactgtgtgaaggtgtgaaggtctgataatgacttgatgctttgtctccatagacatgaaagccatgccctctgcctctagatagggtgatccaagagctcctgaaccttaggaggttcaaagaagctctactgtctgtgcccaggaggtagcctgccagcaagagccctcaggagttgcacacacagccaaagggtgttcacacagatctctgccggtctagccaggggaggccagagtctcgtcagtcaaggatgggcttcccccttagctgtgtccacagctgctcaagctatactggtcagagtgggctttgaagctcctttgtgagctcgagctgctgactgccactatgggagccttgccacctccagcccctccatcccaaagacgctcctgccactggggccccaggtcctgctgtatcagttctctttggtggggggctaaggtttggggcgaggcaacctgagacaagaaaacgcagtaaacattctgattccctgtacacagatgcagcaccaggggaagggccagtggtgcaagtatttctttttaacaggtgaagtttttggaaaaagtcactctccctacccctcagtatccttaccatcaactttggttttatccttccagtctttattatatgcttgcttttacatagttgtaataatatacacataaagtattttgtatcctgcttttatcattcaacattgtacatgttataagcattttactatattgttatatatcttcacaaagttgatctgtaaagctgtgtaatttgaaggcatccatagggtgactgtaccataattttgattcatcccttgttgttggattcttggtcaggggttgtttgttttgttttattggtaactttaaaattttgaatacaatttcagatttacagaaaagttgcaggaatatcacaaagaactcctatatatcttttatccagatttactgagtgtttacattttatcccatttgccttatctatatttcatgttgcattttcttaatcatttgagaataatttgcacagataccccattatgcccaaaacagtatgcatttccctaagaacaggacattctcttctaagagaagaagagaattactttaagcattattcagtatttttttaagtattattatcaaaatcaggaagtttaacagtgatttaatactgttatctaacccatgattcatatttaaattttgccatttatcccaataatgtcctttgtagccattcttttaccttgtgcaggatcatgttacatttgtaaacgtgtgtctctcaatactgcagattcctcaactttcttttgtctttcattaccatgacatttttgaagaatacaggctattttgtcgaatgttcctcagtttggatttgtgtgatggttccgcatgactaggtgagggttttgcattctgggtgggaatatcacagaagcagtgtgtcgtcagtgcgtcgtaatcagcatataatgtcagttggtcccattaatgttgttaactctgttcaccgcttaggttggtgtctgccagatttcattttaaatttacgatttcctctttgtaatttacaagtaatttgtggggagatactttgagactatataagtattttgttcctcattcaccagttatatagtatcagttgattagtcttgtcccagttattactgtcatgattgaccaacatgatttcctaactccataatgccttctacatttattggttgacattctacatacaaagaaaaacatcctttctcaccatttatttattcacttgtttatcaatatggatgcagggattcctgttttactcagagttgcaagccattgctttgattttatcttgattctcaaattgtcccagatttatagcggcctcttgtgtgtttgtagcttgctcccatcatgttttgagtactttcttaccttctggcataacaagatgttccaggctcatcttgaatgttccctaccctagccctggaatcagccatttctccagggagtcttggttccttataatggagaatggtatttatttatttttatttgatttgattattattactatttttgagacagagtctcgctcttgtcgcccaggctggattgcaatggcacaatctcagctcactgcaacctccacctaccaggttcaagcaattctcctgcctcagccttccaagtagctgggattacaggtgcctgcccccacacccagctaatttttgcatttttggtagaaatgggggttttaccatgttggggaggctggtctcgaactcctgacctcaggtgatctgcccacctcaacctcccaaagtgctgggattacaggtgtgagccaccatacccagccagagaatgttatttagaaaccaagatctgggtgccaaatgtgctgcttgttactggaatgtcattgcctctaggctctcaccatacagtgcaaagagatgatagatagatagatagatagatagatagatagatagatagatgatagatatagatagatagatagattgattgatttgtagaaacaagataggttagagatacctgacataaatagatactaaaaatcatgaattcacactgatgctttgagaccagccctgtaggtttattccagtctgcccccttttccatgttgttaactctttcctccagagagacaaagatttcaggttgctttgttaagttccatctaatgatcattctgacgtaagtctgtttttcttatttccttggaatgatgtctcctctggtttcagaacttcctcctctgcttcctgtatcctgaggctggcggggccagttgtctttagggcttgtgcatttttgtaaagagcttgcacgtgtggaaatcaagtaggccagtagtgggttaggggtactgagccagaagcctctacaaggaataacaggagcacaaaggaagaaggtggtattccagctggggacccaggagggaggactttgtggagaacctgatgcttgaactgagtctaaaaggtgtaaaagtgtttgttgcttctgcctccctgtctgtctggcagggtgaggtaggcgcatctagggaaatgtcaagtggcttggtgtagggtaaagtcagtgaggcccatggagaaaaacgagcaggagccacatcacatgggtgtctgataggacctgggaggcgctttccacattaccattgtcgcttcgtgatctggacacaccagaaggcgtgagactggaggcaggaagagcagccaggcttatccctaccctcaggagagctgaaaagggcaggtatggtggggccagagctcaggagagtttcggaaccactgagatcggtccttgatttgatgagaggcttgaggggagagggaggtagctaggatgccccgcaagcttctggcccagacactgggcagacaatgaaaccctttgtaacacatgaggcaataggtttggggcagatgggaggggaagcagtggtgggggcagtgagtgctgaaggtgttttaagaagcggctctgggccaggcacagtggcttatgcctgtattcctagcattttgggaggccgaggtgggagaatcacttgagcccaagaatttgagaccagcctggggaatatagtgagaccctgtccctacaaaaataaaaacaactagctgggtgtgtggtggtgcatgcctgtaggcccagctacgcgggaacatcacctgagcccaggaggttgaggttgcagtgagctacagttgcgccactgcactccagcctaggtgacagagcaagatcttgtctcaaaaaaaaaagcagctctggatgggaagggaggccagttgctttaagtaggggagatagagttaaaggaggctttgttttatttaaaggtgggacaaacttaagcatgttaataaaattcagagaagagaaagagaatgactatcagagccatgtttggaagaaaatggggtccagagcacaggaaggggacctgtgttcagagggtgcctcactgctgaggccacaggaaagaatctgtaggtggaggggaggccgaagaggggaagtttcatgcttgataattaaaattttctgagataggaatgtcatatttacctatttaagccaagtttttttagataaaaggtatggaacctgctttccccttggctagttcagcgtttgggctccggagtgctgaagatgaggactggacttcgagctggtgtgatcccagtattcagtgtcagtactcagtgacaaaataaatgagagaaacgggaataagaattgtcgcctacacaaaaataccagcaactgttaactcttcccagaagattttcattctgaatgctcctgtagctaggaaccctaaaaagtctttgaagcaactcaagttttaaaaaaggggaggaactcctggaaatctcaggatggggccaagatgtggctggagagtgtgtggtgatggagggcgtgtcttttgccgagcacactcagggcccacgggaagcccatagacttcaaggacatcaagccccaaggtggtgggattttccccaccagtacttggcagcctagggggaaggggagggcgggagaagataatggggatccctggctccaaacataggaggacacatctgtgctacagtgcgcacatgcctggatgtacactctgtctttggagacactggctaagattctctgctccatgtttggacagggtcgtgcctgatctgagataaatggacaagaacaactgaagcctgtcttctggtgcatgtgtcacctgccgataactgcatcttgtgataaagttgggtgatttacagtctccaccaaatgctaaactctggggtcttacgcctttataactccatgggccccagcaaaggttcaggctcaaaacaggtgtcaaatagataactgttgaatgattgttccccagttgcaggctctgccacctggcgttcatactgtctgtgaaaggacccagctcacctttccctctttatctcccagtccttcccaacagcgccgacacctcatggaaactgattgcaaatgtgctacttctcacttctgtgtggcccgaggaggctgggttaatgctgggcttggtaccttaagcaccctttctcccttccccatcttcattctcagaattacacctgtctgaagcaggcattttccaatgccctagatgggaatataagtgtaaggagatgtgaagcatttgcctgtgtgtcagaacattcactgaggatcctcataggcacttctagaaaccaaatccttgaagatgactaaccagaaatgcccgtcatagcactgtttacagttgcaaaaactgaagccaattgaaatgtccatcaggaggggattaaatgaattatggtacagttacaccgttgaatattttacagccattgaagatgatatatagctatattcattgacaaggaaaactcatattttttagtgaaaaaagcaggttatagaattgcatgatattcacatttatataaaactttatatatgggaaggatgttgattgaattgttaataactatggtcacctctagagatggaagtttgcattacctttaatttttaataccattttgtattgcttaaaatttgtatgtattatcgttaaaataagaaaaatcaaataaagctattttcattatgggaaaac

SEQ ID NO: 5410 - DNA, 2973 bp, Homo sapiens
tcagtccagaggcctttggctgcctcctaagaaagtcatgtgcctctgtcctatgaactccatataaggctgggtcctcctttggcctggacccaggacttaattacccagtgcccagttgtgccacattcccactcaaggctcagaacttggctcgcattggtagctggaggtggtagaatttgtatgctcttagagcccaacagccaaggcagggtcaagaagataagtaataaaagaggaagtcagccaggcgcggtggctcatgcctgtaatcccagcactttgggaggccaagatgggtggatcacctgaagtcaggagttcgagaccagcctgaccaccatggagaaaccccgtctctactaaaaatacaaaattagccgggcattgtggtggtgcatgcctgtaatcccagctactcgggaagctgaggtaggagaatctcttttttttttttttttttttttttgagacggagtttcactcttgttgcccaggctggaatgcaatggcacgatctcggctcacggcaacccccgcttcccgggttcaagcaattctcctgcctcagcctctcgagtagctgggattacaggcatccgccaccatgcccggctaatttttgtatttttaatagagatgggtttcaccacgttggccaggctggtcttgtactcctgacgtcaggtgatccacccgcctcggcttcccaaagtgctgggattacgggcgtgagccaccgtgctcggcccaaggcaggagaatctcttgaagccaggaggcggaagttgtggtgagccgagatcgcgccactgcactccagcctgggcaacaagagtgaaactccgtctcaaaataaataaataataaaggaagaagtcagctgggtgcagaggctcatgcctgtaatcccaatactttaggaggccaaggcaggaggatgcttgggtctggaagtttgagaccagccagcgcaacatagtgagacctgtctctaccaaaaaaaaaaaaaaaaaaaaaaaatcaatttagaggtaggctatgaaaaagtacagatacatcccttaacatagactggagggtggtggcaaggggagcaaatgtggaggcccagtagctggcaaagtttagaagcagggggcaaaagctcctgcctgacttttcctgggtagctcctgggtcaaaatttcaggcaggatcccagggaaggggcaggcacccattgccacaggagagttgcaggcatgttgggatgtaggcctaggggaggtgctgcaggctcaagaaccaggcccacacattatatattaaaaaaaaaaaaacccacatttttttttattggtcagtgttggtaggagtttgttacaaaagtgagtccatgggcctgtggaatgtgaggggagtgggtccgctccaccagatgccagcaccggggccagtgcagctcagagccctgtggcggactacagggcctgcacagacggtcactcaaagaaagatgtccctgtgccctactccttggcgatggcaaagggcttctccacctcgatcttgccgcagtctgcgatgatcacatccttcaggggtttatcccggctgtctgtcttggtgctctccaccttccgcaccacctcctggaaaagaaaggtggaagcaggagggcatggtggatcaggaggtccaccgctcaggagaaaggccccagcgtatggctcaggagggctaagacccacaagtgatcaacagcacacaaaactggaggcaccaaaattctaacagactcctggccagagcagggagaatgcagatttgacgagggggtacaggaattttgttcctttgaagtaagacccaggttgggccaagggtgaggaggaggaagagggtgaccagggcatgtggcttctcagggacattgcgttcagctgcactctgtatacctcaggggtgggaccagcacgtcactgagtgaaggaggggagggaggctctggcagttgtgcagccttcctggctgggctctgagggggctggaagaatttagaaccttggaggcatggaggtacagggtttattctggacaggagcactgggctgcatctgtgggttgggtccttttgggaaagggatggacacatggagctcctgccctggggtctgtgttgaatccccggtgaggattgcccagtagtagcccttgcttccacaactcaccatgccctctagaactttgccaaacaccacatgcttgccatctagccaggctgtcttgactgtcgtgatgaagaactgggagccgttggtgtctttgcctgcgttggccatgctcacccagccaggcccgtagtgcttcagtttgaagttctcatcggggaagcgctcaccgtagatgctctttcctgggaaaaaagacagagcaggtcaggggcgctggattgcgccaaaccaagcagacattcggggccaggactgagggggcttaacctgtcctctgtgccaggctaggctggagtggactacaaggacataaaagcagcgtccttcctatcttctggcctcagagccaagccatgctgactgaggccaagtggggcatcaggccaggctgatgtggtgaacagctcacagaaggattactttgagaagatagttttgtggcttttaaataaggcgcatgttatcagctccccttagctatggcccaggcctgccacggagggactttggtggagggaagtgccgtgcaggatgcaggggagtcaacagggtcggaactctccagaaaaggaggactgctgtggctgaccagcctgttttcctatgagcacaaaagacacaggcatagctgcagaggagaaagcagccagagatgtgtggggaggggcagaaaagaggggctgccccttggattctggagagtcaaagcctcttaacaaggaatgaacaggaataaaagacagctgtgagtgtg

SEQ ID NO: 5411 - DNA, 237 bp, Homo sapiens
cccaggagaaaaggaactatacagcatagtggagttttgtgtactaaaattgctatctactggtcctttggaattgaagtagtagaaacctaaaggcttggcgtcaggcttgaatatctcagaacttaaactcttaccaaaatctgtatatttttcttaaggagtgggattcctactttatgtaatggggtcgaaatctttgaacacattatttataaaaacctgtttaaaaattct

SEQ ID NO: 5412 - DNA, 4374 bp, Homo sapiens
acaccaagtgcccggataaagtcagcttcacgggcccggactggcttacccaaggaggtgctgaaggtgccgtttagacatcagttaaatggtgttgatcatcctgtttgccgtttccaccatgactgaaggcagacccttggctatctcacctccaccagacctccggactacctgaccctacctcttcctcaggagctggagagctggtacttagcaaaaatatttattctctcagccacagttatgactattgtggcctctgtggagatgaaggcacgggaagcaaccaggggaacatggcctcagcccagagaagccactgctctgttccccaagcccttggtctgctgctggagcagtaccagcccccccgcccaccagggagggacccccacccccaagcactgggtaaggtctgaagacagcacagcagccatacccctcaccatcattaccaccatcaccagattctgcatctccctagtgctttgcaccctgggaattggcagcatgtggaggaactagaatctcaggaaagaaattgggggttgttttctacataattgtgaaaacaaggtcttcaaatgtggagacttctccccatttacatgagcacatataaacgctcacaacctagcctggaaaggaagaccaaggcatctgccccaacatggccttgagctgcctgtgaggcagggggcaggggttccaacaccagcacagggctccccagggacactgggagcaagctggtgctggagcatgaatgacgtctgtgaagtagaacctgcgtccccactaagtcctgctgcttcttattccccaactccttgcccttttcccttccctcctaaccccttggtgcctttcccagggggatccccacactggtcttgcctcttcttttccactgcttggctcttaagcctcaggcagataaactagtattccccccagcttggggaaccttggagtctgccaggtcaccttagggcaaggcccagaaggcagcccctgggagcacccagcagttcttggagatgtcctgtcatctagccatctgatatcttcctcatttgaggccacagatatatacagcccaattcctctgtctacaagtacatgattttatatagctcagtctataacctccatgtgggccaatataagctgtgtttcttggtaacacatattttgtttgaggggccactggccatgggaggttatttgttccttagaccctggaataacacatccaagccattacttattagagtctcagaatgtactcagtggagctgtgctttgaggcagccaacatttctctgctctccttagaaatgcagtctcccaatggaagctttatactctttgtactgggaaagtgaggatgatttggtagctttattggggtcatgtcttccccaaggtgtggggagcttagcttacttggcttttgaggtatcatccctctgttctcccctcctatctttccatgaccctctggattgagagagagagataaagactgacagacaccagtgtaggctggaaaagggagtgtgtgaccagagtgccaaaagtgactaggagcaggaacttggctccgactcagtttggaaaatgggaaataggggacagtaagcacaatgcccagtagtagttgatttccaaggaccctggaaccctacacttgagaggcttagggtcaccatctgctcaagaggatcccctctgatctacaggccttttccctaggtttctgcctcctcgtttttgttcaagttgggttctgagtcctccccaaaaaccattgttttagacctcttggcagggccccaaaacagcctccctcatacccatcattccctctgccttctgctgccctcatgggcagtgctctgagcagtgacctccctttcctccgtggaagtagctagtgcagacaccgtcatcccaccccacctgagtcaccccaaccaagagggtgactgaatttcagcctgattatgccctcctggggctcctgtgaggtggagccaaggttccctctctgttcctgtttgtttttaaatattgttgtgtgttttgtatctgtggcactggcctgcagcatactctgtatatattgtaaagaaaccgttaggagtaattttcttttgcattgggcaggcatggccctgcattcctgccctttccactcattctgtaacacagaggacgaacttctgtattagctgggcagccttgggttctccagaagagaacaggtttttcttttcctttttaatttttcttcttaaacatttggctctttgatcctcatatccaagtctcccctgaagagtaggagctgctcagaagagcaggtgaaagccaccatggcagatcctgatgcctgccgggcctagtcttccctctgaaataacatgaagcagcagctgtggagattcttgacaagtgctgagtgaaagatttgctgcccacctctacatggggaggagaaacacaggtgggagctacctgtggcatccatgacctagtcagagggatgagatgctcagcaggggtccccatcctatcccaccccacaaacaaaggctggaaaaatttgctaccaagggccaagaccaccagaccaagcctgtttatgagccacccctgcccaggccctcacagacattgctcacggggcttcccatagaggagaagctaaagagggagggggcctcatccccagatagatcaggcaaggcttggagagctgctctttaggatccacatcaactacttcctcattttaaggtatggcagttcccttcatccccttttcctgccttgtacatgtacatgtatgaaatttccttctcttaccgaactctctccacacatcacaaggtcaaagaaccacacgcttagaagggtaagagggcaccctatgaaatgaaatggtgatttcttgagtctcttttttccacgtttaaggggccatggcaggacttagagttgcgagttaagactgcagagggctagagaattatttcatacaggctttgaggccacccatgtcacttatcccgtataccctctcaccatccccttgtctactctgatgcccccaagatgcaactgggcagctagttggccccataattctgggcctttgttgtttgttttaattacttgggcatcccaggaagctttccagtgatctcctaccatgggcccccctcctgggatcaagcccctcccaggccctgtccccagcccctcctgccccagcccacccgcttgccttggtgctcagccctcccattgggagcaggttggggcgagctggaggcccgggctggaggggcagtgttgctgttcatagattttgttccattggcgttgctctgttgaatttaatttcagtcttcctgattcttcccttctgtaaagtgtacattaccaagttccttgtttttttatatatatatataaatatatatatatacaaactgtactctttttgcctttgtacattcaggcaagaagagaaaataaatctttttaagagacaatcacaaatctgtgagggctgctggttatttctcctggagtttgctgctgagctgcctcttccttcctcccaattttcctgttctccctcagctctcctgatcttcctggccctgctccatatgcatcctcagcttcactttccctggctgatggcaagctgttgaatccagtgtccagactacctgccttgtaacccttttctgcccagcattgttttctggcttggccactggcttagcccaggagctttactctgtgccctggcctcccctctcttcacctttagatttccattcaccgaagtggctttggacccctgggtactctgggacctgtttcctggaggccctggcttgggacactcacctgtgaaactatgcagctgggagctctctgcctaagagtttgcactatttaaacctgcctgggagttaggacggatggttttaggaatgaccggaaaactacccctaaaactcccccgacattccagcctctagaatgctctgatccagagctcagtggatgattcccagctggtggactcctgtggctaccccatcagaacaagggctaagggtttatgggtcaagagtatttgatcagaattttaaagggtggtatactctgaaacacagcccaaccaaaccattgtttggccgctttctcttttcctctaccttcctcatccccacttttttccctttctctctacttcctcttcttaattggctttggaattgaaatatatttttaaattatttgttgtatttattgaataaagtttttaatgtccctgttctt

SEQ ID NO: 5413 - DNA, 2112 bp, Homo sapiens
ggccttctgggccagaggcaccatcccttctggccatccatcaagtccatcaaggcccagccctgctgagaaatgtgcttctgcttctacagcaatggctgcaggagggccattgggcatgtcagggtttggccatgacccgaagagactcctggcgtccttcctactctgctctggccagtggtgccaggtgccacccagggctactgcctggctatctggcctggcctctgggctggggctggggctgggagcacacacgctgggacctatgtgtttgtgtggtcgttccaaactgccccagggctttgggggcggcacttggggtttctgggaatgacatcatctctgttccccatccccagtagtttacattcctgacttctgaatacagcacagctgagccccctgcagctcccatctccagctattcctaggcaaagagcctcatggctaaggcagcctcaaagccagcccctcctcccacctattctgagtagctgcagaggccttgggtccaggctctaggttcatccctcagttggggggaacgtaggacccagctggagcctcttgagggagatgagaggcctctttgtgaggaggacattagctgtgtggcctctctctctttggccctgtttccttttttgcaaaacaaggacattttctgcagccccttcctctcagtgagctatgattggagggcttaggtctggaggattcaagagtggaagaggaatttaaggggtcccctagtctagtctctgcccctggatagtgtccagccttgtatatttctgaagaggtggatcccagagtggctctgatgtccacattagaaaaacttacttgtaatgatcatgtcagccttcagaagagaatccccaccaacttctgtgcctcctcagatggggatttatctggatctctgtggttccttctcagccgaaacaggtccagtatcccagtcatttcttcaaatgctgataggggtatgttggaatccgaagccacttccccgccttcaagccccagatgggctgctctcctgtaactttctaggagaagagacattttcttctttccctttcctggtccatccctgcaccctggtcctctcccagcctctcccccacattgtccctgactctaggggcacatccagtctccatcgtgctgcagcagctggactgagggcagagcctgtaggtgcagaggccctggctcccgaggtccagccactctccctggggcctctggggtgagagcagcttccgataggacctgcccagatttctgcatgtgcacttttgtttactgaaagagagaaaggggggggtcacagcaacatgccctggcctttctgctctgttccccaaccccactgaggcctgctgcacaggtcaatgccttcgttatcgttattgtactgtcactttgttcttgaggtagtagtcaaggatcaggaggggcagatgtcttctctgggctgcgtggggccggagcagaggtgagcagcaatgcactggttcgggagcccccatcagcctccttgtgcaaactgggcccccatgccacagtctggctttccctccatctgccccaggacaagagcaagaaggacatcagttgcccagtcatgtgatcccctgccatcttgccttaggaacagccttcccccaccagcagccatggctggctggggctttagccaagccacctactgccaggaattggagcctcagttccctcctgtgtcaagtagctaactgcagcagctggactgagggcagagtctgtgggtgcagagaccctgcatgtaggtcacaggttgaggcccagccactctccctggggcctggtgggtaggcaagtagctctggggccacctcaagtgaccaaatgctattaatttccatcctttagcaggctgggccctaggcaggaagctggcttctgggagaggagtgagaacgtgcagggcctgcctagcttgcgtgcttgaggaaggtggcattccgtgcttgcctccttgaggagggtggcattctgtgtcttctgcttatgaagcgcctttcttaaagtttggcaataaatccatttttatgg

SEQ ID NO: 5414 - DNA, 1512 bp, Homo sapiens
ctgggattacaggtgcatgccatcacagctggctaatttttgtatttttagtagagatggggtttggccatgatggccaggctggaaaattgaaacataatttcacaattattcctttttccaccttaaataataagagtagaatactttctgtgtttttatcttatacacatgaataaatgctatggcttatcacagttacaatgtgttttctgaaagtaaagattattttaccttgaaattacaaaaattattttcagttttccaaaattctatcatctttaaacctaaataattcaatttcatggatgcacaaatgtttattgagagtctcatattcatgcttttcttcacagcactataaagttggacttggaaaatttggacagccatttgccattgtaatttttattcttttttctcctgattatttgacaaaacttgtatccacattgtagctgttcatgtgtctgcttctattgcatattgtaaaattattaactacttcccaaaatagtatttctctcagcagatatttctttggtactaccatgtattgtgtaacttttgggaaagtaaggtggcttccctgctctcagtgaagcattttattaaaagaataattataattaaaaaaacacgatacagatcagtgcatatagtatattactaatagtatgctgttaattgtgtaagaaagaaaggaaattagaaaacatatttgcataaataaaagctagacaaaggctaagaaactaatcaggtggtttccctggggtagtaggataatggggaacagtggggctgggaccgggtgggagaaagagttctcagtggttcctttctatacagttttaacttttgaaatgtgtgagagtgttacttactgaaaactgaaaggatatgacatgctggaacaggcaaaactacaaagacagtaaaaagatcagtgatttccaggagctgcaagggcagtgagaggaagggagggatgaggaggtggagtgcaggggatgttagggcagtgaaaggttctgtatgacactgtgatggtgggtacatgacattgggcattggtcaaaacccatagcatgtacagcacaaagcgtttgctctaatgtgagctatggactttagttaatagtaacgtgtcaatattggttcatcagttgtatcaaatgtaccacactgatgccagatgttaataatcggggaaactgtgtgtgctgaagagtacgtgggagctctctgtgctatctgctcaatttttctctaaacctaaaactgttctaaaatagaaagtctgtgaaaaaaaacaaaagtaaagttataaaaggaaaagaaaacagaggctttaaattaaatcatctattccttgggaaaggtattttgtaccatatgggactgaaatcatttctctggatgaattttataaaatgaattttgtaatttttttctgagaaaaaaaagttcttaaatacaataaaattgaaatgttgaaatatatctctc

SEQ ID NO: 5415 - DNA, 36 bp, Homo sapiens
tgagggttcagagaagccccatcctaagccagacac

SEQ ID NO: 5416 - DNA, 1974 bp, Homo sapiens
aaagaaagatttagatggcttcttgccagtttgagcctaatctgattcttacagttttaccttcttgaaccaatgtaaaagtttttttaatgttaaatgattaaattctcagtgaggctatcttccttttccccagtaacattcctgaatttactgttatcttattgtagtacttgcatgacatggattcctgatatctgatgagaggttcattcttgtgtattcagttaatgacaccaaaaggctcagcccaccccaaccctatctcatgttcagtctgtctaatacatgccagagatttttttttcaaaaagtgctttatccctacaatgtactgacagttcttacagttgagatttgttcttttcagctattgcttgtgaaaaaaagcaagactatgtcactctatagaaggctgttaaagtgactcaggcaggaattaattattctgtacctaaggggttacttgtttaatgggatggcattgactttttgaaaatcaagtggactgagtcattgataaaacatttctaagagtggggctagagaacatactttacatctgacatcctttggcctaacaacatctattattatagtgctcagcagtgtgggcattgaagaggcgcagaatgctttgaaagaaactaatcagaatcttggaacatcatgatcatgccattcttaagtaaatcaactattttcaacactgaagaaaaatgaaacattatttagaaaacaatgagattacaagttccaaactcagccaggaatgtggctcacacctgtaatcccagcactttgggacacctaggtgggagcatcgcttgaagccaggagttcaagaccagcttgggcaacgtagtgagacccctatctctacaaaaaataaaaaaattagctgggtgtgatggcacacacctgttgtcccagctactcaagaagctgagatgggaggatcctgagctcaggaggtcaaggctgcagtgagccgagattgtgccactgcactgcagctggggtgacagtgcaagaccctgtctcaaaccaaaccaaaccacacacacacaaacacacatacacacacacacacacgaggtccaaatggtagcagggatccaaagggaacacagtatgtaggtcaaactggcagtaacagtgtacagcctttgacaaactagaaatattagagtaggccaaacacacctccaaactgtaaggctgtgcacaaacataaaaaatggcagccttccatctcctgcactggctgagtccatttacttgtgtacttgttctagtgagtggtgggactgtacatttttgaatagacctcaaaaatacttcattctgctgctgttcagttggctttttaaacctgtctgcagtaggacactgaaaacagcaagaacttcggggtgaacacccgctgatcctttaacaaggatttctggcaggaaactcacaaaaaggagaactgaaaatttagacatacagttggccattgtaaaaaacatcagtttcctctcatacattccaagtaaaccaagtaaaataagtgttggagtaacacttgcataaaagaatttaaggagtgatagctctttctgttctgccattcccaacattcctgggggaaaggagactcaatgagttaatactatttcactgagcccaagatggaaacttggtttgacctaaaacatctgattaatataggctagctgatttcttaaaaattcgttgcattgaaggatattttgcatgtctgtaacacctgtcaatacttgtttgtattgatttctgatattcttgcagctgactacgtgtaattgggcagatcagctttgcagtagattatgctgcatcctcgtggcaaaattctgtattcttagtgattgttacaaacccctttattgctgtctgagaaagtgaaagattgtgtatttctattaaaacatttacaatcaaaattct

SEQ ID NO: 5417 - DNA, 2180 bp, Homo sapiens
atcagtcactcttgctcacaatgggcatggatcagaagaccatgcagaagttactgtatctcttgtgaccctaatgaaagaatgtatatgatcctggaaagtgaactgggtgacctaggacctctgatatgaatgtgatctgagactaaagtttgtccttggaaacacctgcagctcattgtggattaagaacctcacccctggaggggtggagtttctacccctgactcatgcagacatctattacatggaggcagtagaaggacccctggagccagagggttttctaaatgagataactgggggcaaaggttgggataggcgcagcagctataagacaagctcctacgctcactgttccctgatcattccaaaggctgctggcccaaaagatgcagatgtggtctacatctcagccttcctgacctctgccccaaacacacgctgcaattttgtctcctccttttctgttcaaattgtgaggttctatcaggtttgtaatcactgtagcttcagttattggtgagtctaaggatccaaggctacagaaaaaaaagaaatataacaggaattaatgatcattccacgttttgtagcccactgcatctggatatataccagtattttctttttttttttttttgagacagagtttggctcttgttgcccaggctggtgtgcaatggcgtgatctcggcacaccacaaccttcacctccccggttcaagcaattctcctgcctcagcctgaagtcgtgatctgcccgcctcggcctcccaaagtgctgggattacaggcgtcagccaccgcgcctggcctataccagtattttctagtttaaaggaggactacattaactcttattgttgtgtttctgaaaagtgaaatttaaaaagcagcctgaaaaataaaaatttataatttgcccttgaattggaaggaatggagattagggaaggaaaactactctagaggccatttaaaagtatgtatttattagaacatgcaaattcatgttgtctccatcagtggtcaccttgagggattagacattctaatggaatgtcctggctccaccctccagcatgttctcacccaacaatgacagttgagtggagtgggaagggaagtcattctaaagagtccaaagtcagtagcgccacatctggtttataaagtaagagatccagtgggacaatgctatttttgtatgccaacctagataggattataaagcaagactgatttcttctgtggtttatgaatggatcttaaggtaattacaaaagggaaattccaagaatgcataacacaatgacaacatggtgagaaaagtgcagtactacttccaaggtagctagtgtaaaggacacttgagtttttaaaactgtggttaaatgttttatgtggaatttgatgagtttgtatattaaataccactgcttgctgcttttactagaatcaagttaagggacacgttagaaatagaacagcttaatatcactggcttcagagcaaaatgagctcgggtgactgcagattatgatggtaaatatggctttaattacaaacatgaggaatgattcactgaagatgaaaagataggacggatgtgatatgaaaaaaacccaaacattttggcattgaatgatggctaaggtgttccaagtattccatcttttaagatgaattgcttaattaattgcctcgctaccccaggattctcattctttggaaataatttttattaaatttcaataaactgtgaatcccaatggtattttactttacaacatggatgggctcatccttatctttaggtcatttggtcagaatcctcccgagaagactgatgaagagtatggaatcatgttccaattctatattcttaattatccttattcctgatgctactgcattgctgggtttccatagccaaggcctaagaacaggaggagaaggcaatgcttgtgggagggaggtcccaataccaaaattctgggcactaacctggtgtctgcagcccgttcccgttagcctcggggatgtcacctcacccacagcctgggatctgacgttcttcctcagactggagtaaggagtgatggaccgtaaaatgctgtgtaatgataaaaggctgaaatatccactgaatgattaaaaccaactctaataatctg

SEQ ID NO: 5418 - DNA, 1613 bp, Homo sapiens
ggcatttctcttctcccctagaaggctgtgtatagtccatttcccaggtctgagatttaaatatatttgtaattcttgtgtcacttttgtgttttattacttcatacttatgaatttttccatgtcctaagtcttttgattttagctttataaaatcatccacttgtcccgaatgactgcagctttttttcatgctatggcttcactagccttagtttaataaactgaatgtttggattcctcagttattgtttacttttcatcatggaagcctgtcactgtatgtaggacataatagaacttgatcacttgaagctcagacctattggtcttgatcaaatcaaactaagaagaccttagaaataagctaccattttgccacagagcagcttataggtaatacactcttctctcagtgcagtgtacatttccacaaatctaagaattgccctataaacatagcaggattttgagagcttgaaaattttccattattctggacatgaatttctaaaatgccttaataggtttatgtagttgagtaaattttgttttttaatttttgtaagcatcaaagttgattagagaggggggcactttttctggagaattctcttagtaaacacaaaagattgttacggtttcattagtagtatggttgtggggccataagttaaacagtgctgcctggtaggctgggaactgaagagacttgtggtattccatctcgggtgcctctgttggcaatgatcaggcagcccaaaagatttaaatgatctataataatttccaagcggtagattatgtggcattttattgctcaggcaataattggtttaatgctggtagtgtcaaattttgaagtgttaattttgtcttagaaccttccagtaagtgaaatacaacctagttttatcaccatatccaccagcaggcatggataattattttaacaatgctaatatttgagttttgcagtatattatagaatatagtccagttaaatctttggtttcagtatgtctgaagagtacagtgagaggttaatttctgctcaagtggtaccacttaaaggcatgtattcttttagtatgtaaaatgaaatagtaccttgagtttaaatagaatgcatttaggcattgtagagatctgaaatagttttcttccactacattgttgaaatcaatgaagcaattagtttctcattcagaaatgtgcacactaatatttagttttgctttctcgtggataatattaagcacttactctgcagtttcctggaagttgtgtcaactgcagtgatactattcaggatggtgggaaatccccaaaaatatgtatgtgtgggcttgcttagattactatatttcatagttaatcttttgtctcttgcggtgctcatgatgtgtggggcacacggaaggcattgctgtagtcagtcattttggttttcttctatagccattttattattttagtgtattagttatgaagataatattatctatttgtaaattgctactttgtattttatgcatgctctgtaatttgatttttttttagttattgatttggattatattcacattctaataaacagttatagggggatt

SEQ ID NO: 5419 - DNA, 585 bp, Homo sapiens
gaggctcttacttcactaagagctgtcatatgtgaatgttttacagtcttttcaaacttaacatttaatgtgtgtcactcagtgctctagtcgatcaggactgggtagctatttcgcatatatgtaaaatgttctcagccgggcacggtggctcacgcctgtaaccccagcactttgggaggctgaggcgggcggatcacgaggtcaggagattgagaccatcctggctaacacggtgaaacccagtctctactaaaaatacaaaaattagcccggcgtggtggcatgcgcctgtagtcccagctacttgggaggctgaagcaggagaattgcctgaacccaggaagaggaggttgcagtgagccgagatcgcaccactgcattccagcctgggcaacagagcgagactccatctcaaaaaaaaaaaaaaaaaaaaaaaaagttctctcattcattaaagttgcattaaataaagtataattaggtcactatggaaacagagttttcagtaatgagtggacagtaagtggtggctctgcagatggcccctttctaataagtttaataaacccgaaattactggtt

SEQ ID NO: 5420 - DNA, 928 bp, Homo sapiens
gtgtttgggaagcaacaaagagcgagtcccctgcccggtggtttgccatgtcgcttttgggcctccttcccatgcctgtctctgttcagatgtgcatttcacctgtgacaaaggatgaagaacacagcatgtgccaagattctactcttgtcatttttaatattactgtctttattcttattactattattgttcccctaagtggattggctttgtgcttggggctatttgtgtgtatgctgatgatcaaaacctgtgccaggctgaattacagtgaaattttggtgaatgtgggtagtcattcttacaattgcactgctgttcctgctccatgactggctgtctgcctgtattttcgggattctttgacatttggtggtactttattcttgctgggcatactttctctctaggagggagccttgtgagatccttcacaggcagtgcatgtgaagcatgctttgctgctatgaaaatgagcatcagagagtgtacatcatgttattttattattattatttgcttttcatgtagaactcagcagttgacatccaaatctagccagagcccttcactgccatgatagctggggcttcaccagtctgtctactgtggtgatctgtagacttctggttgtatttctatatttattttcagtatactgtgtgggatacttagtggtatgtctctttaagttttgattaatgtttcttaaatggaattattttgaatgtcacaaattgatcaagatattaaaatgtcggatttatctttccccatatccaagtaccaatgctgttgtaaacaacgtgtatagtgcctaaaattgtatgaaaatccttttaaccattttaacctagatgtttaacaaatctaatctcttattctaataaatatactatgaaataaaaaaaaaaggatgaaagct

SEQ ID NO: 5421 - DNA, 1128 bp, Homo sapiens
cacaagccaaaaagagaaagagaaaaaaaggtaattattgtagaacctgaaaacagcaatgtatggaaaccctcaaagcagaaaagggaggaagatcctgaagattctcttatgaagctccaaaattgataatcctgtctcagctctgcctcctcaggaggagcattagtagaacagcagtgatgaggacacagagggagcagacagtgggtaccacgatctccgtaaccatttgcatgtgacttagcaagggctctgaaatgacaaagagaacgagcaccacaaatgagaacaggatcattttagtaaatacagctttatcccaaaagctttaactgtattgggaaaacttaaaaaatagcatcctcaaattttctgattcttatttgccatgaaatagaacttagtaaattaaatgttatttgaaaatgttataagagctttgtaaatatttcagaaaatatgggataaatgcctgaatttggttcttctacaggtgctataataaagtccatctctcaatacttatactttctaaattcatctcagaatattagcagccatattccacagttcctataatttttactgggggggatttgtgataggaaagtccttgggaaacatttccaatctttcaaaatattattgtgtatcttaagaagtataggaacttgtatgttgaaatgttgtatggtagttcttgtatagttaaataataatctttttaagagttaatgataagcatatgttatgtgcattattaataaaatagtggccacttaggtaatacccacttttatcttgtgtgctgggtactctggttactgagataaataaggcactggacatcctcacgtggagttcacaggctcatcagtgaattctgtaccacatttcaaccttgtttattttagtttaatggaatatacattcttagtattgcctgattatttaaatttgttgagggggattgcatgttgctttattggcctgtaaaaatagctagtttggtaagatttggtctcgcaccttccatctttgctaccacattaaagatgagcttgttaaaaaggaaagcatatttctctgattgcccttatggagaaataaagataaaattcaaag

SEQ ID NO: 5422 - DNA, 452 bp, Homo sapiens
tggcggccccggcgggaggggcgggtgggaggccgcggccaccgccacctgccggcctcgagaggggccgatgcccagagacacagcccccacggacaaaaccccccagatatcatctacctagatttaatataaagttttatatattatatggaaatatatattatacttgtaattatggagtcatttttacaatgtaattatttatgtatggtgcaatgtgtgtatatggacaaaacaagaaagacgcactttggcttataattctttcaatacagatatattttctttctcttcctccttcctcttccttactttttatatatatatataaagaaaatgatacagcagagctaggtggaaaagcctgggtttggtgtatggtttttgagatattaatgcccagacaaaaagctaataccagtcactcgataataaagtattcgcattat

SEQ ID NO: 5423 - DNA, 4658 bp, Homo sapiens
agacatcaagtatggtaggggagggcaggcttggggaaaatggccatgcaggaggtggagaaaattggaactctactcaacccattgttgtcaaggaagaagaaatctttctccctcaactgaaggggtgcacccacctgttttctgaaacacacgagcaaacccagaggtggatgttatgaacagctgtgtctgccaaacacatttaccctttggccccactttgaagggcaagaaatggcgtctgctctggtggcttaagtgagcagaacaggtagtattacaccaccggccccctccccccagactctttttttgagtgacagctttctgggatgtcacagtccaaccagaaacacccctctgtctaggactgcagtgtggagttcaccttggaagggcgttctaggtaggaagagcccgcagggccatgcagacctcatgcccagctctctgacgcttgtgacagtgcctcttccagtgaacattcccagcccagccccgccccgccccgccccaccactccagcagaccttgccccttgtgagctggatagacttgggatggggagggagggagttttgtctgtctccctcccctctcagaacatactgattgggaggtgcgtgttcagcagaacctgcacacaggacagcgggaaaaatcgatgagcgccacctctttaaaaactcacttacgtttgtcctttttcactttgaaaagttggaaggatctgctgaggcccagtgcatatgcaatgtatagtgtctattatcacattaatctcaaagagattcgaatgacggtaagtgttctcatgaagcaggaggcccttgtcgtgggatggcatttggtctcaggcagcaccacactgggtgcgtctccagtcatctgtaagagcttgctccagattctgatgcatacggctatattggtttatgtagtcagttgcattcattaaatcaactttatcatatgctcttttaaatgtttggtttatatattttctttaaaaatcctgggctggcacattgactgggaaacctgagtgagacccagcaactgcttctctcccttctctctcctgaggtgaagcttttccaggttttgttgaagagatacctgccagcacttctgcaagctgaaatttacagaagcaaattcaccagaagggaaacatctcaggccaacataggcaaatgaaaagggctattaaaatatttttacacctttgaaaattgcaggcttggtacaaagaggtctgtcatcttccccctgggatataagatgatctagctcccggtagaggatcaccggtgacaactatagcagttgtattgtgtaacaagtactgctcccagcagcaattagggagaaaactagtctaaattatttcaactggaaaaaagaaaaaagagtcctcttcttttcccagccttttgcagaacacagtagacagaactgccaccttcaattggtactttattctttgctgctgtttttgtataaaatgacctatcccacgtttttgcatgaatttatagcaggaaaaatcaagggatttcctatggaagtcctgctttattccaggtgaagggaaggaagtgtatatacttttggcaagtcatacagctcaaatgtgatgagatttctgatgttagagggagatggagaggcttcctgatgcctcatctgcagggtcctgtgcctctgaagttctagccatgaggtttccaggtaggacagctgctccccaagcctcctgaggacacaggaagagacggaaggagcaccttgacagacttgtgtgagtcttctcgaaggagggttgactcagaacccagagacaatacaaaacccctcacttcctctgagagggccaaatgctgtgagtctgaagtatgtgcctggtgtgaaatgatctatggcctgtttcttacacaggaagccccctgaacctcctgtacatgtgttcatgttcccagccagctctgagacccaggaaccaaatattccattttggcttctgctagagcagtcatggttcctctcctaaaagccatgggcagcagtttccgagggcctgcatgatccacctgctgcacgatcctatgagggcttcctgtggcacacagccctctgggtgcttgggaactagcttcaggcacagcctgattctggtgatccagtgatctatggaagtcgtgtcttactccaggtgaagggggaaaaaaaaagcctatactttggcaggttatgaactttgaatgtgatgaaatgacacgtttggctgcatttggatggtgtcttagaaccctcattgctcagacctgaaggctacttctaggagcatgaagtttgagttttgtgtttttccaaaggatacttccttggccctttttctttattgactagaccaccagaggaggatgtgtgggattgtaggcaaacccacctgtggcatcactgaaaataaatttgatcatacctaagaggttaggaaatggtgccattcccaccttagagtgctacataggtgctttgggcgtatgtaacattagtgtccttccttgaagccacaagctagttttcttagttttaaaatcctgttgtatgaatggcatttgtatattaaaacacttttttaaaggacagttgaaaagggcaagaggaaaccagggcagttctagaggagtgctggtgactggatagcagttttaagtggcgttcacctagtcaacacgaccgcgtgtgttgcccctgccctgggctccccgccatgacatcttcaccttgcagcttgtgctgagactgacccaagtgcagctagcactgggacacagatccttgtcttcagcaccttccaaggagccaacttttattccctttcctctctcccctccccacctcgcttcttcccaatttagtaacttagatgcttccagcacatacgtaggtagctaccccagccggtttggattacaggcctgtgctggaacatcatctcagttggccaccttcctggcaggctgtagacctgacattttgagacaagcctagaggagtcaggagcagggactttgactcttaggaagagcacacatgagggcaaggctgctggcagacgtctccattgtccttatgttgtctgtgttgtatttttttttttttattgaccatggtgattatttttttaaaccatcgttaatatactgaagtgagctatagcacatatcatgtgcttagtttgtttatttttctccatctccccttggcttcctagagtttggacatattccaggctaaatgcttttactcaagactacagaaaggtttgaagtagtgtgtgcatggcatgcacgtatgtaagtaatctggggaagaagcaaagatctgtttcattcttagcctcaggcctcatgagggtctccacagggccggagctcaggttacaccactccttcgtccttacaggagatgtagggagaagaatctgcaggctgcttgtaggactgttcaccaagggggataccagcagcaagagagtgcacccgtttagccctggaccctgtttcttactgtgtgacttggctagagttgggagttcccccaaaataaacgtgtccccattttaccagaaccaaacctcaacacagcgaagctgtactgtctttgtgtggcaaagatgttcccttgtaggcccctttcaggtaaccgtcttcacaatgtattttcatcacagtttaaggagcatcagccgcttctcaagtgggtagggaaagcagaaaaacgtacgcaagaggacatggatccaaaatgatgatgaagcatctcccatggggaggtgatggtggggagatgatgggctaaacaggcaacttttcaaaaacacagctatcatagaaaagaaacttgcctcatgtaaactggattgagaaattctcagtgattctgcaatggatttttttttaatgcagaagtaatgtatactctagtattctggtgtttttatatttatgtaataatttcttaaaaccattcagacagataactatttaattttttttaagaaagttggaaaggtctctcctcccaaggacagtggctggaagagttggggcacagccagttctgaatgttggtggagggtgtagtggctttttggctcagcatccagaaacaccaaaccaggctggctaaacaagtggccgcgtgtaaaaacagacagctctgagtcaaatctgggcccttccacaagggtcctctgaaccaagccccactcccttgctaggggtgaaagcattacagagagatggagccatctatccaagaagccttcactcaccttcactgctgctgttgcaactcggctgttctggactctgatgtgtgtggagggatggggaatagaacattgactgtgttgattaccttcactattcggccagcctgaccttttaataactttgtaaaaagcatgtatgtatttatagtgttttagatttttctaacttttatatcttaaaagcagagcacctgtttaagcattgtacccctattgttaaagatttgtgtcctctcattccctctcttcctcttgtaagtgcccttctaataaacttttcatggaaaagctcctgtgccaggagctcagtctg

SEQ ID NO: 5424 - DNA, 1169 bp, Homo sapiens
accaccattgctgatattgaaactattctaagagtaacaaaggaaaacaaaatgagatttgaagaggagcaacagtccaaagatgataaaaacctctctaaacccaagaaatgatcctggaatacagtacataacaatttggatcccagtctggaataaaaagggcaatttttttttctgttagaaataaaagccaggggaaattggtttgctttgtgtgctaggaggtgaatcagaacagattataatgaaatgctctttttaaaacattgtttattaagtgatcttattttatttattaaaccaaaacttatttgtgttttcatttgagagtgttgaacaatcccttcttcttctcaaactcagaaaaaagtaatctgataaaagaagaaagttaaaagtcttactgatatcacctccgcatttacttcctcataggcctcaggattatgtagcttttattttttatgttttataaagttttctcctatttctaatagtccatcgatcttctgcatttataggtttgaataaaggcttaagaattgctatttgtcaaaacacaaatgcctttttttcaaagcttcaaattatattgaaattatatttatatgaatttttaagtgactatcattcatcgtgtttttgttataccaagccactattgtctgctattgttgccatttttcaaaaagtaggataagccagcatctagttaaccaaagcatcagaatgtatctaggtggcagtatctgctcttagtttaagatggagtgtagctcgagctctgtagcttgaataaacatttgtattctctagttctccatttaatacagcagtaggattttttcaagtttagttcaacattatactacctttaaaaaggcagactgttaagattgtagtagtgctgactctaactttcagcattcacttcataattgtccaaaaatatttccacatcagtgagctttactgaagggtgaaataaaagcaaattacaacaccaaaaccattattgttttaaagaatgacctttatgtctataaaaatattttagtgtattggggaaaggaataggatttttacctgtggaatttcaataatttgttaactgtgattcagccacaggctaagagtttctgtaataaaattaacatttgtgtgtg

SEQ ID NO: 5425 - DNA, 363 bp, Homo sapiens
ggctgccgcagggcactgaaagcccaggaccagtaaccaaggagaacaacccacccgtcgcccttctccgtatgctgcctgcgccagaagagctttgctgggccctggcttccctgccctcgccttcacctctgtcagcaggtggccttgcctggggagccccatgtgtggcccaccccaccaggccatccccataccttctggtttgaaggcgctgacactggcagagaggtaaagggtggggcattgagaatggaggctcccagggtccctgcccacttctgttttcctaatgtttttctctataaagggtcaggcccgtcagcatcactgatgggaataaaagtattaatgctttgtgac

SEQ ID NO: 5426 - DNA, 229 bp, Homo sapiens
ttcccaggccctgctgctcccatccccaccccagatcgaatgaacttggcagaaagaagagaactttgtgctctgttttaccttactctgtttagaaaagtatacaagcgtgttttttttcctttttttagggaaaaaattaaaagaaatgtacagagaacaaaactatattttcagttttacttttgtatataaatctaagactgcctgtgtgataaaacacttgttt

SEQ ID NO: 5427 - DNA, 59 bp, Homo sapiens
gtgactggatatgtaaagtcgtttaatgtggtgctaaaaagtaaaggacttttaatcac

SEQ ID NO: 5428 - DNA, 1831 bp, Homo sapiens
ctccccagctgggctgttttctaagccgatctctccgtcgtttctactcatcccttaacttctcccttaccagtgaccccagagacagagccaggacaggagtgggggccagcctgaggacccccgcctaccacctcgagaactggaagccaacctctaacctcctgacctcatgctaataaaagtccccagcttctggagaccccctgccggcagcccctttccctgccaccccaggagccaggcttcccctcagctgggtgaagactacagactccctggggttggcaggggctccatctcagtggaccaggaagcaagaggggaagcgggatcccagctagacttagaacttggacttttcccctgtgaagggggctgccaggacatctcagcactcccgcctggagctctcagcatcactgaaggtaccacagtgtaagtgctggactgcaggctgcagtgatccctctttcgtcccaccccctcttccctcagcagccccggaagcctgcctcacccgacgaggacagcgagcggcccggctcctttctgtctcttcccttcccaccctcttgtcttcagggaattcagaggattgctctccaaggccataatgaccccttgccttccccatgattctctacaaagctcttgcacacccttttcccattcaatttgtgagccaggcagggtagggattagtgtccccctttgacaaatgacagaactgagggttgcaatggggaaatgacttataaagtcacccagcaggtcaacaatgggcccacgaccaagaccctgggtgttcagaccccaaggccagggcctttcccgctgcatcaagatgccaatccctttgtgggcttcaccagtgcccaagtctctatggagaatgagaactggaagccactgctaccgtctacccagcaccagtagtgccgatgtgccacactgcccagttgaggcccctcacgctctgtgcccctagatccttcaggtccccaccctcagctgtcaccaccaccctccccaggggactccatctgagatgaggcctcgtcctcctggaagctgaggctgagaagggtggagcttggccctggggaaggcagaccagggtctgatggcttctagggatgctctgcgtgtgtctcagcaccgctatctcagccactttcagccttatgcacgtagaatgaccacagccactcgcatccgtatagcactttaaagtttctgcagtcctttgacacataggatctcatggagcctcacgtctactcccttctgcagatgaggaaaccgagagaagtggcccaaggtcacgcaactctgagatgccacatttcatttgatcttgtacacattttcttttattccttcttttttcctcctttcatttcccactacgcacaaagagtttataaacactgttctcagaagagtcacagtttggggtgagatctggaaatcaagaaatgggtgtccactcttttctttcattagctaggatctactagatgcattatactccatacctgcttttcccatggccgccctacggaaaatcccatccacagaggccagggctacccaagcccctccaggtgagctgggcctttcctttatgaacctccatcctcccagccagctacagtagggcctcctcaccccgtaccccacagctagacagtgtcagcactcatctcctcctcccacatttctggagcttttttttttccttccccattgacctttgtggtcttctgtgattatttatgctgcctcccaaggatagaattgaaataaaatgttttcaacttatcaa

SEQ ID NO: 5429 - DNA, 222 bp, Homo sapiens
acaataatataaaaattttaaacctacttgatattccataacaaagctgatttaagcaaactgcattttttcacaggagaaataatcatattcgtaatttcaaaagttgtataaaaatattttctattgtagttcaaatgtgccaacatctttatgtgtcatgtgttatgaacaattttcatatgcactaaaaacctaatttaaaataaaattttggttcag

SEQ ID NO: 5430 - DNA, 37 bp, Homo sapiens
cctcacctctccaagctctgccccaagtccacaccat

SEQ ID NO: 5431 - DNA, 2961 bp, Homo sapiens
agctcacaaccaaaactgcacttcagcctctgctgtacacagaaactacaggctctgtctcaggagagcataggcacattttaaaaggttatgtactaggtttttgtggattctatcaaagtgataagtgatccttaaaaccagccttctaaaataattgcattccatgggttgggtatttagaaatgtaggtggcatttagaacacaatgtttaatcaatgggctgaacaaagatgcttcactttgccttgcccatcaccctatacagtttcgcagatagtctagtcactctatgtgagaaagataatggtaagtagttgctactggccaactgtctagcacttacctgaaaacttagtatggagctcttttaaaatgtgattatttatatttatgttgaaagcggactttaaaaaaaataatgtgctgtaacacagtaaatatgtacttgtagcctggatagcagactgtgttcaactttttaaaaagatgtttcctttctaaagattaatttcttgggagcaaatgagtatttgttgcatttgttcaatttgttgtatatggtgaatatttaattatggttttcttgaaacgtgtaaattaaaaacacaatcagtgttcaggcttcagttatataatgtaagcacaactaaaatgaaacttgttgactgcacaagaaattacaaaaatgtttctgttttgaaacttgatctacaatcagtaaaagtttgataatcagtatatcccttcccaacccccattgtgacagtttctttttgtcactgtctagaattttgtattttatttcagactataccttggagttttgtatattttgagagagatatttttgggacattattttggaaacttattacaaatctaaatttggaaaggagctagtagctttaaggccaccaccatattttacttttttaggatttttccccctttaaataaaaatattagatcaaatactatatgcaagaaatcatagcaaagtttttttttcctaccaagatcattcttgatcatcagcttcccaaactagtaagtctgtgcatcattgggtgtttttttttaatttaattttaaattatcccagctattagatagaagggatgttactgcacttatgtgtaatcagatctttatttaggtatacatatcctcctataccgcacataaatagatttcagagcccccatacaatgggcagtgtctgctatagggcttcaggcattaaataaaaccgagggttgttgattttgctgtgacagtacactaaatcaatactatatcttatacagtttgaaaatatgataccctacactttcaggggaccgagtctgacaaacacaatacatttatctgtgacctatatcaagtacacatttaggagccaggtaggttacctgcttacacactatattttaattgaattcaaactatcaagcactacttagaaactggaaaacatatatatgttagcatcaaagggggcagaagcaaagaagatacagatctgcactgaagacattagactggccatagaaaagtaagcttgaactcccaattgatgtgaccacactcttcttaattttgttcacagtaaaaacacttttttgagttattaggcttacccctagcttttgacctttgcatttcatatatgttagatgtctcagcaagaatatctggtctcccctaatttttattcccagtgccgatgttcaaaataaactttctccagtctgggaaccttttttacttccccatatttgttattatttagaatggttcatacgtctgctttgtttgcatactggtcttcagattatgagactcgatgataacagtatggtactgcttctgtgacaaatatcgtgccttaacaatgtggctgtccttttccactgaagaaggaaagacgttttgatctagaaatagcgttgtgatttccttgctgttggttttacactgccttccacattgcaacagcaagttgatttcttgtgatcccagaattttctaagaggatgagttgaatctatagcagcattgtcagtacagaccagtggttctcaaactttaaaatgcctcagcatcacttgggagcttattgaaatgcagatcccagagtcagtaaatctgcctgtgaagtatgatagtctgcatttgtaatgagcattcaagtgattctgatgcaggtgagctgggggcatacagggaggaacactgccctggactatccattgcatttttgcctctaaacaactacagaattttctagggttttaaattatgtaaaatgtttacttattctgagcttagagagaatggggagggtatttttaaattttattgttttatttctttaagtttttctttgctttaagattataggtattaggtttgtttttgtttttccacttatcttgagttcactttgatgttaaatctattgctacttcagttgtaaaaccagccaaaagtttctggatgaaggtcaagtttgaccttttaggagttattgtacataaaggcttcatccacgaaccatccagcgcacagaagcaagtgcaaaaatgacacaagcacaactctccagacgtggctccttctcctttctcagtgcagactctcactgaaagctgctattttcatcctccttgtggttgcttttcttgtttctcttccattgtacatgtgggttatataccatatgttaaatatgcaataaagtgtttacaggatgcccttctgaagggtagtcctttgtaaagctgtacagactttgcagtttaagcacaatgtgcacatgttagttttatatacagcaaaacttgattttttgcagatggaaaggtattttgtttctatacaaagtaaatggattgtttgtgcttaatgtaaagccgctttataaaactgtaaaataaagtttttttcttaaaaag

SEQ ID NO: 5432 - DNA, 2883 bp, Homo sapiens
ctcagaccataagcttttcatgccagatgtcaacattaagctgcaacatcctaaccaccataagccggaggtggttacagcttatcatggcctaaaatattcataatggttggtgtcttttgaatgaattcatgtcaaaaatgttattcagctggggaaatttctctaaatgtacactgattctgtgtgtgtgattttaaaaggagaatatggttcaagcaagtccttgttaaggcaaactattgatatttcattaattttaaatttacttaaaatgtggttttaaattctatttaaacatttggattaagcatattactctggagctttgtattattctttaaaaatgaatcttgcttcatttgatgaatttcatgtcacaaagcttctctcaagagctctcgtagtggcctgtcaaccactttcggagaatgagccaggtcagtcactgggaggacctgtgaaagaaagttggtcactgagtgccttggggactggcaaaacattccagaatgaagagagctgtctggggagagcccttcttcccttctccacctagtgaagggagaacagaaggggagtcctctcttcccacaagtccattctgccttcaaagtgtaagttctcatgtcattatggatttggagtttgtcagtttttttcttaaaagtccacagcggggtgtcatgtgttctgttatgttctgttttctggttgccagtttgatctgcaaagtatttttcagtgcaggtaaaatgtgttaaaccataagagttgactgagttaatcccaattggttgtgctcatatgccaccttttaaaccaatggaaattgctatatttggggatgtcatacatttgatattgcttcagcatttcaaatatgttgcaaaatttagtatccatatgcataagaagttaatcaccttgccagtggggtggtcacatatagtgttctcaagctttactgtgaatcagaaacatccagtaagcttgtgacaaatgcagactcctagggaaaaccagggggttctgcttcactaggttaaatgtaggttttgtagaggagatctgcactggagcaagtctcccagatgattctaatacaggagggccagaggccaaacttgaagaactgctggtgttacatgttccaaaaggcattagacctatcagctttgtttcgcctgatctcaagttttagcaactcaccaactaaggcgtaacctcattttatgttccagcgttttctactctgaatagttctaaaacactgagcattttctcatttgttgcattactgattaaagttcagtatttcatggtgttttcagggaacacagaaatgcggatgcaaaacaacttttgacagaggcccatcaaacccagatctgcacttggtaatgacttaggggggcttcctcacaatgcaggatcctctttgctgactcaggaatactccatattttagactactgcctctaccattaactagcccagacatttgaatggccttgtaaacagctcactgtctaatactcgaaggacaagtaacaatttatattggatgagagtggtcaagaaatatgatttcgttagttttattatctgtttacttcctctggggaaggcagactgataaaattatatgggctggtaaatttttggtacattaattgcaagctgcatgacaaaatttgtttttctggcaacaatctgacattattagtggaattccacaccaacagggcttgtgagcttccatttcatcttactgtaacttcaattttatggcaaaaaaaggtacaaagtttaaatacccctttctagtaatgccaaagacatacagtgttttacattctctcctttataggtaacaaaataatgtttagctcagtaagtactgaaataatgagtgaccaatttgaaggatttttagattatttaatctttgcttatgttgctttttcacatgcttaatgatggaaatgaaatgttaaatcaacaaaataagatccagtgtttcataacatttttataagtttggtaaactttagtcccattatatacttttggggacagtgttataaatcagaattttacgacagtttgcagaacactgatttgaaagcttcctatgcaaaatgagaaggggttcaaatatattaattatcattaagtattaaataataggcattagatgtctaatgtgagtataatttcatccaagccatctcagaaagtctaaaaggttggcagggggtcagctgaagacctcactggagtgggtcttaatttttaaaaagtgtctcactacatttaagacatgtgacacattcccattggtaacaattgctcaccatggcattgtctcaaaaaagactatggtggggagggtggcacattcctaatgggatgtacctctccccactccccttgcttgagaagcactactcaaaaatttaccagaccttacaactgtgataaaacttgaatgtgtatgatgaataaggccattcagttaactttacctccctttacccattgaaggggttccttttccattgctcagtttttagaaaataattctcatcttttttctaaagaaatgaatttgtggctggtctgaaggtagtgagttagctcaattgattgttcgcagtcagttatagatcaagctccttgttctactcttcccctcttctcactactgcacttgactagtcttaaaacaaagaaagaacgaatgaatgaatgaatctgtggctggatgcagtggctcatgcctgtaatcccagcactttgggaggctgaagtgggaggactgcttgggcccaagaattcaggaccagtctgggcaacagagccagacactgtctctat

SEQ ID NO: 5433 - DNA, 613 bp, Homo sapiens
actgacagtcccagtactgaaagaacattttcatttgtgtggatgatttctcgaaagccatgccagaagcagtcttccaggtcatcttgtagaactccagctttgttgaaaatcacggacctcagctacatcatacactgacccagagcaaagctttccctatggttccaaagacaactagtattcaacaaaccttgtatagtatatgttttgccatatttaatattaatagcagaggaagactccttttttcatcactgtatgaattttttataatgtttttttaaaatatatttcatgtatacttataaactaattcacacaagtgtttgtcttagatgattaaggaagactatatctagatcatgtctgattttttattgtgacttctccagccctggtctgaatttcttaaggttttataaacaaatgctgctatttattagctgcaagaatgcactttagaactatttgacaattcagactttcaaaataaagatgtaaatgactggccaataataaccattttaggaaggtgttttgaattctgtatgtatatattcactttctgacatttagatatgccaaaagaattaaaatcaaaagcactaag

SEQ ID NO: 5434 - DNA, 38 bp, Homo sapiens
acctcttttataacatgttcaataaaaagctgaacttt

SEQ ID NO: 5435 - DNA, 483 bp, Homo sapiens
aaatggcctttagttacagttgattttggcagttttattttttgaaggttgaaaatatgcaggttatacatgttaaaacaacaacaacactatcctataaactagaaagactagtataaaagcattattgcccactgttctcatagctaaaagttaagaaggaaggaaggaaagcaggagaaaggaaggattaattgcctgtatgtgaggaccaaacaacctttgggaactaaacagttttcagagatggcgtggcactgcatccttggttcttgctttgattggtgccctgctatagcccaaagcacgtagtatttgctgatgattcagcatgagctgcatctacctacttttagctgataattttcagttatttccctttttattttatgtcatgatttcaaagccaaaaatatgttctttttatgagtgaagaataaacttactaacaaattagtcaaaataaagtatgtttgcctcctt

SEQ ID NO: 5436 - DNA, 6009 bp, Homo sapiens
cactcctgcacccccatcagtagggcagcatcactgccttcccgggggcttcagcagtgcgcctggctggctgctgctccaccacgggccccctggcccaggcgctgccaaccaacttagtcaccacccctgcctccggtgaatgcaccccgtggtacccaggggctttttacacaagatgtttgaaagccacagtcagtcctttaagcatcaccatgtactgatgatcccctccttggacctggcatctgctaatggtgccctttgaaagtcaagcagtgggaagtacatggagctctcagccctgctcccatctggcaccttcaagtcagcagatgggccactgactgagcactgccccgtccctggtgctactggtctttctaaacttagcaccctggagagtccaaggaggcagcgcccccaacccagcgccccactaagccttgctgacacgcgtgcatccctctgtgacctcagcccagatgtgcctgttttcattctcaaagacattagactgttttcctgccctatgacacagatagctcacatgaatattgtgctttatttagcaggtgtactcacagatactagctccttagcagctcacaacatcccagaatgggaggcagggggtgactcattatccccattttactgacagggaaactgaggctcaacttaagtaattgacctgccaggtatattcacccatccagtggaagagctgagtccccgccccagtcatctaccagtatccagcctggggcctgtacttagatgtgaaaggtgctgcttcatttctgaccaagagactgagaagtttcccagaatgcaaacaaagcccaggcccctgaaatctttccggtcaagcctttatcccagcactcagttgttttggatgtctgttcctacttgcccttacccccaaagttacagatcctagttacaggactctgccagctttgttaaactgtccgtgagacaagaaagccattggggaaaccaggtgattgcctgaaattcttactccgttccaagtgctgttcctcccaggaaatcaaaggccagggtccttatggccgtggagccttcccgaccacagagccaacttgtgaagcacacagctctgcagcctgggctctgccctgcctcagccgcctcccccacgctcttcaccacgttcctggagagtccggccaacctgtcccagccgaaacactgctgtattagaaaaagtctctttctggtctttctggttttgtttatgaatttccctctgtggccacaaattcctcccctcccccatgactcacagtccatatggcccacccccagacttgagcaccaagctctgcattaatgcagttggcctgcgacaaggagctgtggacccttccccatctcttccaattcactttccccaactatccagttccagaggccgcaggcctggaaggatgcagtgcatattgaaaggtggaccctctgaaaacagttaagaggaatatatgtatgttttacccattaagaaaaaatggcaagctaaacaaatgttaaacttacagaaaatttgtcttatggtcctgagcatatttcccttttagagcaagcctggattcttagcaaagtgtttcccccatttgctcttttagctgacaaatctgccactgtgatgatggtttgcagcttttggaagcagtatggcaacctggcctgacatgctctttaggcttccactaacctggggctttcagaaattctatttggcctttctgtgggtagctttccagcttctcttctagggagccccaggcatcatttcccaaaagcatccccatctcctgattctcttggaactcctacagataagcatcctggcagaggcccaggctcccaaaccgacaaagtgaaaagagaccagagaggccaagcatattgactggtgctgttcagggcctgctcttttccactcaccacttgttttgctgcttgtcacgaggagagttgttcctgtatgtggctgctctcagatctttccaagcaagccagtcatttgaagaggttttcttttcatgctggagggcaggctaagatcaatgagtggaagagagaaaggctgttttagctcaagttaaaggaacaccttctagccatcaaagccgcccaacagaggcaagggccaccacacatgagagagcgctctgtccttaaagggaattctctgttgagtgggaggtgaacaccctggttcttccaactcaggaattctcgtggctgggctgggtcagtgatggctttgtctctttatgtctaaagtgccctatggctgctgaaggttacctaaccattctttaaaaggagaatgaccctccatgggaatggccagcctgccaactgtgcaattgaagaagacccgatggatcaaccccatgtctcccttggggagaaagtgcataaaccaggggtctctttttttttttcaacaaaccattgagctgttcttggagttcatctctggagaggttatacattattagaagtttgattattattatagtttgatcaatttatttgtcttagagatccaatttttactaattccctagttttttatttcagcatctgaatgtctttctccctagcacagtgcatacaatcagggccttgggtatttccagtgataactttccttggagaggatctaagaaaagcccagatttcggtagccatctccctccaaatatgtctctttctgctttcttagtgcccattatttccccctctcctttcttctgtcactgccatctccttcttggtcttcccattgttctttaactggccgtaatgtggaattgatatttacattttgatacggtttttttcttggcctgtgtacgggattgcctcatttcctgctctgaattttaaaattagatattaaagctgtcatatggtttcctcacaaaagtcaacaaagtccaaacaaaaatagtttgccgttttactttcatccattgaaaaaggaaattgtgcctcttgcagcctaggcaaaggacatttagtactatcgattctttccaccctcacgatgacttgcggttctctctgtagaaaagggatggcctaagaaatacaactaaaaaaacaaacaaaaacaccaaaagaaaaaaaaaagccatttaaagccagccactagagggagtcagttcagttccgtaaaggtatgctcagtgcccgctgcctgcaagctgttggggaccccagggagggcaaggcagcctgtccccgcccccagggaactagaacatgacaagaattctccgcactgtgcctacctgtccctttaccttacctctctggcccagagttcttggagggttttttctttattttcttatgtactcatctacttattctcaaagtatttagcattcaacactctttttgctttaaaaagaatggccttacaaagggacagaaaagagaagacacgagcttggtgtattttcatcaagttatgtggcagagaaatccagatattaccaggacctgtctaaacaaatgttgtgggttttcttttcattcggatagccactttatagttggaatatcaattctaatgaggaggaagacataaatataagtggtaaaaagaaacatgacttcccttaaaacaggctggataatctatatcagccttgtgggtggagactagtatttgatccttgccatataaaacattttaatatggtttacatgggaaaatatcgatggcttcctcacaaaatgtatgggtgacgtgaagttgaagagccaatggcttgggtgacacgtgctggatccaaaaagatcagggagactagaataaaacttggatgttaaaaattcaccaggaatccacataaagtactatatttgggctaaaatgaaaaactaaatacaaggtgggagagaggcaagaatttcagttgactaagctcagtgtgagtcaaagtgggatggaaccatgcaaaaacaaaacccacagacatgcaggctacgtgaggagaaaacagtggtgaggatcacatcacattgtgtttgcatttgccggaaccatactttaagaagaaaaccgatcatctataataacatcagtttatcaatgccccgtcctgatgaagtgtgcagactctcagaaacagcaggaaggacttcatgagaaccctcaggctggagaaggcactagggcacaaggagagctctcctaggaccaggaccaagaagctacaggcaggcacagtttagctcctgcagagacccagcttttcacaagttggagccttccagagatagagggactgtggtaggtggtgacccacccatcactggaggtggaagcagaggccgtttgccagggatgctggagaggggattcaagcatctggctgggcaacgtgatgctcagggccgtctccactcagggcttaggggagtctgtgagtagaagagctttaggtgatttgtttggtgggggaaggcaagtacacagctatgcactttccgtttctgacttttgccaccctgtcagccatggggagcccactgtgggactgaaaccctgagctgaatgcggcctcatgtctcagagaaacactggcaagttggtcagagccgccgtctgcatcgaggcgtagctgagcggcaggatggggggctgcctgcccagggtctctcaccgtggtgtaagcagagccatggcttgcctaggaccctatagataccatcactctttctcagctcgactggagtttctgcacctttgcaggggcaaagtaactccctgcaccctgaaccaccccccattcctgttcatttcagcagataatgatggagggggggggtgtccatcgtgctgagggtgtgaccgcaagagggtgaaaacttccagccaactttctcagtcctttctcttgcgagagggaagccacctgctatacaaactaataccccctgccttgaccccttccccacgactcagttgacagaaggatatactttgttataacttattattttgttctctgtaaatacaagatgtttataggaaatatgtattctgaactctatctgcagaatgagtcactacaccaaaatagttctattatttagaatgtgttaattttaaagggacctgataggtatttatttacatatgcgatccacatttgtgtgaaagcatgtgatcatactaacccagcctcctggaatgtcgctgtacgatgattgatgtctttttctcagtccatagttacaattgtttagtatgctaatcagtccagttccctgaggtttaagatcaaatataaattactctgcttttcgactcattcaggtagcattgtacctgaacctgattgctactttttcatcttaaatattatatttcctcatctaatctgccttcccctcatccacagacatttggagaaggaaatgggagggtgtctgttatccctttctctttgctttgtccccgttgttagactggcagcgtcagttgctcggtgggcttggttagagccgtgggtgaggcaggtggctggcggggacagggagaggctgagagggaagtggtggcatttactgctctgacacttccactgtccctgctggggatgctggggccaaggcctgtggggcctgtgaactgcacagccaggagcaaggaacccactaaatactccgtcacctccatgtcccctctacagtgttaaattattacataagcaggtgaaaggtagaaggcgaattatgtgagtaaatatggtctgttttctcttcagcaaaaatgactatttttgtgtgtgactaatttatttttattattgtaaagatacaataaaccggttgaaatatctgctttgttgacaagcgtgtgctttctctggccttattcgcgttctgttctcctgcaaatagcgccctctaaaaagaagagtcagacaataaactggttgaaatatc

SEQ ID NO: 5437 - DNA, 808 bp, Homo sapiens
cctgagcatgcgcccacccactcatctgtccctgacctctaacctttctctgcctctcccacactctcccagagctcactgattagacagcacaagggtctcagttcaacagcatacagccaacatctatggtgtcccaggcacagtgccaggccccgggagtggggaccaagatgtacataagacaaagctactgccttctagagacaaccggcagtgacctcactgaagacaaaaactgccctagccaggtactgagggttgcatgaatctgcaggagacagagatccccttgcatgggaaacataaagcagaattgggagggactttgtggagacagggctggacttgaaaggaagaagaagtctaaaagaaaacatcatttgcaaagggagagaggggcaagcatgatatgttgttagaacaggagcccactttgaaggtataacaggttcctgccagtgagaaatggggagaataagccagaaaagtaccctaggaccagcccgttcaggactttgaatgccagccaaaggccacgtctgacttgggaggcagagggcagctactgcaggtttccgagcagagggtcatacacagggctggacctcacgcagactggcatggccatgggtccagaggatactactgggaaggggatggcagctactgccaccttccagatggttccatggagttctgatctttgggcatggccaggggaagcagaagggagactctaggagttgaaatgggtcagacccggtgtttgggtgaaggtaaggaatgagggaagaggagctctttg

SEQ ID NO: 5438 - DNA, 570 bp, Homo sapiens
tgggggtggaggtgaaatgtttccaagcactctggaaaacaatctactgaaacgaaacatttgcctactctttgccccagcaattcctcgtaggtgtgtgtacccagcagaaatgcccaccgaaagatattgtaagaatattcatagcagctttattcataatagccccaaactgtatattgatggtaggatgaattaacaagttgtggtatattcatataatgaaaaataatttaaaaagaatgaattacggatacatgtggcaacacaggtaaacttcacagacataaaagttgaatgaaagaagccaggccgaagttccatttatgcagagttcaggaacaggcaagactaattgacaataatagaagttggaatagtggttacttctgggtggtgggggattgatacagagggggctcatgggagccctctggtgtaccagaaatgttgattttgatctgggcagtggtttcacaaatgtattcatacgtaataattcattgagctgtgcactttattttgttagacctcaataaaaaagtaaaaaaaaaaaacaaaaaaaaccag

SEQ ID NO: 5439 - DNA, 700 bp, Homo sapiens
ctattgaagtatatttgcgacttttgaaggctcctctttctgcccttccccatttgttggatggctgcaatctcagtgcctgagggaagatgcctagtagaggaaagcttaatactctttttcctgaaagaatatcatcctctgcattatccccatggaacgtttcactttaaccctgactggggagcaatatgttctgtgaaaatatcttgaaattgtacaccaaaaccttacaaccaacttatttgaacatttattacacacagggtttacgtaagacttttcttattggtatataattaatttcctttggtctcccttatccacattggcttattctggaggaaaagcagtgatctgtaaaacaaatcaagaatatattaaatctagaggaatgcagagaagaaaactataaaacagaaccaaaaacttgttgcacagcctacataattaagagatcaactggctggaagcagatcaaggcctaacttcattcaagacctaaatattatgagactcagttattcggttttatgtgacatctcttccattcaccatgcacaggcttttccagctatctatataatgtttgcaaatatttgataaagatgatgttaccctatcttcctccatctgattcctggaatgcttgaagaaaggggaaatcttgagtaacctcattaaaattaatgtctggtgg

SEQ ID NO: 5440 - DNA, 190 bp, Homo sapiens
gaatggccctgcataaaatgaactctgaaaactttaccatctagagtgctcatgcaattaaaacaaaacaaacacaaacaaggaggcactaagcctattctgacaccactggtctgtagtaccagaattgttttgttaatggaaagtttaagtaaattatattgtaataaaaaggtagataaaccattgt

SEQ ID NO: 5441 - DNA, 1055 bp, Homo sapiens
gagcacccaggcttgcccagcaaaccctgcgtgccattcttctaccaggcagccgagaacagggagataaacatcatcatcttctaagagctgatcaagaaatttaaaacaacaacaacaacaaaaagttacggggttcatctcctacacaattcatttactccatttgaatgctagagccactcacatttatttgtgtttctaatttaccgtttaaatttatttgtaaaaagttaagggagagttggtctttccctgatgttctttctggcatcctttagcatttttatttttaatttgataattgtaggtcattagtatgcatatcgagtttgcccttaggtggtgggaattcaaacacacaaagacccactaatttgcacaaaactattctggctggtttggaacaggctgccatgcttttttaatgttattgcagcatgtatattcattccagaattcagataaaatgtgcttatgttctgctatgacgtttgatcgaatcctaaccacagtgagctcttcattagctcaatatgtggtttgccctcaattgagcactgtttattactttgtaatatgccactgtgagtactgacatttagagttgtttaaaggccaagaactggaaacagccttttccctattttctgtgtattggggatgggagtaataacattttggggagctttttaaatctcacagaagaggaaagtggcctgctctggcaggtgtgtgcaggatagagtgtgtttcatttgttctggtgccaagaatgagcgctgtactatggtagttcccttaggatttgtatgtgctctgggctcatgaagatattgcatcatgagctgcagcagttgtaccctttcttgatgacctaaaaagggattatttctgaggaatgaaaggctcccatcattgactgtggatgtggaaaaccttttctagcttagagcatttatatctacaatacattttaaagtcagagttcatgttacctgttttaatcacatgagtatatgtcccagtacacaaaagggcactggttggcattc

SEQ ID NO: 5442 - DNA, 888 bp, Homo sapiens
gaatagaatgaatgaccccaaaatagggttttcttgggcgaggatgtgctggattaggaaaggtgacatgacacaggcagagcagagtggcacccaccacagaatacagtgtgtgttattacgaggagccagcagttgagcctaaggtccttctacctacctggtattggcatttgaggtcggaaaccctctactgccccataagccaggaaaagtgaaaagagaacacagttcctttaagaactggcagcaaggcttgaggccttatgtatgtagctgagtcagcaaggtacatgatgctgtctgctttcaaaaggacttttctctcctagctgactgactccttccttagttcaaggaacagctgagacagacctctgctgagtagctctgtgatgacaaagccttggtttaactgaggtgatcctcaggttgtgaggtttattagtccccaaggcaaacacaaatattagattaataatccaactttaatagtatacatttaaaagaaaaaaaacaaaagccctggaagttgaggccaagcctgctgagtattgcagctgcatttgcccaaagggaatccagaacaagtccctccctgtattttgttcttgagaggggtcagtctagaagctagatcctatcaggatgaggagcagcagcccagggcttgtctggatcagcaccaacgattttaaagaaaaaaggaagagtttcttagatgagtaattgttattgaagatagtcagtgataaccactgaccagatgctatcaatacactatgtgtcctttttagaataaagattacatatcatcattcctttggggaaaattgttattcaggtataaaaacaagagatcataataaaaacctaaaagaacctatg

SEQ ID NO: 5443 - DNA, 745 bp, Homo sapiens
cgaccttcaccaggacctgacttcaaacctgagtctggaagtcttggaacttacccttgaaaacaaggaattgtacagagtacgagaggacagcacttgagaacacagaatgagccagcagactggccagcgcctctgtgtagggctggctccaggcatggccacctgccttcccctggtcagcctggaagaagcctgtgtcgaggcagcttccctttgcctgctgatattctgcaggactgggcaccatgggccaaaattttgtgtccagggaagaggcgagaagtgcaacctgcatttcactttgtggtcaggccgtgtctttgtgctgtgactgcatcacctttatggagtgtagacattggcatttatgtacaattttatttgtgtcttattttattttaccttcaaaaacaaaaacgccatccaaaaccaaggaagtccttggtgttctccacaagtggttgacatttgactgcttgttccaattatgtatggaaagtctttgacagtgtgggtcgttcctggggttggcttgttttttggtttcatttttattttttaattctgagtcattgcatcctctaccagctgttaatccatcactctgagggggaggaaatgttgcattgctgtttgtaagctttttttattatttttttattataattattaaaggcctgactctttcctctcatcactgtgagattacagatctatttgaattgaatgaaatgtaacattg

SEQ ID NO: 5444 - DNA, 1562 bp, Homo sapiens
ccatgaggaccagggagctgctacccctccctacagctcctaccctctggctgcaatggggctgcactgtgagccctgcccccaacagatgcatcctgctctgacaggtgggctccttctccaaaggatgcgatacacagaccactgtgcagccttatttctccaatggacatgattcccaagtcatcctgctgccttttttcttatagacacaatgaacagaccacccacaaccttagttctctaagtcatcctgcctgctgccttatttcacagtacatacatttcttagggacacagtacactgaccacatcaccaccctcttcttccagtgctgcgtggaccatctggctgccttttttctccaaaagatgcaatattcagactgactgaccccctgccttatttcaccaaagacacgatgcatagtcaccccggccttgtttctccaatggccgtgatacactagtgatcatgttcagccctgcttccacctgcatagaatcttttcttctcagacagggacagtgcggcctcaacatctcctggagtctagaagctgtttcctttcccctccttcctcctcttgctctagccttaatactggccttttccctccctgccccaagtgaagacagggcactctgcgcccaccacatgcacagctgtgcatggagacctgcaggtgcacgtgctggaacacgtgtggttcccccctggcccagcctcctctgcagtgcccctctcccctgcccatcctccccacggaagcatgtgctggtcacactggttctccaggggtctgtgatggggcccctgggggtcagcttctgtccctctgccttctcacctctttgttcctttcttttcatgtatccattcagttgatgtttattgagcaactacagatgtcagcactgtgttaggtgctgggggccctgcgtgggaagataaagttcctccctcaaggactccccatccagctgggagacagacaactaactacactgcaccctgcggtttgcagggggctcctgcctggctccctgctccacacctcctctgtggctcaaggcttcctggatacctcacccccatcccacccataattcttacccagagcatggggttggggcggaaacctggagagagggacatagcccctcgccacggctagagaatctggtggtgtccaaaatgtctgtccaggtgtgggcaggtgggcaggcaccaaggccctctggacctttcatagcagcagaaaaggcagagcctggggcagggcagggccaggaatgctttggggacaccgaggggactgccccccacccccaccatggtgctattctggggctggggcagtcttttcctggcttgcctctggccagctcctggcctctggtagagtgagacttcagacgttctgatgccttccggatgtcatctctccctgccccaggaatggaagatgtgaggacttctaatttaaatgtgggactcggagggattttgtaaactgggggtatattttggggaaaataaatgtctttgtaaaaagctt

SEQ ID NO: 5445 - DNA, 111 bp, Homo sapiens
ggacaccaaagcccgcagtggactgatgccttcgatgggcaggatgaaggccaggggcactggagtgagggagtagataaaacagctgcaatataaacagtcctctggaat

SEQ ID NO: 5446 - DNA, 300 bp, Homo sapiens
tctccgggagggacagatggccaatctctccccttccaaagcaggccctgctccccgggcagcctcccgccgaggggcccagcccccaacccacaggcacggaggggcatccctccctgccggcctcagggagcgaacgtggatgaaaaccacagggattccggacgccagaccccattttatacttcacttttctctacagtgttgttttgttgttgttggtttttattttttatactttggccataccacagagctagattgcccaggtctgggctgaataaaacaaggtttttctac

SEQ ID NO: 5447 - DNA, 2804 bp, Homo sapiens
gaggagggggtgaccagcttggagtctctggtgggcagagagggatggggtccctgagccaggccccacccatcacagcattcccaggtcctggtacccagccctcagttgtcatttggttcagaatcagttccctttctctgggaccaaatttcccttctctaaacatcctacagagaaggttccaaagctgagcacccatcaccctaggtgtgcaccagactcctattagcccctccttccaggagctagaaccagggaggtcctgagtgaggaaggcatgacctctgggctctctaggtggccctggtcttgccccatccatcccacctgccactaccttgggtgtccttacagctctgccctgaccccagcccctgcccctggacacctgctgacagctcccacacagaacagtctgaggtgatgctggctacagccctggcagcccatggcaactcaaagtgccttccaaaccaaactgcccctcatgaggttagggtcccccaccctccacctgcccagaggccaactctgttcccttctcctttcatcccagaggggcctcatcagcaaagacagaaactgatgttccatgcatgtccctgcttccaaagcctgaccttccaaagcttgcttccttcctcctggctgcacagacacctctgcttggccacagctttgctctttggtcctcaggccaccagacccctcacagcatggcccttggctcttcctgcactgccctcaccctcagccgtcccaaggagtgcccagcactactcagcatgtagtccaggacctgcggcatcagcatcccctgggagcttcttagaaatgcagacctgtgggctctaccacaggcctctggaatcagaatcttcagggtggggcccagcagtctgtgttttaacaggttctcccggtgatgctggtgcatgctcaagtttgagaaccgctgctctcatagactgctcctccaaggggaagcagtgtggaacagcagagaaagtcccgtccctatctctgactgtgcagtgagtgtggcctaggaacaggtcccttcctaagctctagtgtccccatctgtaaaatgggctgattggcctccacggtcagagcggccatctggctgtgccatcctgcatttttaggaatggaaagcaggcctctgaggcagtggacaggaagacttctcatccttgaattctagctcccattccaaactgttagtccccaaccttgtggtcacatcagaggtcaacagcagaacagaggcaggtcagggttgtccgctctgattagcagaacgacagccccttcctcctcctccctccttcccatccctactcattagctccctgctcctgggatgcttcccaagcagcccaggcctctagcctccatggctgatgacctcagctttcacactggtgaagtctgtgtacccatactgcagccccatcccatggggcccctgaagacccactgaggaattccgtagggtcttgttcccacgaccggagtgctggctctcacagtgaattttgatgcatttaaaataagattctgatgccagactgttaaaacaggcgctggttctgaagcaccgatggaaacagattgatgcagatggaaggaggaagggagactgggcccactgatttccagccccaccatgtgtgctgttttcagatgtgattgaggggtgttctgccctgcctccactgtcacagcctttaataaagatgtgaatcttgaaagcctgatgctccaatcacagactctgctcagcatccccagaggaaccactgagaagccttttgcctggataggagggggctctcccaggcataggcttgtggccacttgcccagcacaactgtgttttgtggggcgtcttttaggacttagcagagctgagagccctttgttgctcaatgctgtgagccttaagcatgtgaatccccccacatgacaagtggggagacccagggtaggctttcctttggatcatctccaaatgggagtgccatgtggcaggaaagaagcaccgatttcaagaattacttcctagagaaagtcaggaactagagaccagagtctgcaggaactttgccactgcccttcactggctaatcctgtacttctctctgtgttccttgagtgacaggtggtaaaacccttaaaaagggaggtgtgggaggcccaggactttggtaacaggtgatgaatgtgttgtcttggccatcacaggtggagcttcagttagtacccgagggattcccctggcacaagcattataggaattagtccaccactggcgtgggtgagcagccaggtaatgggaattgatcagtgccaccacccttgaccccaactaccatcccagatgcccagattccagtcctggagttttattctctcagcttgatcctttgaccaagaagatccagtcccaatatgtcacctgtgcttcatctttggactatatctcaggtgtttacgtgtcaactaatgggagcttactgggttagaagtcaggacactgagtttcaatcctcacttagtagtctgtggccctctttggcacattaacctccctccttgatcctcaggctgcacctctggcaaatgggagaatgcggctccttttgacttcaagggatctttgtgggaaccaatgagaaaatgtgtgtgaagatagctttttggtatattttaaaagtgcacaaatttaagatcttactgctttataaagtgctttatgaattataggaaaataaacacattttagatcttag

SEQ ID NO: 5448 - DNA, 1737 bp, Homo sapiens
gtcccaagctgtgctgaggacagtctccaaatgacagctgcatgcctggaccaccccagccctcccactacaccagggccaggagctcttctgaaatgctgatagcatgtgtccagagccctgtctcttttctggaatgtccaagacctttgtctggagcttccttatgcattttctgtcctctaagtcctcagtgaggagggctggacaagaatccattccttggtttattacagccagtgggggccagtgaaggggtgtcaggccacagggcagctatataggggccaaacaagtgaggtttgactccatccatgtagaaagatatataaatccattccacagtgaaacaggtggcctcgtgggtagtgacccttctgtccctagaggtttattactagaggctggactatcacctgtccaggggaaaaggggatctgaatagagtgaaaggttggactgggtggcccctgaggtctcttccagccctcagtctgaggttctgtattggaaagtgcatggagcccatggagaccgccgagccacagtcctcgccagcccactcctcgccagcccactcctcgccagcccactcctcgccagtccagtctctgctgagagcacaaggagcctccagcctgccctgtggcacataccaccccccagcttggcctccccaccagcccgctgagcaggctgccacccccgatgctgagcctcacagcgagcctcctgatcaccaggagcgccctgccgtccaccgtgggatccgctacctgttgtacagagcacagagagccatccgccttcgccatgccctccgcttgcaccctcaattgcatcgggcccctattcggacttggtctccccatgtggtccaagccagcactcctgccatcacagggcccctcaaccatcctgccaatgcccaggaacatcctgcccagctgcaaaggggcatcagcccaccccaccggatacgaggggctgtgcgatcccgcagccgctccctccggggctcctcccatttatcccagtggctcaacaacttttttgccctccccttctcctccatggcttcccagcttgacatgtcttccgtggtgggggcaggggaaagcagagcccagactcttggagcaggtgttccccctggggactctgtcagaggctccatggaggcctctcaagtccaagtgcctctggaagcctctccaattacattcccaccaccctgtgccccagaaaggccccccatcagcccagtcccaggcgcccgtcaagcaggcctctgagagtgctacccttctcttgtaaccttgcagccaacacccctgcccggcccctgagctgcctcctccagcccatgctcttacaggccctgcacagagtagcactcattaattcttggttaaggaatgaatcaacgaatgaatggctatgcatggacctctgggcagggagacctgggtcttctctggctgagaggggaaggctaaggcatggctgagattcaagccaccattccaggcctctttgcccaagaaagaaacttctgtcacccttgcactctcctgtattctgagtccctggccaatagcacagccttccatgccccgacccccaccccaagcctctccactaggcctctgccaggatctaagcccatgagcacagggactggctatcccaagacctggcagatgtggctgctcaataaacacttgttgaaccatc

SEQ ID NO: 5449 - DNA, 387 bp, Homo sapiens
tcctcccgagagctggatgacagcagcagtgagtccagtgacctccagctggaaggccccagcaccctcagggtcctggacgagaaccttgctgacccccaagcagaagacagacctctggttttctttgacctcaagattgacaatgaaagtgggttctcctggggctacccccacccctttctaatttagtctctgagtcccaaaaagaagtgcaggcagagccatctgccaggcccaggagagctctgagctctggccaacaactgcagccaggctgggcagagcactccggctcacctgggctcctggcgtgtcatttgctggcttgaataaagatgtccgccttatccagtgcctgagtgtgcgagagaggcagatgcctcc

SEQ ID NO: 5450 - DNA, 1808 bp, Homo sapiens
acctccgcccgtccggcccgcccattcccgacctccacctagggtgcctgggagcagcagtctagggctggcaggacttatgtcccccgtccccaaccttcacctactcctcccccttactactccccaaccttgactaccagggacttctattagggagtgggccgatttcaccagtccctgctacccacggctgccattctccctgcgggctgaatccccttccccgccaagcacagtgtttatcttaccccatgcaagactccacccgcagacggtgggcgatatctatgtccctccattcccgtcgcgattatctgcgaaatccaccccgcagcccgccccaccgtgggctctggagccagaggaaacgagcgaagactttggaaacctcgcggtaacgcggtggtttcgggggccagccaaggccagtggagtgctgtggggtcccacctcgacccctcctcctccctttctttctttcctttttttttattttttaattttatttatttatttatttattttttgacggagtcttggtctgtcgccaggctggagtgcagtggcgcgatctcggctcactgcatcttccgcctcccgggttcaagcgattctcctgcctcagcctgcctagtagctgggactacaggcgcgcgccaccacgaccagctaatttcttctatttttagtagagacggggtttcaccatgttggccaggatggtctggatctcttgacctcaggtgatccatctgcctcggcctctcaaagtgctgggattacaggcgtgaggcaccgcgcccggcccctcctccctttcaatccctactcccagaagccgggattcgtggcaacccctagtttttagttccaaagcctcctgccggcagggaaccaaatccttctgtcctcccacccccaccccacttctggccagttggagtccagcccggtgcctggggcgcctttcagctccgcgctcagattttcctgttttcgttgttttcaaagacagcgacatttcgggtctggtgctaacacccccttcccagcctctgggaaaatcgagtgtgtgtgtcggggggtagggagggaatgcgttttctgtcgtctctctcctaacttaaagcgccgcaggaccgcgcgccccttggcggctgagcctgtggacttggtcgcgggccaatttcgttgtccgtgtgttgggctttccggaggtctgtgcgcccaacagcgccgctcccgcggctccacccgacccagaccctagctggaaagcgccggaggcggaggaagctgactgtggcctcccgggccgcggctctctggagggctcgcgccctagttcgcacaaagcctgctcgtgactgtgcgactgtgcgacgggatccggatggagccgagcccctccgtcctcgcgtctcggtcctcgcgtcgccccgccccacccgcccctgcttcggcgggaatcgtgtttgcccggcgtgtagtccctgacaagcgtgccctgtaggagaaaagtctgtgtcctgtgaagtgtgaccgtgtagtgtaggggggcgggcgggggggcggatgggcggggagggagggaaggggaggggcgcggcgcggcgactcggggcggggttcttttttccattttgaaagaaagcgtcggggttggggtggggggagtttcagtcctcgggatcagccctctccgcgaagcgcagcacaagcgcgggcctgggacggagtagccccccggagcccgtgcccttttctaaacgcgtctgtatgcagtcaataaaacaatcgatttg

SEQ ID NO: 5451 - DNA, 726 bp, Homo sapiens
ccccacccagggcttccctaactcctccccttgcccctaccaatgcccctttaagtgctgcaggggtctggggttggcaactcctgaggcctgcatgggtgacttcacattttcctacctctccttctaatctcttctagagcacctgctatccccaacttctagacctgctccaaactagtgactaggatagaatttgatcccctaactcactgtctgcggtgctcattgctgctaacagcattgcctgtgctctcctctcaggggcagcatgctaacggggcgacgtcctaatccaactgggagaagcctcagtggtggaattccaggcactgtgactgtcaagctggcaagggccaggattgggggaatggagctggggcttagctgggaggtggtctgaagcagacagggaatgggagaggaggatgggaagtagacagtggctggtatggctctgaggctccctggggcctgctcaagctcctcctgctccttgctgttttctgatgatttgggggcttgggagtccctttgtcctcatctgagactgaaatgtggggatccaggatggccttccttcctcttacccttcctccctcagcctgcaacctctatcctggaacctgtcctccctttctccccaactatgcatctgttgtctgctcctctgcaaaggccagccagcttgggagcagcagagaaataaacagcatttctgatgcc

SEQ ID NO: 5452 - DNA, 968 bp, Homo sapiens
gaaaagccattgtggagccaactccagggctgggggtcaggagtcctaggctcccattcctgctccattaccaaccgaaggctcggtcttaattcccccacctgtctaaggggaacagaaaacccctgccaaaactaccctttcccccatggggtgctgtgaaactcaaggagatgactgtggatgaggggtccatgcaggcatctccaggatgccctgacactgtgctttaggactggctgcgctcatgggcagagtagcttgtggccctacccccctgaatccatagagcctaagattctcaaattagcacacccttctcagatggccacgatgtaggctccactttgccaacttcccgagaacaaacaggcctgctcacaactgcccctcaagttcaaccccgggaccgcccagccccgcaaagcaaagaccctgacttctcctgctcttgagccagctgtgctttgcccgtggccagaagctcagcagcggctcctgggaaaggcctggaaaggatgagggaacaggcaaggaacaaaggcaacctttgcacactcacctgagccctggggacccttggagaaattaggtgtcacctgctgtggcaaaatgggtttagaaatctttgccaggtcatggcccactggattctggatactctgaggcctggtttgtcaggcaatatgcccttgagcaggtcaccccctgggaatggggggtactcacgcaccccgctttgcacaccacagagtgccctcacccactccatggacctcaagcagccctcagagctggagcccctgctgcccagctcagactctaagctcaacaagcccttgagcccccagaaggagaccgctaactctcagcagacctgagccccagagcaggcctccttccctgtgtgctggggagtctcatcaccgccccctaaaaatgacgttattaaatgttgtagctctgtg

SEQ ID NO: 5453 - DNA, 2355 bp, Homo sapiens
tgggcaggacccagcttcccacttgccactctcctgtcgagagtgaaggaagttgatgcacagaatttacctcatctcacagagcccacgtcgacgagcaccatttggccagacattgagagtttggacgtgtccgtctgtccaggctccattcaggtcctgctgtactctgggggcagggagaggctagaggggcaggacagacagcgttgtccaatcagggattgtcctggagaactgggtgggggtctgtgggtgtccagcttcctccagggttccccagccacctcccagctcagggcacagtgtatcgacaatctgtcagccgacgcagggctggaggccctccatttccctccccttttaatttatttccctgaccctgccttctgccatgaccccagggccactagtctcttcccctgtttttaagtcccatgtggggctgccaggagccaagagcatgccttcatgcccttctctgcagagcatgggatggggcccttccagcccactttgcctactgttaggttcctggggtacgggtccctcaaacacaagtcttgaatcagtcctcagggccccagatcccccttctaatagtctgaaggaagaggctgtgagggcagttcagggccagggcccacagggcatctgctgatgggaaggcagagcctcggggctgcccagccctggcacctgcttcacacggaccattctctgaccgcccccgccaaacctcatgctccccacttgcccttattggcctgctttcccaaaaacagcccactcatcctttccccagccctcttcagccctccccagtcctccccagccttcttcagccttcttcagctcagccctcttctatttcttatggggccatcttggcctcaccatccccacacgtgccgatgtcaggttcattgaaatacctcagatttgtaattgttgatgtttgagtcttcaggaagtatttgcatctctgaaatcttttttatatgtgttttgctgacttttgttttttttttattttaaaatttttatcgtagcaccaaagaaatgaaaacagatcacccccaaagccaagcaagtgattgggtaacccggcccctctggcccttccctcaagcccagtgaggaggtgggtggaggcatgcaggggagacgactcagggatcgcgggggcggggaggtggagtggagaggcccgctctcacaccgggtcgggccctgaaactgtaccagttctgaagaccgttttctgccacacccccacccccagctgaccagggaggcagaggacacctccccatcactcagcattcccagctcagggcacaggcaggctggggtcctcgctggccttgccagaggttgagccgccccagggtatgaggagatgaataactccacagctcctcctggaccctgcgcgggagcaggcagctcctgtgctgtaaagaaaattgattcgcttgcggctcacctcagtcgaggaagccctggaatgttcagcagaacaccaccactgtgacatggggctgtggcagtgggagacaccgcgcgtggcgtgggtgtgtgtggcagcgtggctcgcattcagtcctgtgtaggagaggaaagggaatcaaaagcttgagcacaaacagatacctcagcccggtaagctgcagctctgctcaactgcgtcttctctcagccctccacacacactcacccccactcccacacacatacacacacacacacacataccccatctcccgagggctgacctcctctggcctcagcctgcagggtgtgggcagagaagggcatctgggacgtggtgccagtgaggagcccagttggctggcactgggcccatttgaaggtgtctcagacatttggccagtatgtctttctcaggggtttggtcacaaaggatggactcttcccacccagaggatgcagggaaagcacactgtgtctttccggtcattggatcctctccctttccccaggcagctcgcctggccacaccgttggagtgaaccctcactgccctcaaggacaacagcagggtgtcacccagagcccgatgaggggtgccagcaggtgcccccacgagtggggccttggcccaagcagagcttcccctgaaggtgccatcagccagggcagctctgtcccctcctgctctccatcttatatgtattctaaccaggaaaaatgtgatagcacatgggtagcctaggcagtgagtaaatacctcagatgtcctcctgcagcaagtgtctatatgttgtggttattttctatcttacatgttctcgaatgtttatatttcaataaacctctacctcttcacac

SEQ ID NO: 5454 - DNA, 411 bp, Homo sapiens
agttacatgctccaagactccctggagcacgtgcagctgtttgacctgatgaggaggatgttagaatttgaccctgcccagcgcatcacactggccgaggccctgctgcaccccttctttgctggcctgacccctgaggagcggtccttccacaccagccgcaacccaagcagatgacaggcacaggccaccgcatgaggagatggagggcgggactgggccgcccagccccttgactccagcctcgaccgccaggccccaggccagagccacccaatgaacagtgcaatgtgaaggaaggcaggagcctgcaggggagcagacttggtgcccagctgccagaaagcacagatttgacccaagctatttatatgttataaagttataataaagtgtttcttactgtttgta

SEQ ID NO: 5455 - DNA, 1512 bp, Homo sapiens
agaagacaccaccattctgaggccagggagcgagtgggggccagccacggggactcagcccttgtttctcttcctttctttttttaaaaaatagcagctttagccaagtgcagggcctgtaatcccagcattttaggaggccaaggttggaggatcatttgagcccaggaattggaaagcagcctggccaacatagtgggaccctgtctctacaaaaaaaaaatttgccaagagcctgagtgacagagcaagaccccatctcaaaaaaaaaaacaaacaaacaaaaaaaaaaccatatatatacatatatatatagcagctttatggagatataattcttatgccatataattcaccttctttttttttttttgtctgagacagaatctcagtctgtcacccaggttggagtgcagtggcgtgatctcagctcactgcaacctccacctcgcaggttcaagcaatcctcccacttcagcctcccaagcacctgggattacaagcatgagtcactacgcctggctgatttttgtagttttagtggagatggggtttcaccatgttggccaggcttgtctcgaactcctgaccccaagttatccacctgccttggcttcccaaagtcctgggattacaggtgtgagccaccacatccagcctaacttacattcttaaagtgtcgaatgacttctagtgtagaattgtgcaaccatcaccagaattaattttattattcttattatttttgagacagagtcttactctgttgccaggctggagtgcagtggcgcgatctcagctcactacaacctccgcctcccatgttcaagcgattctcctgcctcagcctcccgagtagctgggactataggcatgcgccaccatggccagctaatttttgtatttttagtagagacgaggtttcactgtgttggccaggatggtctccatctcttgacctcgtgatccacccgcctcagcctcccaaagtgctgggattaacaggtatgaaccaccgcgcccagcctttttgttttttttttttttgagacagagtcttcctctgtctcctaagctggagtgcagtggcatcatctcagctcactgcaacctctgcctcccaggttcaagtgcttctccagcctcagcctcccaagtagctgagactacaggcacacaccaccacgcctggctaatttttgtatttttagtagagacgggtttcaccatgttggctagactagtctcaaactcctgacctcaagtgatctgcccgcctcgacctctctcaaagtgctggcattacaggtgtgagccacggtgcccggcccacaattaattttagaacattttcatcacccctaaaagaaaccctgcacccattagcagtccctccacatttccccctagcctgcctcccctgcctcaccagccctggcaactgctaatctactttctgtgtctatggatttgccttctctaaacatttcatataaatggaattacacaatg

SEQ ID NO: 5456 - DNA, 650 bp, Homo sapiens
cggctggcctccgcctgggtcatgggcctgtggggactgaacctggaagatcatggacctggtgcccctgctcactgggcccgagcctgaactgagccccagcgggctggcgggcctttttcctgcgtcccagcctgcacccctccggccccgtctctcttggacccacctgtggggcctggggagcccactgaggggccagggaggaaggaggccacggagcgggaggcagcgccccaccacgtcgggcttccctggcctcccgccactcgccttcttagagttttattcctttccttttttgagattttttttccgtgtgtttattttttattatttttcaagataaggagaaagaaagtacccagcaaatgggcattttacaagaagtacgaatcttatttttcctgtcctgcccgtgagggtgggggggaccgggcccctctctagggacccctcgccccagcctcattccccattctgtgtcccatgtcccgtgtctcctcggtcgccccgtgtttgcgcttgaccatgttgcactgtttgcatgcgcccgaggcagacgtctgtcaggggcttggatttcgtgtgccgctgccacccgcccacccgccttgtgagatggaattgtaataaaccacgccatgagg

SEQ ID NO: 5457 - DNA, 152 bp, Homo sapiens
cccacctcagagcctgctttgcatcactgggaagcaggcagtgtcttgggtgggggcttggtcagtatcctctccgtctgggtgcccagctcccacgcacacctgagctttcggcatgctcccacctcgttaaaggtgatttccctctcccc

SEQ ID NO: 5458 - DNA, 1441 bp, Homo sapiens
ccacttccccggggttacccactgggctgggcccccatgagggctaagagtgtgtcaacttccagggacccatactccatttggggctttgtttcccttgccccatcctagttccaagacctttcccatccatgccccaagcctatcttctggtttcttcctctccgctgggagtaaagtccccatcttcactctacccttcaggaccctccccaccagctcagcctgtggaggcctcccaagattgtaggaataggcccatccctctctggccatggccccaagttcctgcacacaggagcacccacagagagacacacacaggacacaaaacccctggcacgttcagagacagaagccacagatacatcccggcacagacagacacacacgaggccagctcccttgcgtgtccagcccctccagacaccaccactcagaaactctgagagagagcatgggcagacaccctcagcagacaggaggcctgagttccagtctccacctttattgttcttgaaagcccctgctctctctgagccttatttcatcatctgtaaaatgggaatgtcctgaatgacttctaaggctctttctggcttgaactgtcagagccaagcccacatccctccttgggcagggcagcagctgctgccacagcctccagcggctgccactgtgggctctgggagccggagcgatgctgtgtgagaggcagagtgccaaggatgaagctggcactgaacagtaagcggctccaggcctcctctgggcccagggcccagccaatttctgttctgttcctgtagaacgctctctggattccatagctggaatctcctctcttagctcagtgaaaaataaaaatcccaaatggtgtgcctaccttcccacttcttactggcttccaggagtcttggagttcatagccccccgagcctgccttaaaggggtgtcctccaccccccacctacagcttcacaggaggggagaaggcatccagtgctaggagtagaagtgtctccagctctgttctcttggggccctgggtgaaggtggggtctggggcttatgaaataggtctgggctttgaggaggatggagcagcctcattatgtggggaagatggggcctctggggcgtcactgagaccacaggtggggccggggctggaccgcagctgtcttgggtgcctgtgcctacacccctcctcaccctagagacggaagatgtgcaaaaagaaagaaggaagggcaactgcattccagccccacactgtgatgactttgagcctgtcctttccctccttgagcctgtcttgcttgtcccctgtaaaatgaacagtccccctctcccccaaatagtaataatacatgtttcaaagggtgaccatttataaagcatatgacaaaccatatcaataaatgtaactcattctttt

SEQ ID NO: 5459 - DNA, 494 bp, Homo sapiens
aggctgcagcctccccagctctcctctgccagccaccctaaattccagccaacctcacctcctcgggcccagctcaagcccccttccttgctctggaccccttaggtataccctggaagagctggggtgggggaggagggagcgtgaaggtagtgactcctgaacacacccaggtggaaccatctttggggaggagaggcccgtgtgaggggtctgatactccctttgtcttccctctctactcctcgctacacctgagccaggctcttgccaactctgttccagcctatggctttaggctagctgttaaatatgtgacccagcattagctcagcatctgtcagagcaagagaccaggtaatttctaagaacagggttctagcgatgggactgcccatttcctcagctgcagaggaggaaagggaaagggtaggcctgtagactaacgctgtttacacccttgttctgtcaaagcaattaaagatcacttgtgt

SEQ ID NO: 5460 - DNA, 2512 bp, Homo sapiens
accagccacgcctaccaggtggcagagctggggccattgggacagggggctcaagccacatcgtcatttgtggttaccaagcagggttcccccttcccttttctccttccctactttgtacaaaggaccagagttatatatatatatatatgtatatgtctgtaccccagcccccacctttcagattctgctcttggcactcagctgtgggctgcacgtggagctgtcccgtgcggtagtagctgtgtctgtgtcccctcgtgaaatagtgtgcagtggaggtctcttgtggtgctagatgtgtgtttagagctaaaccagcccccacccccaccctccacctgcccctcttgcctctggcccctctgaccctggcccagggacccctcacggggccaggggaggcatagcagaaagactggccccttcctagggttatgagctggaactgtttctactttcagtcttcctgggaagtaacagtacttagcactcttggtggtgggtgggagggtgggtacaggccagggatattcccttgctcttttgatccctccaggcctcgcctccttcagcctcctcctccctcatctgttccctgatgtcacattccctgtgcaatcttcccttgcccatggtctgtctatctctttcctatgtggcttttctttgtcttccccaaggctgagtgtcccagttttatctgctcctgagactgagcccagatccccaaatctaatctgatttacagttcaaggaagctgatggggagctgggccttacccctgatgtaggaggggcacacagctgggggtgcagagcccacctgggtacctgacccccaggggatgaaaatgcaaggatgagtctgcttgggcctgagagtttgatctgcaggggcaggctcatcttttctctcccctgccttctcctccttctctccccagagcccccttgagcccctctgcctatgtccctctgcctcctccccatgcccccagttgctgtggcttgattctgctaccctgaccccaccatgtgccaggtggcatctgccttactgccttccctgaggagctgggacatgctgggcagttgtcagatgtaaaggcacagctggagcagagggcatgtcagtaatgattggtccctggggaaggtctggctggctccagcacagtgaggcatttaggtatctctcggtgaccgttggattcctggaagcagtagctgttctgtttggatctggtaggacagggctcagagggctaggcacggagggaaggtcagaggagaaggcaggcagggcccagtgagaggggagcatgccttcccccaccctggcttgctcttggtcacagggcggttctgggcacttgaactcagggcccaagcagaagcacaggcccagtcctggctgcaagcacaatagcctgaatgggatttcaggttaggcagggtgggaggggaggctctctggctttagttttgttttgttttccaaatcaaggtaacttgctcccttctgcctacaggccttggtcttggcttgtcctcacccagtcggaactccctaccactttcaggagagtggttttaggcccgtggggctgttctgttccaagcagtgtgagaacatggctggtagaggctctagctgtgtgcggggcctgaaggggagtgggttctcgcccaaagagcatctgcccatttcccaccttcccttctcccaccagaagcttgcctgagctgtttggacaaaaatccaaaccccacttggctactctggcctggcttcagcttggaacccaatacctaggcttacaggccatcctgagccaggggcctctggaaattctcttcctgatggtcctttaggtttgggcacaaaatataattgcctctcccctctcccattttctctcttgggagcaatggtcacagtccctggtacctgaaaaggtacctaggtctaggcccttcttccctttcccttcctctcccctaccccagaactttggctccctttcccttctctctctggtagctccaggaggcctgtgatccagctccctgcctagcatccatgacctgttggatgttacctccaatcagtttcctgtcctacctgcctctttggcttggacctatatggccatgctctggctctacccttgggaagcctgatcccggtgtgtggcccagcttgttcaggccctgggatgctgcatctccaggcaactatgcactttcccggggagagaaccagtatgagaagtgggggcagggcacacattcatctttgtaggaaggtctggcctggggtcgggtgaaggagggcccaggtcagttctggggtcccagtgacctgctttgccattctcctggtgccgctgctgctccctgtttctggagctggatgttccccagctggcagttgagctgcctgagccaatgtgtctgtctttggtaactgagtgaaccataataaaggggaacatttggccctgtg

SEQ ID NO: 5461 - DNA, 1490 bp, Homo sapiens
cctgggatttctgtcatgggtgtccctctgtactcagaatgggttcaggccaagtcggtgaagatggatgttggcaaaataggaggataccctcatttgctgaatgggggacctgctctgagcctgcccaggggccaggcctgctccaggttaaactggacggaaggcccaggtctcagtttctttcaaccaggagaggccgctgcctagagcccctccccaccttttcctggatgggtgaggcaagccaggagagcaagcagtgttgtcctcacgggaggaggactgagcgactgggaaaactcggctctacatctcacccagaacggcttttagaaacaccacagctggagagtcctggctgagccttgggagtttcagctctttggcggggtgcccaggtgccatgcgatcagcgaagcctgcgagttggcaggactctgaggtttcctgcagaccatgccatgagattgaaggtgcggggaaataaagaaaaatcaccatttaggagactccattctttccctacaacccagctgtggtcccagagatcagggggtgttgccaggtgtggctggggaagggtctgggttcacaactcaccggcactctttagtccccgtataacatggtggttaaggataaagatctgaagccagacagcccctagttccaatcccagctctgccgcttactagcagtggcagtttggttcaggacttagccttcctgaccttcacttacctcagctatcttgttatcctaccctcagggagttgttgagaggattcagtgaaattttgtgtgcagaatacccatgccactgagtgcctggaacgtagtaaatgtcaaatcaatggaagttaaaactaggcatgcatatatgccagagagctttcctagcatttactgcaatgccctgtctcattttgggaaaaaggaaatcctggatgctaagttgacacatccctttatgcaagtgacaggtaagcagccaggagggttgaccctgccctgggtcccaggcctcttgcctgcttcttggtttcctctgttctcatcctttcagctttgctggacctgaggcaggggcctgggtgtctgtgcctccctaccccccagtacacatgaccaagggaagtagatccagagacaccatgcactctggcccagaaaccctctgctacccagcttttgacttaattgccatttggtgtggctgcagcggggagggcttgtctgcgtatttggagctgaggctgaggctggcttcctgccctctggcttccaggccaggtgtgagggacatcccatgtgggctctgagagcactgagagtagaggtgccttgaggggaccaggaagcctactggctggaatcagtgctccagcagcctccacagcctttatctcaacagcacttgacttcaccaggtgaccctttgggataaaattgccttagggtatgaaataaactataactaaaatggt

SEQ ID NO: 5462 - DNA, 1053 bp, Homo sapiens
cactggttgccagtgctgtgtgtatagcagtcactctccacccttcccttctgcctgcccagctgccccggggccacgagtggatgctggggctgtggctgctcccctggaggggttccatctctgaccctgtggcccattcagggtgggctgaagagcccctgagcttttaacgtgagggtctttattggataggactactccctatttcttgcctagagaacacacatgggctttggagcccgacagacctgggcttgaatcccggctcgtgttcttgctgcaggacctgggcaagaaacttcacctctgctgagccctcattccccatgtgtaaaatgggacaacgcaacctacctcacagggttgttgtggggatgctgcctgatacataccctgtcaccatttggtctctgcttcctctctgggacagggcctagaattggaggcagagaaccttcctatagaaagtcttcgtgtgtcctaggacttggctatcgtagagtggtaccttaggcagtggatgtgactcacactttcaggagtcaccccccagcatttggggttgggttggccctactccagcctggagctccctgagggagcctgcactccctgctcccaatccccgctactggtgcagggatgcagcctggagctggcgtccttgttctgggcctgctgctgccgccaccccaggaggccccaggcctgtcctgaattgacatcagtgcttccctgaactgcctcccccacccctggcattatcccaggaaacttatgttttctagaagctaagcagctgctgggactcagggactggtgcaggtaggctgagtggcagctcagtcctagaaggtctctgaagatctggactgaggaccctgctgctccccaagccagagcccatcagccaggcctgctgtgagccacctgcctgtggagtgctgagctcaaccaaaggctggcaagctctgggcctcatttaagggattctgatgagccgatgggccctggaggcagcccattaaagcatctggctcgtttttggaa

SEQ ID NO: 5463 - DNA, 266 bp, Homo sapiens
ggagaagggtgttccaggcctgtgtggagccgccctgcccgtatggagtcacgccctctgaactgctcttcgggaggcagccctggttctaggatgctgaggccctggcccggactctggcctcccagatccccagctgcctcacttctctcttgagaacttggctcagggctcctgaggacctttcccagcattaccttcccttcccttgaaaggcaattgttggctgttttcataagcaggaaaaataaacagaagtataaagg

SEQ ID NO: 5464 - DNA, 211 bp, Homo sapiens
caggaggctctccttgcttgcactcaccctttcttattgtcttgccctgcatctgggggtctgaatttttgggagcaggcaatatctgaaggtgcaaacaggccctacggctgttccctgcacaactctcatggttttaattgtaccccatcttccacatctttaaagctcatgtgaaaaatgctgcatttttaataaactgatacatttg

SEQ ID NO: 5465 - DNA, 1410 bp, Homo sapiens
ccgcgtgtgcctgggccccctccttcccctgggcctggtcactgcagtgtaccccactttcccgacctccctataccagcagtgactgggggaggggtcagcggtgggggagataagcggcctgtcctgcctcctgggagaaggagctttcaaggagtcatgggtgcccctgggaaattccccactccttagaagtggggcacagcaggggtgagaatagagtcaggagccctcgaggccaaggcctgggctgccggtcagtcagtgaaggtcaggccagggtctcagcctcccctagagcctattttgcttgctcacctggccactgctgccttatccattcagcagacaccgaggcctgctgcacccttgggtcggatgctgggcacccagggctgtgacatgcctgctcttcaggagtcctcagtgaaggtcggggtcagacacagacagagtcaatgcagtatgactgatgtttaagtgagggatttctggaagctcatagaagggaccacagcattccactggtcagggaagactccatagagtaggcaacatttgggcagtgttttgaagaatgacaagggcctgccagacagtacatgggggagaaggactttcaggggagaggaacagcatgggcaaagttatggaggcatgcaaacatctccctcttctctcccttactttccaagcaagttaggtacgctttccatggggattctggcctgtgtggtaggaagggatctcccttgctcccatgttgctggctgtccgtacatcaccctgtcccctgcaggagggggctacaggccatctccctcctgtaggcctctgactcccctccacttttgggccctcagcttatctcgggcaggggaccattgcagcatcctcccctcctcggactcaaggtgctgaggtataagccctgggccccagatccctggtgacaccttcctggagaagactctcaaaagtgactgtatatttgagttcaccagcaataactccccacactcgaagcaggtccaaacccaggatctcagggtccttgggctctgtggcactgtcttcccaagatccttcctgttgcacaatgggaaacctaagaggaaaaagacaggggcctgcttgcccagccatgcgagggattccatgcccacctgccctctgtctgcctcgctggaatgtgggcccctgctccccgtcaggttgtgctgtctctgacctatgtttacatccccgaggggtttctgcctcctccccacccaggtcagggtgtggtccagcagcttgctgtggggtgctgacatgtgtcaccactgccccccttgcccccgggggggtcatggtctcctcctggatgctgctccttgaatcttttttcttgataaaccttttacaatt

SEQ ID NO: 5466 - DNA, 146 bp, Homo sapiens
ggcccctcttggggcactcactgcccctcatccccagaaattatttttctacaccaaattgagcaatttgaccaagatttctagtagcagagccggtacctgctgagtgtccggcacacagaagacattagagatacattttcatg

SEQ ID NO: 5467 - DNA, 1581 bp, Homo sapiens
atgtgttgactgttgtatgtttggactaatgttgctttaaagaaaatctttctaacatgcagacaaaagctttgagtgcccctattacagcagtaccgaagatgttagttaatagatattttagtggataatctgtcatctgacatccagtataagttacagcctttgcattttgctcattttagatatcttggactgagcagtggggcctttactgtatttttcctgataaatacacatactggccactccttatctctttttcttgaaaagtgaactttttaaagcagccaagtcaacatcaggctactgaagttgaggctttagggtaactttcctatattgagcccatgggttacaaggatttgcaatatattgttccatttacagccaatacaggtttaatcgatgttcaatattggtttaggaaatttaaggccttctaaatcataatagctctttcatgtctaaaaccattttatgatattgccaaaatgtgataggaaacctactcattaaattgttaaactttttaatgactatgtgaagatatgaattgtttcctgaagataatactcttaattgagttgtattgtacttcttaggcaaagcagtgtaaaactgtatcaattaaggcttgtgagtagtgatttccactggggcatcagagtcttggctgggctgaatctgctgcttgttggttcagtgtttcttatgaacaagagccacagtacagagcttcaagttatttaaaatactaagtcatcttacgtttccattttattaacgggatgttgcaatcgtttgtaaactaataaacttataaagtgattggcacaaagactccttgagcaaaagctgtgcagttaagtacaaaaagatacttaatttggagactcttacagtaatttttgccatgtcaaaacaatggcttttacattgaaagattaatagaaactctacatatgttaatttttttatagaacctgactcaaatcaaggtactctccattttattgccttacctgaatcagtcctttttggttggtaatagatttttttatacacccacgtttgatttaaaagtaaattctagttcttaagcacttttaacaaatccagaagcacatttttctgcacaaacaagttacaaagttcaaaagtgtttcttgtgcattagctttgagattcagtttttaactttgtaaaccacatctgagagacttgtcatttctacattgtgtgtgtttaatttcttttgattccattttggttaagagagcagtaaatagattttctggtattcttgttcacttgattacatttgtataaagttctgattgccagttgctcagataacaagtgacaaggcagaattctttaaatcagtaaagttccttaagcctaaggctaaatcttgaatacattgttgaattctttaatatcctgatggcaagcagactgatagctgcacatttggcatgctttgtttaatggattttatttttaattgcagatttatttggcaatgtacagtaaattttgtaaacttgcatcaagtttatgaataaagaaccattt

SEQ ID NO: 5468 - DNA, 1499 bp, Homo sapiens
taattaaagtggctttcataatatgtaacttttgggttctgcctttttcagaaaatggaaacttgggccatgtgtatttcaaacaaaaataactttagatatatcttttttgtagctttgattgatgctctaagatcacatgagggtagtatttaatatattagatgaaggacaactttggacataacactgactaggagttgagagcttttgcatcaggcagaagcaaactgattatagttgtgttgcaccagatcatgtagctgctgtgtaacatgaccttaaatagtcttcctgcataggaagagcaaaagggtattcatcaataggatatagatttaagacattccctgactaccccttgcgttgttaggtgatgtcttttagcagaatcatgaagaccttttttctcccttaataaaggagaaaaatatactgatggctggagaaatttttctctgcctttcagttttatgaattttttcagaagtaacaatattattattgactttttacttatttgataaaaattaaagaactatttttgttttggtcagataaattgacaagactaatcagtattttattataagtaaaagatttttcttctttccttaaaaatatttttttttcacctaggtctaaatagctaactaactggtagaccagagtattacatcatcttattttggttttataccaataaaacatagcgtggaactcattcaggtaatgttttgcatttcattgcttttggatgaacaaaggaagtaaactaatcctttataaatgaaaacccagaatagttggtatgtcagctagtcattcctgtcatattcccagtagaatgattttcaagtttgaatttctgtacaaatatctaaataagagatgtgcagagagcaccaattttccttcaatatccattctttacttttcacataatgatagaacctttgatttttcaagtgggtatgcctcctagaataaagactacatttcccagtctcctgtgcaggtatgactgtgttctggacaatggaatgtgaggggaaacgattttttgtgtccttaaaatggcatgaccatttatttgcccctttctccatcctgttgcttggaatgtggatctggtagtgagccatcttggaccctgaagaggaggcaacacaccattgtagaagaaaaacaacagaaggatcctggtccctgtacgacctcattgaagaaacaccataagtggcgtggactatctacctccagactgttttacaagagagaaattagcatattccatctaatacagtatgatgtaactaatgttacttttgtaacagtcagtggtttgttctaacaggacagtagaacacttgcaaggtaagtaaaaccaaatgtattagcattattcctgcttttccttttttgtcacttttatcctttttttaaaactgaaaatatttttctcttgctatttatatatatatgataaaaatgcttgg

SEQ ID NO: 5469 - DNA, 886 bp, Homo sapiens
agggaaatggtctcaggttttgtcactttggggttaacaatttaaaaaacgtgtttaaagaattattaagataatagttcattccattttgtagtagacattggctaaggggcttactgaacataattctgcttacggttgaataattacatttttatatatattgtccttcaagaacttccttgagtcacattctccttaaaatttgacattgcctgttgatctttcctttgacagatgtggtactctgtgtgacctcaatgtgtcacctcctttctagtttcctcctttaaaggaaacacatggttagagtgtatctttatggcaaaacttctcagagcttctaatatgcccagtgctgtggaaatctggaaggagaatagcattacctgtgacagttcccaaatgtgtttggtcacaaaacttttttccacagaatgtcttgcaagtcgtactggtttttggaaattctgtattagatcttttgaaaggctttttcaagcttaaaaattgtggatcttttttgttactaaggcttttgctttcaaagataaaaatatttgctcttctgtcttgggagccattacttcctttccatcttgaatgaaaatacatatcattttgagtttgaaacaattaggtggacataaatatcatttgtttccagcaggaaaatcagaccctaccccaccctcaatgcttgtaaacactactatttgtttcccactctgtttaatatttgcatcctagagtggtgacatggggacagactgttgcagatcagtatctataagaataatgtaagtcatcctagttatagtctctcttctggttatctctatgagctagatctgggaaaatagctaaagttgaggtccctggactg

SEQ ID NO: 5470 - DNA, 647 bp, Homo sapiens
agcctgccatgggctgggtgagatgaggggagacagccatctcaaagctctcctgggaccctggaggctgccaagggccacacgcggggcccaggagcccacctggcctccctcagggtgctgcctgcctccagggaggcgacgccaggccaggaggccacaagcttcagacctcaaagcccagagctggcgcctcttctcgccctgctcaggggagggtggtgctcgtggctgggttttctttttaaccatttttacaaaaaccagcctgtggcccagcttcagcagggtagagtgtgggggggccagctcagcctcttgcgttgccttcgttcctgacgcccaccctggactctagggaacagcactgtgagcaggggctgtccagccccacccctaagccgtctttcccaggaatcctgggtggagtccaacacaatcacacggagaccaccatctgagcctatgtcatttgtcctcattctcattccagcatgagcgtttctgagtctcttcaagacgaatctagttttcaccttcacaggatataaagggatcaacctagaggtgggtgggagggtcctagagggcaggggaacaaccattttccaaccttggctttaataataaaaaccagctgcactgag

SEQ ID NO: 5471 - DNA, 640 bp, Homo sapiens
gggggacccctccctgccagcccgcggacctcgcatgctccctgcatgagactcacccatgctcaggccattccagttccgaaagctctctcgccttcgtaattattctattgttatttatgagagagtaccgagagacacggtctggacagcccaaggcgccaggatgcaacctgctttcaccagactgcagacccctgctccgaggactcttagtttttcaaaaccagaatctgggacttaccagggttagctctgccctctcctctcctctctacgtggccgccgctctgtctctccacgccccacctgtgtccccatctcggccggcccggagctcgcccacgcggacccccgccctgccccagctcagcgctccctggcggcttcgcccgggctcctagcggggaaaaggaaggggataactcagaggaacagacactcaaactcccaaagcgcatgattgctgggaaacagtagaaaccagacttgccttgaaagtgtttaagttattcgacggaggacagagtatgtgagcctttgccgaacaaacaaacgtaagttattgttatttattgtgagaacagccagttcatagtgggacttgtattttgatcttaataaaaaataataacccggg

SEQ ID NO: 5472 - DNA, 681 bp, Homo sapiens
tctctgagcctgtctcagtagagtactggctccttttataatttgttaccagctttacttttgtgataaaatattgatgttgtattttacactcttaagtcttaaccacagtcagaattatcttaatgtagattataattttggtcttttaggaaaaaaaaacaaaaatctgatatttatttcaaaatgtattgaagcaacaaaatattaatattgtgccatatgacaacaaagtctttcctaaatactccatctgtttagtactgtattgtggaatatttgagttctatttccatacttgaaaacatggaggattttagagatgcctgaacaatattatttaagtagtatgtgaccgagctataaatttttgtttttgttctaagtagatttaatttgggaactgacaggacaatgtttttaggtttagcattttgtttaaaaacctttaaagaaacctttagaaggacttagacctcacatattaatgttgagaagttctgcttaattttaaaatggtttctataaagggttttattgtatgaaatagaactttatatttttgcatatgtatagatagtaattatatttaatgtataactatagcattatggtgagtggaatttgacattgtccaaacctttttcatttttgagtgattaaaaatgaaatgtcctttgt

SEQ ID NO: 5473 - DNA, 154 bp, Homo sapiens
ggaagggccaggagccccttcggacctgccctgccagtggagccagcagtgcccccagcactgtccccaccttgctagggcccagaaccaagcgtcccccagccccgagagggagcctgtcgtctcccagggaataaaggagtgcgttctgttc

SEQ ID NO: 5474 - DNA, 2632 bp, Homo sapiens
gtcttagaactccaagatgttccataagtgtttttacttgtgaggaatgagaagccatccatggaaatttgaactgagtgggggcagagaaagagtgcagatccctttgcttgtgaaagaattatcagtgagtgaaaggccatcaccccaggaagccaaatgagggagcagcaacatgtatatgagcttcctatggaattgtccttatgtgaagctttgaaggtgtacagccactctcccgggtcttcaggttcctaccatttccatttctgttaaagtggatctgcatatcttcagcttactaggtgacccggatgctgacatctgctgctgcagaaaggaagacttttcattgtaatttcgcttagacccttttatcagtggagctccagttttcttacctagctgtcacttttttaaatgcctctgggggttatttttgctttccttggcccccaccaatttatacatctccattttctgacctctggactaactggttgctcagcaaggttctgaaggagagtttcttgcattggacaggcccagtcttctcccatcattgccctgctgtgactccaaagaaaggagcttcttgctgacagtgccctgtggagcaaggctgtgtttcctaccccacacggtgctcagtgggtgccagccctcagtgtggctttgtgattgctgccctaaaggagaatgctctttccttcctcactggtactgcctgctgttttctaagcattgctcctgcacagacatggagtcccagccccagcaaggctcttctgttcccatctgttgacaatgtcttgtggagcatttttgctgaggaaaaggtcacttgtaaacagaggagaaagggaaagagtacaaagccctaagtttattgtaagtgaaaactgagggaattcctgtcttctttaggagtaatgattcatagatctagataggtggaaatatcattcaaaatagtcacttgagctcacaaaaaaagcaaggaagaattctcatgtcctttgtcttccttctgtagccattaactgctgaatccatgtgaggaagacaggcttcccttccttccccctccttagtgattttttctttaacagcataagtaaagaggactttctggttcatttttgtttgttttgttttgttttgttttgtttacagatgaggtcttcctgtgttgcccaggctggagtgcggtggctattcacagatgctatcatagcacactacagcctacaactcttgggctcaagcatcacgcctagcagtttctggttcctttaacagcaaaaggaaagagaggttctgattcttacctcagggttttttggttgttcattgtttttgtttttgtttttgttttgacactgcagagcacaaggctaaaggttacagctgagatctttggaaccaaaggcagagcaagcagagcccgttgtctgggccccacaccactgcaggcaggtggatagaagtgcggcccctctcatagtatgcccataagtcagggcatagggcagaactacctgtcatgttgctacaccatcctgtcttctcagcatctccttgcctgttttctttattagtccaaaggaaaacaacagcaacaaaatctgtttttaaaatgtcttatatgaacatatatcaaatatccatgcgctgaaacccacataccatcacttggcaattttttagaataagaccccattattatctattgctataaacctagccagttctcttgctcttctgtattttcctatttccctgccatcatctgctatttctgccacttctcttagactccttgtctgcaaagcccaagctagaactcactgtctatggcagaaggacatccagagcccattctggagttttgttttttccttctgccagatgctttgtgtcctgtcttccttcctcctcatatttctgtttctcatttgtgttcagttttgtgcagcattgctagcactgcttttgtgaccagaaaaggccataacatggtccaggatcatcattcttctgactctagatgggacacttgacagtgacttgaaacatttgcatattcaggaatgcatgagatttcaagagagcctacagtatgaaatcattttcacaaaataagcagcttgcttctgaaatgctgtctttcccagtagctactcacctgcctctggtggctgggattcagatgccacaaaactgtcagtatctatagaccaggtctgtgccacctcctctctcctctgtgctcagtgaggaggcagtaaatgaagttacaggctagcacaatacctaactcatgtttcccagtacacctgtagatattactgtacttttatgttctcaagaaataagttgttgcctattcagtgttacagatttctttgtttctttttaattaaaatacaagaagcagctgaggaaagggagacaaggtattttatttctgactgattttagaaaaaacttgtgtacatgtgtttggaactgttgaaatgccaagttttctgtataagtgtttttgtaattaaactttcagattttctttgttttttaagaagttgatgtgcttgtttgacatttgtctcattaaaacttttctacgttg

SEQ ID NO: 5475 - DNA, 1536 bp, Homo sapiens
cacttctacaactggcatttacatcagtcactctaaatggacaccacatgaacctctgtttagaatacctacgtatgtatgcattggtttgcttgtttcttgacagtacatttttagatctggccttttcttaacaaaatctgtgcaaaagatgcaggtggatgtccctaggtctgttttcaaagaactttttccaagtgcttgttttatttattaagtgtctacctggtaaatgttttttttgtaaactctgagtggactgtatcatttgctattctaaaccattttacacttaagttaaaatagtttctcttcagctgtaaataacaggatacagaattaacaagagaaaatgtctaactttttaagaaaaaccttattttcttcggtttttgaaaaacataatggaaataaaacaggatattgacataatagcacaaaatgacactcttctaaaactaaatgggcacaagagaattttcctgggaaagttcacatcaaaaagagtgaatgtggtatatttctaaatgatatggaaaatagagacagatttgtcctttacagaaattactgagtgtgaataaaaacttcagatccaagaaatatataatgagagatataatttttgttaataagacaaaggtaatatattggatacaaagacacaaatgtattgtgtgttcaattattttgttgtcttgagatttaatattctttccaagagcttttaatgaagcagagagctagtacttcattttcactggatacattttcagcatcatgagttgtcacagcctctgagcccctgatctgaagccagaagggctgagtgtattgtaaacttattcttgcatgttgctgtctgggaatggaccacactacagcaggtagttctgggggcgatactgccgaaaggcccgaacacatgtattttggctgcaattgaggaacttgggatgctattaattttgtatttcagcaactgccccttctcctatcccaaagcaccaattactgccctctgcctcagcagtaccagtataagatgacattccaaagactggaggcaactcagcctgagttaattcacaaaattatgccatgctggggcttgagcttgagcttgggcttaggcttgggctcagcttttgaccctcaggcatctcctttcccttcctgtcttcctctcccttctcctctgctgcagcatgattttcttaatcttcagacactcactattttcatgaacagttaccctctgtccccacaaccaaagacaactcatggcctcctttggcccttgtgtaacattgcaaacctgtggctttgcaaaatgtacccaggtcacaaggggatttttttttttttagcaatgatatccctgtctgggtcactttttaagcttgtaaccgcccccccagacttataatcttaaatgtattttcctttgtttaagctgctgcttcctctgtttcattggattgtgccagttatcagtggctcttgggttcaaagtaataaagaattccaaaactg

SEQ ID NO: 5476 - DNA, 3313 bp, Homo sapiens
tatctacttaccatagatacctttcataactggtaactgcaaagccttttgtgctggacccaggaatccttaccatggagcagcagatagtcccagtatactcacttatctcatccatggatgtaaatgatgatgaatcaacatagtaactgaaatgaaatcttcttgattttaaataatatacgaatggtgctattaatattgctaaaatcaacgtgtgaagtgtgttgtggaagagacctgtaagtatggggggggggcgatattttatcagaccattttgtaaataaaggcagaatttgtgttgaagattcttatatgaataaccttcctggatttgtttagttttgcaccaataaaactgtgtactactgtttgttggtttaagagtagcagattgaaatataagaagccagattagactctaaaattgtggccattggaatctcatttataaatggaccttttaagtatattaattcctcttcagaattgagctggacacatttggcattcttagtttgtcatataaccaggtttatccttagtctaactgcaagggatggaacctgccccaggtcacaatcattctgtccaatccagccaaggttccctccacatatgaagatggaccatggcaggatacaactgattgtgtggcaccatgtattagcagtgggaatatgtatcacatatgatgcagcctttcatatttcagcagtttgccactgtgactgtctggcaagcccccagatggcgttatattaattggattagattattttgctcaccttatgtaatactgtaacttcctataacctaatattttcggtatcattaaccaaaatttcacactcatagttgctaaagagaatgttattcaatcattaaactctgaactgatttcttctatacatttaaattatccaccctcaataatacgggtgctcaaccctatgcattttttaagtgttgctatttcttaattaaattgatttcctgtcattttgaatcatttatcacctgcgatgcatgattctattaattttgttatgttactgttttaaccaaagctgaccgtaaggataaaacacttaagttgttgctgagtactatatatcctcaatatgcatgtctgcccatcacatcaaatgttctgtcaacaagatgtttggtaattttttttaaaaaggttggaaaattaattatagaaggttctatactgtttttttaattaagaaactaagtctagcaggctaaaggttaattgtagtgattttttttcacatagatatctttctatgacctagttagttactgcaattcagaattagttcacattgcataaagaattacttgttgtaagcaaaatgctgaaactaccaaaccagtggatgaagaccactaagaactttgcacataatcatacaatcttttgaaaatattttgcaaatatgtgtttagacaataagatggactagagttcgacaaaatgatttctttatttaaattttgtataagtattttcttcgacactttcaaattatattgtgttcttgatatatgctgtatatttatttgttagtgcatgtgtttttaatttacatgaaaacatgagttaggagaaattacaggttgaaagatgaaatgcctgtatgtgctctgaagaaatggtaattccagattgtgcagggggaaacaaatctattttgttttgttttgttttttgagacggagtcttgccctgtggctgggctggagtgcaatggcgcgatcttggctcactgcaacctccgcctcccgggttcaggggattctcctgcctcagcctcctgagtagctgggactacaagcatgcaccaccacgcccagctaatttttgtagttttagtagagatggggtttcaccatgttggccagatgatctgaatctcttgacctcgtgatccgcccgccttggcctccacaagtgctgggattacaggtgtgagccaccacacccggcctatattgttttgaaagcatactctatatatagttatgggcagaggcacaggcatcctcagcagctgattcaggagatgatggtaaagctagctaactatgaattaaacattcacatatccagtctacctggtccagtaataatacaagcaaatcttgtatttcaggaacaaatcaaggttctcttaattttttggcttatatacaatgaagtaaaaacttgataaacatggtttcaaattgaggaggagagtcttggatgtatgttttaatatgtataccttataattctgcctctagccaaatgctatgtttgcaaaatgtggcatctgttagtttttattgtctgtgtcttctttgtttactataccttgggtaattttgtgttaccaaaaaaaaaaaaaaaaaaaggaagtgtaatgtcagacacacaagaaaagcaaatcagtgttgtaagcttaaagtacaatttcaaaggtcactaccaacagcagggttttttttatactttgaaaacattatgctacatatcattgccattttcatattttggggttttgctactcttatacaatggaatcaatggaaatgtcatccagccactgaattgccattattatatctaaaaagtttctaagatgacagttatcactattttgttttatctccatgctgacatttgaaagaaggtactagtatccctctagccagattgcttagtttttcgttggtaatcaaacaacagttgtactaaaggaaagtaaagctaggacctaaatcagaatcatagttgcctgcatatatggtaacaaggtcgtgtgcatttgctttcacagtgatgagtgagaggatgagaagaaattatttgacatttttctgtggttgaatagaagacacctttcttttgtctttaggtttaggaggagatactaagatactggatgtttatcctatcttagtttggttggagtaataagagagaagaagagggtggactttggcttttcagtgttttttcccctaaagagtgatattgctgacgtttctatcaattttacacataatatgtggctatgaaaccatatatctcacttaagtaacaaagtaatcactttgtctatcactaagtaatagacaaaaatcattgtctattatttaaagccaacaaaacagtgtaacagttttaagttcaataatgttaagtattgtatagaaatatattggaggcaaagttcagttgatgacaattgtgtatatgttactgatgctgtaaattatttttaataaagaaaattgtattatcacattt

SEQ ID NO: 5477 - DNA, 1734 bp, Homo sapiens
cgtggtgcggggcagcgtggccccaccggactagcacatgatgaatgtaaagttggcacaatgaaaatgacatcgctttaatggccttgtgtttgggatgtcctgtgtatgtgttcagcattcttaattgctgagtgtctttttggcttttcttttggttgtaacttaagttatagcttaatttatatttaaatgttttaagtataaatcacctctagtctgcatatggaatctgttcatttctattttcaggatatacttttgagatgtcagtgattgcaccaatactttgtgcttctagtggctttgccataattcagtgtcaccaataaggcacagcccagttagcagcttagcccccctagcaaaccccaaggcacaaagtgggcatcctgactcatctctaggtctgtggtttctcccctcttcccttggcagagttattgagggcatgatctcagggctgctaagataacatttctgaggattctagatgatcctcttaaagaataaaagcacatccgtggatcggacatggctgcatgtgcctgcttaacagggccaacttagttcctactgttctgtgcccttcagtggatggaacgtgagtgtctgatcatctctcttggaagttttctgaaccttccaagctctgtggtgaggacaaaccagtgtttgaatcatatgctgataactgtttgcctgtgaccctcacaccttgttcttcagggttttaatgattttctgttgacaacttttgcaatgctttcccaccaaagtgcttacttgtaaagaaaactaaatccttctgtgtccccggcagcctcagtgcagcaacagaagccaagggagaatgctgctggtttggcccatggcacagccagcttctctgaccagtaatccggggtgacttgagggtctgcaaaggcatagaactccccagtgttttccacctcattctcccagattgagctcccttccaaaggatcgttcctctcattgcacagccatattacaaagggtttcctgctcaagtgatgttttggtaagaacttcgctgagttccactgtggattacagtttgtatggactactactgtaaattatagcttgtttggagggatattagtcattattttattcatgacaggtagactacaattcgaacttagggttacctcagtctttagccattactgcttatttcttttccccaagtcacaaaaaacttgtaagctgctgggttaaagcagaggccacctgtcagatctaccctacccttatttggttacatggcacctgagagtttcactcagaccagggatcttccttaggagggtcaaagtgcagatcagaccatgcaggtaaggtgaaccagctgcacggaccaggttcccgcaaaacattgccagctagtgaggcataatttgctcaaagtatagaaacagcccacctgtgcccactttgaccattggtgaggatagatataaaatcacttcttccaacgaagcctaggtgaaaatctatttataaatggaccacaactctggggtgtcgtttttgtgctgtgacttcctaattattgctaaagaactactgtttagttggtaatggtgtaaaattacattcagctccttcttgtcatataaaaggaatttggagggtgtcgcttaaaattttattccacctgtacatttgtcactttaaaattaaaattgagctggtatgagagat

SEQ ID NO: 5478 - DNA, 246 bp, Homo sapiens
aggcagctggcttgctcctactttcaggaagggatgcaggctcccctgaggaatatgtcatagttctgagctgccagtggaccgcccttttcccctaccaatattaggtgatcccgttttccccatgacaatgttgtagtgtcccccacccccaccccccaggccttggtgcctcttgtatccctagtgctccatagtttggcatttgcacggtttcgaagtcattaaactggttagacgtgtctc

SEQ ID NO: 5479 - DNA, 250 bp, Homo sapiens
aatcagagattttattactcatttggggcaccatttcagtgtaaaagcagtcctactcttccacactaggaaggctttactttttttaactggtgcagtgggaaaataggacattacatactgaattgggtccttgtcatttctgtccaattgaatactttattgtaacgatgatggttacccttcatggacgtcttaatcttccacacacatcccctttttttggaataaaatttggaaaatggaaatg

SEQ ID NO: 5480 - DNA, 863 bp, Homo sapiens
agcctcccaagggactgaagtatacatttagttaacacacatatatctgatggcacctataaaattatgaaaatgtaagttatgtgttaaatttagtgcaagctttaacagactaagttgctaacctcaatttatgttaacagatgatccatttgaacagttggctgtatgactgaagtaataactgatgagatacatttgatcttgtaaaaatagcaaaatattatctgaactggactagtgaaaaatctagtatttgtatcctggcaaataatactaatttataatccacagtaaagttcatcctttgactgtgctggagaattccagttgtatttgaagactgattttaaaacttttctgcatttggtaaaggtatgtaaactttcctgtactcactgagtaacagctaatctttaatataatattatactgctatatttaaaaagctgactacttgatataattacttaatgtgatgcttgatataataattacttaatgtggccgggcacggtggctcacacctgtaatcccagcactttgggaggtcgaggtgggcgtatcacctgaggttgggagttcgagaccagcctgaccaacgtggagaaaccccgtctctactaaaaatatgaaattagccagggtggtggtgcacacctgtaatcccagctacctgggaggctgcggcaggagaatcgcttgaacccaggtggcggaggttgcggtgagctgagatcacgccattgcactccagcctgggcaacaagagcaaaactcagtctcaaataataataataacaacaacttaatgtgctgctgcttttccataaccaacattttaaaaataaatgaaaaacagg

SEQ ID NO: 5481 - DNA, 663 bp, Homo sapiens
gaggcactctcactcacttatgtttggatctccgtaaacacatttttgttcttagtctatctcttgtacaaacgatgtgctttgaagatgttagtgtataacaattgatgtttgttttctgtttgattttaaacagagaaaaaataaaagggggtaatagctccttttttcttctttctttttttttttcatttcaaaattgctgccagtgttttcaatgatggacaacagagggatatgctgtagagtgttttattgcctagttgacaaagctgcttttgaatgctggtggttctattcctttgacactacgcacttttataatacatgttaatgctatatgacaaaatgctctgattcctagtgccaaaggttcaattcagtgtatataactgaacacactcatccatttgtgcttttgtttttttttatggtgcttaaagtaaagagcccatcctttgcaagtcatccatgttgttacttaggcattttatcttggctcaaattgttgaagaatggtggcttgtttcatggtttttgtatttgtgtctaatgcacgttttaacatgatagacgcaatgcattgtgtagctagttttctggaaaagtcaatcttttaggaattgtttttcagatcttcaataaattttttctttaaatttc

SEQ ID NO: 5482 - DNA, 632 bp, Homo sapiens
ccccggcatcctgctctagggcccctcatgccccaggctggagcagctctcctaggtcacagcctgctgggctgggtcgcgtagcccagggtggaggcagaacgatgctgctgtggtagccctttgcctttcatgcccatgcttgattcttgcacctcagcagctgaaggtctcagagaccagtaatcagaaggcatccgactgcattaagtgtgcagcgctgaaaagacatttacaactaggccagggattagccactgtgggagggtggacaggcaatggttcagtggcctggctgttggcaggaactccaagtgcccaggcctcttgggcagcttagggccctgcctctgtttcatgatgcatgggtcatttgtcttgggtgtcctatcccatatggagaagaaaggggctctaagttctggctcttctttctttggggttctctgtacctgaggaaaccaggccctgggtgactttgcagatctgctcaccctcggtgagcaacagtgtcagccatgcaagcaggacagaatggtgactgggtgcccttggtgagctgtgtatttcctaggaggtagaaaactgtgggaaactgtggctaataaaaactaagtgtgagcgtcctggag

SEQ ID NO: 5483 - DNA, 3916 bp, Homo sapiens
gctaagaatgcaaccttacgtacagcttatgactaccaatgtcgtcgtctgtatcttagaatcttgcagcagtgaggcaacaatttgttgaaatggagatgaaatcatggaggcatttctacaaatgttgaatgaaggtggttttcagaaagtatacattctagtgagaaatctacctacctattagctttgactcaattacactctgacgcatttttagaagtgcaatatcttttcctaccaaaagaacatcatggactatcaataaatacaaattgaatattccaagccaaaaaaggaagattaattgggttctttccattttgatgatgtttcatggtggggaataagttatacagaagatatttaatacacgcctctttagaagaaactaagggaaatagcaacataagaagaaaagaggtggcttctcttttccataatgttcttagaccattgctggtgaagtaacagggtgtgtgtccctaaagggtattacttctctgtcgacttttatcaagggctactgacgtttcattcttgcccttttgtcatcaacacgacagagtgtctgcatcactgcagatcttcatggaaacattctggaccttcttccttgcacttggagtgagaaggagctggactaccaagtcaggcgtggaatgaagtatgctcagactgcatgatgggccaaggtattcaggccaggagacctcgtcctcaatccaaagtgtaggggagctgcctgctaacgatgtaaggtcagtatttgaaaatcatggccactccaaaggatctcctgttcttgctttggtgtgtggctccattccttgattttctatctcctggtggtaccagatgctctgcctctcatacatgagttgaagagtttggaacttgtccttgtgccttgaagagtagagacaatggctaaacgttgacattctatctgtaaaccatggttttcacgcaccactaatatctgccattttcaatggctttaaaaagattttgaaagcttgctcaataatgttcaataatataataataataaaggcactgaggtcttctcagttaccccaacacctactccagagttttgaatacttgtcagcagtgcaaaaaatattatctgtttaaccacttatctatatgtctatctatctatctatatgtctatctatctatctaaatacttgatttttatttattgtcttctctgttaaataacttgagagcaaggtttctttcgtgtaaaagaagctgttgtaatttcatccaaatttgatctgtttccacctgctgaatggtgctctgacaataatggaacagaaagaatccttatcagcatctgattccaatgtcttgttacaggtcaaagaaaaaaggattgacagaaactagctaccttatatatattttttgataataaggtgggatataaatagattttggtagcaagtgtaatcactccgtatgatataataaatttctaaaagatttgagagcatctcaatttttaaagcaataggagtctagcatccattctgaaaaatcgcaaataatgcttagcttgctgtgtctgattctgttgttcaccattaaggggtagacagttaattttattatgttaacaagtgagggatgaatgttttcatctgtggtgaacctttatttttagaagtcttcatgttatctatttgtattatcatgtttatgtatggattttcaatttcagtaaccgaaaacttaagccttagtatgaaaaactgaggatttataattgaaaatgaaaaaaatatgttactctctatcatcagaattatagtctttggtgctctgttttcaatggggcatattacataaggttgtttctttcaccccaaagagactactaggttaccactctgggcattgcctttccacctaacccctcaaccagtaagactctacaccatattgtagccccactattctcctctttatcacagatgaagtgccagagcatcagagataggtagctcccaacctcttgctctggatttgcagaagagggggagatgtacttacccaggataagaaaaatctagtcaaatccaccccaaatcttccatttaacaggtaggaccatcgaggctggaccaaaccactttttccactgcccttggtgaatctattcctagtggaccccatttgggcatgtgcctagctaccttgggaaggcatgactataagtcacacctcaggcttggaaatgaaaggattctatagaatattctatactttccatagctggagaggtagtcagaaattcagtcttgctctgagtccacagtagctttaaaattcaactcaacattgttgtcacgtaacggaaacatctagacctggtaataatccaggaaattgcaaaatggaggccaaaagtaaggtgggtttctctggaaaggggtcatcctcagtctgataataccaagtctgacgctgaggttatgaatcattaccatggcttggagctattggatgcttggggtcttgggatagatagaaggtgaggttcacagttggagcttttcttgccattgaccccaagctcaccccagccttccttccctgaccctgagactcaccctatctatctcccctattccctcagtttgcagaatgagcaagatagagtctggctaggagggaaacatctatccatctctctaatctttgcccatcacctcctgttgcaatgagttcccgcaggtgacatacggactggcctctctactgtactgggtgccatctcccaccatactctggcatttttatgtaaaggataatttcttgtacctgagtctaaaattacaacgttatcaaaattcacttcgtttttcctgcattttaaaagtaataaaatattatttgagattattttgaaattaaatatccttaaccaatgattaaattcataatcatttcatcttctttcataatcatttcatcttctaatctgaatttgttttgaacacagccttgcagaaaagcaaaaaatatttccccgctcaaattttgccgacattttataccagtatccccttcattacagtaaactaaatcataacttacatcatccattactagctgatcataaattgttagtattttaaggtatgcaactatgtgattgacatctgtaaggctagtttaatagacgtgctaaatatcactgttctgaatatctgtgccatagttctgatacccttattggaatcaaggcagtgctgtttctgtttacaagttatcaagataagagcagtggcatcacatttgttgttgttgtttttttttttgaaatagaaaaaaacagaagaagctctgccaacaataaaagattttgttaagtggtataaaaatttgtgaatgttgaaattcaacatgcttcatattataaccaacctgcaagaatattgtggtcaattgtgtgaataccaaatcagtatatactgtatactgtactatgaaaatttgtatttaaaggcaaagatacaagtaattgttggtataattggggaaaagggtattcaatatttattaagtaacaatgagaaatgcaacaaacttccttatttatgccttatgaataaaagagtgtggaatgtaaggtgaaattttatgtgcaagatcctgaaggaatgggtattcttgaaggcagggactgtcttttctatgtttgttctgtacagctctcagcacactcttggtgcttgataaatgttatgttatataataccaataactaagcacatttttagatcttttttcaaatggcttgtgtaaaatttggttaatgtacaatggttggtttgaagctatcatgtaaaattggcctctccaaatataatcagaaataaaccgaaaaaaatat

SEQ ID NO: 5484 - DNA, 1686 bp, Homo sapiens
cctgacagacgctccaggtcgtctagcaagccgccctcccccgccgccagcaagaaggtggcgtctcgcagctcctcgttattcgtccgcctcgggtccatccggccccgccgcccgactttgcgctgagacccaaggggaagccccgaggggaccccgcgccgtaggagggagtggaggagccggcgaaccgcgatggagccggggcccagcacagcgcgagcggctcctcggctgttcgtgctgcttccccagcttcttcaccggcacctgcagcttccgcacctcctggtccgcgttcacgttagagttaacgtcctccatcccggccccgctgcctccgccgcccgcggccctctcgctctcgcagcaacaagggaagagccggaggaaagaggcgtccacgccgctcactccagccgaggcccccgcatatagcagggccaggccccgtcgccagggttcccccagcgcgggtcccgaagcaccgctggccacagatgaaccgcctcctcagcgcaggtccgggattcggggaggcagcgccaatatccggtctctgcagccatcttccctccgtccctccgcccaccgagggtcggccctgtaggtgacctcagagcgtcggggatgggcgtggccccgtcgggcgctaagaagacctagcgcagagaggaccgccgagctcccgacggggcggggccaggtgtgtgaggggcggggattggacccggaggggcgtgtctggactgccggcggaagtggaacgcggcctgacctgcgacggaaagccactgcaagcccggaggcgaacagaaggcattccgcgagccgggctgagttggtgaacacggtcctcgttcaccccgcctattggtctgggcgtgtggggtattctccacccacttatacggcgtgtgggaccgacgggcccgtcctgcccggctccggtccggatctcgagtaggcgctcaatgggattcggggagacgtagtttactttgttcagcaaatatttaaccgatgcctattttaatgggagattgtttccgctggcgggagcctcagagaccgcctgtgtcctttaagaaacccgaatttcagacagttaagagaggtctaaggtcaaaataataatcataatttcttcttactggccagatactatgctaagccctttttaattttattattattatattttgtcaccgaggctggagtgcaatggcccgatcttggctctgcaacctccgcctcccggtttaaagcgattctcctgcctcagcctcccgagtaactgggattacaggcgggcgccaccacgcctcgctgatttttgtattttagtagagacggggtttcgccattttggccaggctggtctcgaccctgacctcagggtgatccgctcacctcagccactcaaaagtgctgggattactggcgtcagccaccgcgcgcccggtcgtgctaatcactttgaaaggcattatctcatcggttaaaacatagttttccggacttaaaagtttacagcacactggcgcagaagatggaaaaccgctgcttgcctttctccgtttattgactcacattctgctctttggatcattttcttcggaaaaagttttccaaagtgtgtcttgtgtattaaaagttgtgtattaaaagtatttgaacacgctg

SEQ ID NO: 5485 - DNA, 740 bp, Homo sapiens
actcctgctggaatacaaaattcttgagcatctgcaaactaaaaattgacttgaggttttttttttcctagtcattgggaatgtagagcagtgtatcttgcatgtcatcggaagaatagatttttgttttggttttgttttgaaaatgactctgaacatttatttccattgcaatttctgtggctgaggagacttaaactttacaagtattatccttttaagatcattttaattttagttgagtgcagagggcttttataacaaacgtgcagaaattttggagggctgtgatttttccagtattaaacatgcatgcattaatcttgcagtttattttctcattgtgtatgtatatatcgcttttctctgcagcacgatttctcttttgataatgccctttagggcacaactagttatcagtaactgaatgtatcttaatcattatggctgcttctgttttttcattaacaaaggttattcatatgttagcatatagtttctttgcacccactatttatgtctgaatcatttgtcacaagagagtgtgtgctgatgagattgtaagtttgtgtgtttaaacttttttttgagcgagggaagaaaaagctgtatgcatttcattgctgtctacaggtttctttcagattatgttcatgggtttgtgtgtatacaatatgaagaatgatctgaagtaattgtgctgtatttatgtttattcaccagtctttgattaaataaaa

SEQ ID NO: 5486 - DNA, 131 bp, Homo sapiens
gattttctctgctcttctggaaacaaagggctcaagcacccctttcaaccctgtgactggggtcctccctcgggctgtaggcctggtccgccattcagtgacaaataaagccattgtgctctgaggcctgc

SEQ ID NO: 5487 - DNA, 4233 bp, Homo sapiens
ctgcggccagagtgaggctcctgctgtacagtgccacccatactgtgatgtcgatgcccatgtgaatgaggcccaccctcgccctgcttgccctgccgcaggccccccaccagaagccatctcccccgctgtgtgtccccaggcgcatcattgctccactctcccctgcagccgcggctgctcggccactgaccaggggccctggcagacattaggggatcagttgtatttattgtattttatctgtgtgtgctcaggaggtgagcctagtgggtccttaagtttggttgtgaataatctcttgatagacaatttatacccatgaaagttcagccaatgcccagagtgaccaagcagcaccagcaggcctgcccaggatgctgaaagcagatttcttcttgatttcacttctgatggatgcatggggctctgggggaatgctgggaaaatgggcaagcagagtgcacagccctcgttctgccagctggagccaagaagcacagagacacagaggcgcctgcccctcagctccgctggtctgtctgtgcatccactgtgccgtgggacatatgtaatttgtgcagtgtgacatggacttgctgtcctaatggatgtgttgtgccttgtgtctgtcatgtgtggccagcgtgattgtatagaatccagagtatgtagagagccaaaatgtgtggccctgtccccaagctcagcaccaccggccatgaccagaggttgctcggcccagggtctgggagctgggctaacaggctgacacttcggcagggtcaccaggaggcacagctaggggcatgctcacatgggtaggtcagttctttggtccaagcctctggtgcagattcaagctcctcctcttagaggaagcagctccttcctcccacaggagccccaagggagcactcaccctcctcccaattggatctgaatagctgtgttcctgatcccacataagcatgtctcatccttgccccactggtgagaggaggaccttgtgcctgcccagagcctgcaggacagcacgccttgaggtcagaggcctggcccttctttacagatgtagatagcagggtaggacgcccaggccttctcacatgggcaccatgaaacactttcttccaggccacctgagccttcgttcttcagcccgactggaggaacagcagctctgggaggcacagagtgcaggtctcaggggcagaagacatgggttccagttctggttctgccacacacccaccggccttgaatttctctggtggtctcaagacaagaacaagagctgactctagaatcttctgcctggctgacctctgagcccatgatccctggcttgctgtgcttctcttggatttgaggagagtttatgaatccatccccctgttttcagggacctctgccttctcccacaccccttacactagtgaggactccttcggcctcttgtgtttccttccttttgtgaccattacgccccctccctgtttcttatcaccagcccatcagcccactgactcccatatggtagaaaaggtaccgtggctgctgcagggcacatggagggacctaccctctgggaaagcccttgtgtccctcccagagtccttcaggtaggccctcgcagatgctgcttgctcagaaacaacccgtgcatccctgcccatggattctgcaggacctagaagagtggcattggttctaggaacctgagagtggagtgaggccagcatgcaggaaggagtttggagagagtgtttgctgtgatccattgaaagctccacattaaaccccagccctgtctggccagggagatccatgtgctcaatgttgctgggggacctacaaaagtcaaacattgctcagtaaaatgcctttggctggtcgccagctgtgcatgactgcagttcctagactctaacttaaccccaactttgcagtttctagagctttttgtctgtaatggtgattgggtctccactgtagatgcatgcagtgttcactccaacctcagaggctttcttgcttctggggaaatggcaggtggttgaaaccctgcacatcctcccagggccagccccagaatgggcctttctctgcctgccctgcccttggggccacctctgcctccagcaggcttgagcttgccccaggccttgggcataattatttccccccaaaaaaggcacaaaaataggttttggatcaaagaagtgtttctcagtgaaatgaaaacagtctttttatagcctttagcttgtgagtttggaagtttggggggtcttatgtttgttttgcctcttctgtttcttggaggagagttgaggcttttcttaggtgcatacacagacccaggtgaacacgctgactgtgaacctgccctgtatccggagctgtgctgggcactgaggggatgcaacaaaattaggagaggatccttgctcccaacgtctacttctcctacctcaacaggggtccagggtgcagtgaactcagttcttggcccttgggtgaggattcatggatgaatgaaagctagacctgatggggaggcattatgactaaataggcccagcctccttcccttccagctctgtcctaggagcataggcgggaaatctgagtagagtctgactgcagtttttgcttatgatttgtaaaagccgtcatggggtcaataagaaaataggggtgatggagggggagaagcccaggactgggagaatcgcacatgccccaggggttttcaccaaggattttcaagacaaactggagtaagaattaaagccccagaggatttaattatcctggtttgcaaaagagcctcccatgccagtaccgcccagccttggaggccggaatgctcatggcccctgtggtctgcttgtccttcagcccatgcccagcagatacctctctgactggagacgggctcaaagctggattagaaaggggagaggcacttgtgactttgtttgactctgtgactcacttcctcgctcacaccttgtttgaactactggactttcaactggctttccttaggtcaggcaagcagacagctccccactgaagaggtctgtacagtgacaacccgggccggcagcaaggacacagatgcagccacagtaaggctccatcaggactgggtcagtgatggcaacaggatggccaaggatggctctagaacactctgtccatgcgtcactccccccagttttatttttagctttggcttcagggagtgacagccatcacaaatagccacattctgctctactctccaacataccagattctacactgttgttatttcatgagacgtgaatgttgcagagagtggggggattctggttgttaaggaacttacactggggagctttactcttccgtgtcaacaatgtgactacatgttctccagattagccacacatgcaaacatcagtgtccttctagctttagccgagaaagaaaccagtcccagggaatgaatggtggtctccccactcccggcagcactttaggcagcccataagctatgcgagaatgtgaacgctcaccttgctccgtcacggttctgacctaccacataaacaggaagaagccagtgaccggaacagctctaggaataacaagtcagaatagaagtgtcctttatattaccagaaaatatgggcttggcctaagtcgctgtctcctaacctgccggggtcattccccaccaaacaccccatactaaggagccatgagccacctggacattcaccttttctttgaccatctggagtctggggcaacttaaggaggcaccacacagtggtgcaggcacatttccaagcgtaggtgtccctggcttttgtggccaaagctagtgttatggtcaacaacaggccagggtctgtggggcactgaccttgaaagtggcaaaatggaggtttcacaggctgtgcgggagcaggacggcttgcttcatctaacaatctcagtttcctttaaaaaaagaaagaaaggaaaagatttcataagcaggtgtcagtggacagtttaagtacttaaccatttctctttcttcttatggatgtgaactgtgctgtggataaatcatttgtatttcttgaatgttctctatgactaacagttattaagtcggttgtgtatatgtgtaactaatgtaactgccttttaaaatttcattacaataaaaatgactttgctctgaac

SEQ ID NO: 5488 - DNA, 2734 bp, Homo sapiens
ggacagctgccgcccggtgccacctcgtggtagactatgacggtgactcttggcagcagaccagtgggggatggctgggtcccccagcccctgccagcagctgcctgggaaggccgtgtttcagccctgatgggccaagggaaggctatcagagaccctggtgctgccacctgcccctactcaagtgtctacctggagcccctggggcggtgctggccaatgctggaaacattcactttcctgcagcctcttgggtgcttctctcctatctgtgcctcttcagtgggggtttggggaccatatcaggagacctgggttgtgctgacagcaaagatccactttggcaggagccctgacccagctaggaggtagtctggagggctggtcattcacagatccccatggtcttcagcagacaagtgagggtggtaaatgtaggagaaagagccttggccttaaggaaatctttactcctgtaagcaagagccaacctcacaggattaggagctggggtagaactggctatccttggggaagaggcaagccctgcctctggccgtgtccacctttcaggagactttgagtggcaggtttggacttggactagatgactctcaaaggcccttttagttctgagattccagaaatctgctgcatttcacatggtacctggaacccaacagttcatggatatccactgatatccatgatgctgggtgccccagcgcacacgggatggagaggtgagaactaatgcctagcttgaggggtctgcagtccagtagggcaggcagtcaggtccatgtgcactgcaatgccaggtggagaaatcacagagaggtaaaatggaggccagtgccatttcagaggggaggctcaggaaggcttcttgcttacaggaatgaaggctgggggcattttgctggggggagatgaggcagcctctggaatggctcagggattcagccctccctgccgctgcctgctgaagctggtgactacggggtcgccctttgctcacgtctctctggcccactcatgatggagaagtgtggtcagaggggagcaatgggctttgctgcttatgagcacagaggaattcagtccccaggcagccctgcctctgactccaagagggtgaagtccacagaagtgagctcctgccttagggcctcatttgctcttcatccagggaactgagcacagggggcctccaggagaccctagatgtgctcgtactccctcggcctgggatttcagagctggaaatatagaaaatatctagcccaaagccttcattttaacagatggggaaagtgagcccccaagatgggaaagaaccacacagctaagggagggcctggggagccccaccctagcccttgctgccacaccacattgcctcaacaaccggccccagagtgcccaggcactcctgaggtagcttctggaaatggggacaagtcccctcgaaggaaaggaaatgactagagtagaatgacagctagcagatctcttccctcctgctcccagcgcacacaaacccgccctccccttggtgttggcggtccctgtggccttcactttgttcactacctgtcagcccagcctgggtgcacagtagctgcaactccccattggtgctacctggctctcctgtctctgcagctctacaggtgaggcccagcagagggagtagggctcgccatgtttctggtgagccaatttggctgatcttgggtgtctgaacagctattgggtccaccccagtccctttcagctgctgcttaatgccctgctctctccctggcccaccttatagagagcccaaagagctcctgtaagagggagaactctatctgtggtttataatcttgcacgaggcaccagagtctccctgggtcttgtgatgaactacatttatcccctttcctgccccaaccacaaactctttccttcaaagagggcctgcctggctccctccacccaactgcacccatgagactcggtccaagagtccattccccaggtgggagccaactgtcagggaggtctttcccaccaaacatctttcagctgctgggaggtgaccatagggctctgcttttaaagatatggctgcttcaaaggccagagtcacaggaaggacttcttccagggagattagtggtgatggagaggagagttaaaatgacctcatgtccttcttgtccacggttttgttgagttttcactcttctaatgcaagggtctcacactgtgaaccacttaggatgtgatcactttcaggtggccaggaatgttgaatgtctttggctcagttcatttaaaaaagatatctatttgaaagttctcagagttgtacatatgtttcacagtacaggatctgtacataaaagtttctttcctaaaccattcaccaagagccaatatctaggcattttcttggtagcacaaattttcttattgcttagaaaattgtcctccttgttatttctgtttgtaagacttaagtgagttaggtctttaaggaaagcaacgctcctctgaaatgcttgtcttttttctgttgccgaaatagctggtcctttttcgggagttagatgtatagagtgtttgtatgtaaacatttcttgtaggcatcaccatgaacaaagatatattttctatttatttattatatgtgcacttcaagaagtcactgtcagagaaataaagaattgtcttaaatgtc

SEQ ID NO: 5489 - DNA, 644 bp, Homo sapiens
caccccacccccataccccttcttccacccccagactaaaggaagatacttactctctgcccctctccatttataccaaagaaatcataggtgaaaccccctaccctccccaacgttaaatgctcgagaggaatcttccacaaggcagggccatgcacgcaacctgcacacgcacttggagggcccaggtgtctctccaccagcccccatgcagtagggactggaagatatgtcatctgctggttgtgttatcactcccaccccctaccccagcccgtcttccggaatttctcaactaaatttcattattgggcaggaaggaggtcatgggttcatttcatttttgttttttgtgtttttaattaaaagaaaggttacctcagttttcactccttagacatggatgtagctacctttttttgtatgtcttttttttttttaagcaatcgtgttgaattaggagtatacttggtgtggaaagagtatgaatttgccatgtgatttgcaaatggggggaagctactgtgagcgtgtgtttttttaatttacactatagagtgatttttttttcccccaacgtcaagtttttaccttgcatgtactggagtatttatttcatctattaaaatgttatgtttctcaga

SEQ ID NO: 5490 - DNA, 642 bp, Homo sapiens
cacgccaggcacgtgcatgttttccctggtcccgctctcatcaaatgtagctttaaaagaaattaacaaccttggtcatgcctcaagctatttttgaatcagatgtgggactctctgggcactatattaaaataaagattacattaagattattgaatttgtggtgggagtctagggctgaagaaaaacagctctggagaataattagtatttgaaagtgacaaacaatagccttttgttgataaacaaattctgaagaactcagcttcctctacttatatccttcattgtctacaaggacagtgcgttactttttaaagttatgtctatgtaataaagctgttggacctatactgaatttttggtaccacagtttccctcttgaatgtactaaaacacaaaaaactgacagctctgagctgtggccttaccttggaattaaacatttccacctttgtaaaacatcctatttttgtttctacctttggctttccaggtcaggacctctacctgatcagtaacctattattttgtaatgatttttaagctgcagaatctctaccttgtctttgaaactggcacattagttgtggcacccatgtgattagatagttcctgacaaaataaatgtatgtccttcca

SEQ ID NO: 5491 - DNA, 3963 bp, Homo sapiens
gcaggacatgctgaagccaaagccaataacacacagctaacacacagctcccataaccgctgattctcagggtctctgctgccgccccacccagatgggggaaagcacaggtgggcttcccagtggctgctgcccaggcccagaccttctaggacgccacccagcaaaaggttgttcctaaaataagggcagagtcacacgggggcagctgatacaaattgcagactgtgtaaaaagagagcttaatgataatattgtggtgccacaaataaaatggatttattagaatttcatatgacattcatgcctggcttcgcaaaatgtttcaagtactgtaactgtgtcatgattcacccccaaacagtgacatttatttttctcatgaatctgcaatgtgggcagagattggaatgggcagctcatctctgtcccacttggcatcagctggcgtcatgcaaagtcatgcaaaggctgggaccacgtgagatcattcactcatacatctggccgttgatgttggctgggaactcacctggggctgctggcctgaatgcttataggtggcctctccttgtggcctgggcctcctcacaacatggtgtctggattcccaggatgagcatcccaggatcgcaagagccatgtagaagctgcatcttgtttatacctttgccttggaagttgcatggcatcacctccaccatactccatcagttagagctgacacaaacctgcctgggtttaaggggagaggaaatattgctggggtcatttatgaaaaatacagtttgtcacatgaaacatttgcaaaattgtttttggttggattggagaagtaatcctagggaagggtggtggagccagtaaacagaggagtacaggtgaagcaccaagctcaaagcgtggacaggtgtgccgacagaaggaaccagcgtgtatatgagggtatcaaataaaattgctactacttacctaccacatgccaagcactgtgctcagggctaaacgggcattgcctttagtgatcacagcagcttctacggtgtatggttctgtgccaatgtattgataagagggcacacactgtgtacagtaaatggcttatccagctggtgagtgatgcggcagattgagttttcttctgtgattcggtggagactatcagcccaagatgctttaagtgcacaacattacagggaatgcctgagtgcctggccaaagggatatttggtttggccatctctggatgcctgattgccaagctcaggaccaggcaatgtgactttgcatcagcaacaaccagcatcccttgaccaggcctgggccagagtattggtctcctctcagcccctgatcctgtgaagtaaggatgtgggggaagacctggcaaggacacagatgaaacacaaacaatagtaattctcaggccatcatcagtggagccatgttaatgtaatctgatggcttctccagggtccacaggaagtgaagaatctgtttcccagcagtggactcaaaacccatctgggctcctaaccttcctgtaaacccctttagtggcttcattagagcaggcgttcagctcactgttctattcatctcaaggaataatgggcttagagcagtttctgtcctgctggttaacttgtttggcctattccattctggattttgtcaagcagtagacaagcaattagacaagaacttggaggcaccatttgtatccactttttagacttaatagaaacattgaagatgaacataatctaccaacgaaagacgtgattcaattcaacactcccttcccatgacccaggctgggcaaggaggccacgtgatgtggagggcacattccttgcctgcacaaactcaccatctgtgcacgcagtggccttccctaaaatcagggaattgttttaagtcttatcaagcagccaagggatgaaagagaaggtgggttttcatcaagactggaaggtggggacagggatgagcatggagctggccgtgggcctggggtaccaagagactccttgagagaccaggcaaagcaagtgattgggacagaggttatctgtcccaggttatctgggcatagatgcaggtgagcccatggccctcccagtacctcctgtctctggcctgttttagaaggttctctcctccccaaggagacacaacaactcctagggccactgaagatataactattgcccaggtttctggtctctaggctggggaagtcctctgggtaggaatcagcaagaagatcctaaaacaaaagctcatccatttgcgttccatgatgctgggatttacacttgaggcttagctttgctctgccaacttcttcagagctgacacaggatgaaggcaatgccatcctcaaacactgcaggcatcacagctaacaattgtgaagtcgtcttaactcaccataaaaaggaatccactcccaggcagccctacttctttgctttgcccagcattttactgattcatacattatctcacttgtgccaacactcaagaagcaggctacactgacactggtattcctgcctccatattttctttaaaagacaaatcaaagcagatatattaagtgactgttcaagagcacacttggcccaagtggcagagcttggactggatgcatgttttccagctcctcatccagggctctgaccagtttaacctgatgcagtcacgtggaggagcagtgcaggcacagtatgtcccataggcccagtgagatgcattcttggttggctggccttccacttggctacacagggatgtacaaggcgatcccatcttgataagaccaccacctcagagtatggagctcagagagggcaggcatgaagtttccttggctggtgcacctagaattggctgaactcatgagaagttgatatagaacagtgcttgccacagagcggggactcggtaagcacttaatgaatgaatgaattctaagtcaatccaagagtctgatgatttcttgaaaagggtgttagctaaaggatcttaggcatgactgtagaatttgtagttgcaatagaacagagaaagaggaagctttctgtctccttaacactgagctgtcatgttttaaagcttgctcacatcttggcacatttaagagacagtcaccccaggactcaaaaatagggaagtaacagtaacgcaggggaaacgttttctgtttggaggagcaaaggctgagaacactgtgaaaacattttgcgcgcacaatagtaacctgggtaaatgcagcgtgaagggattttagtcacacgtggtctttcttacaaggaaggtggtgggggtgcagatgaggttgctagagaatgttagaggatccctctctggattggagatagggaaagaaagttgcacggctgctgaggccccttctaggtggcaaggctgtgctccctggttctgatgatgtgcctgggtggacatggcccctgtgagtttgtacagtcttgcagcaggatctagaggggggatttccagccagggctgctagacggaggcctactcttccatctttcctgatggcaggatggcctggccagggcctggaagacagagacctcctgcctccgcctcagtaagacgacaaggaaaggcaaatgcccaagggaaagaaaaggaaggctcttctccccagagttccccatgcagacatgagtgcgtgctcagttcagaatcacttctgagaactcatccctaatgctgcagatttgggctggaacagattcacactgtctggtttcaccgaggacatgaaactccaccttgcggggataaagagagaaaaacaaattcatcaaatggaagacacattgaaagtgtttttccttaatgcttatcctgtttttaaaccattatttccaagttgacaccttttttaaggaaaaataaatattttgcggcattaaagccata

SEQ ID NO: 5492 - DNA, 1862 bp, Homo sapiens
taaccaaaatgtgcttaaaaggaaggtactagcaagttgttgtttttccaagagaaaactcaatttttatagttaaaaaatttatgatataataaatcattttttatatttttaaacaagaaaattggaaaatatattataagaaatcagaatcttaaaaccattttttattgatattttaatcaagattgttctttaatgtgcatttcagaaggttgaataatatgcattcccatgagaactattttagtattcaacatactgcttagtagcttgtccccagtctattatcatttgtaattctgtttataattatggcaattgtatggttattcacataccatttgtcatttatcaagcacatcaggattatctagaacaacattgaaaatgatacatggattcctcttccaaggcaacaggattcattatactcagacttcacggcatctacatagcatccactgaatcaagttttggttggtggtatacagactgctgcactgctcctcaccatgttcaagttagcaagaggcactgtggtgtggcaaggaaaggctctgtgtgctgggaatcgaaggacttgagttcaagttctgactaataattattattatttttagagacagggtctcactgtcacccgtgctggagtccagtggcataatcacagcttactgcagcctcagcctcctgagctcaagtgatcctcctgcctcagcctcccaaatagctgggactacaagggtgtgccaccacacctggctattttttttaaacatactttgtagagacaggttcttgctgtattagtcaggctgttcaatctattggccaggctgctattgaatcccaccttggcttcccaaagcactgggattacaggcatgagccactatacccaacctgagtttaagttctaataatatagatttctatttgtactaccttaggcagtgactcatatctctgagcctcagtgtctttatttgtaaaatgatgtctgttctcaaaaagagtttgttttgagcatcagactgtatggtacattttaatccttaaagtacaaatgtggaggatttttttttaaaattgctcaatctctttttgtacttgttttctccttttcaaattaggataattacttactcaatgctcattttctggcctgtagcaaggattgtaaaataacctaatttgctttgagcttatgagtagtatatacttctgagaggagtcttgtcctttaaaacttcatgagcacctgagaaattcttaacagagaatggaaagcttggaatggggtaaatacagtggtttgaataacagtatttgcagaaaggaaaaagtattatttgctagggtagttttaggaagactgacagctctgaagaaatctttagggtaaatgtaggtaattttgcacctaattgccaggccaagtcactgtttagaggaagaaccagccccagcagggggcataatcacctggttcacctcttccggtgtgaagataagtgataaggtaaagaatgatgccagtaagtatagtagaaacactctattgcatttataaatgctaaaaatttccgaatgaattaaactcttattgggtggtttctttttttaaaaaaattaaataattgcattatgggagaatatgatttattttagcataaagtgaattttagtcttttatggcttcagaattatttcaaaatatactttattgaaaatcaatatttggttattttaattgttcaaaagtaatttgttctttacatttattagtaaaagtatggtgtgtgaaactatatttccatgcaacataataaaatcaataaaaggaatggattttcaag

SEQ ID NO: 5493 - DNA, 2975 bp, Homo sapiens
gagcgggtcaagaaattgaaaaaaaaaaacaaaacatttaaggggttaatatcctacacaattcatttacttcatttgaatgttagagccacttatgtttgtgtttctaatttatagtttaaatttatttgtgtttctaatttatagtttaaatttatttgtttctaatttatagtttaaatttatttgtgtttctaatttatagtttaaatttatttgtgtttctaatttataatttaaatttatttgtaaaaagttaaatgagagtgggtctttctctcatgttcactctggcatcttttagcatttttttaatttgataattataggacgttagcatgcatatcgagtttgcccttatgtggtgggagttcaaacacacaaagacccactgtatgcacacaactgttcttgctggtttgggataggctgccatgcttttttaatgttagtacagcctgtatattcattacggaattcagataaaatttccttatgttctgctgttatgtttgatcgaatcctaatcacagtgagctcttcattagctcaatatgtggtttgccctctggaaacagcctttccccctttttctgtgtattggggatgggagtaataacattttggggaggtttttaaatctcccagaagaggaaagtggcctgctttggcaggtgtgtgcaggatagaatatgtttcatttgttccggtgccaagaatgagcgctgtactacggtagttcccttaggatttgtatgtgctctaggctcatgaagatactgcctcatgagctgtggcagttgtactcttttttgatgacctgaaaagggattatttctgaggaatgaaaggctcccatcatgactgtggatgtggaaaaccttttctagctgagagcatttatatctacaatacattttaaagtcagagttcatgttccctgttttaatcacatgactacatgtcccagtacacaaaagggcactggttggcgttctccttaatgtatttagtaaagatcagaagaaatcctttaagagtttaaatgcccctggaacaggcatatacaggctctagtcaagaatgaattcgagtgaaggaaagctgtgtgacacctggcattcctctgtgttcatggagcttatttgaggctagaagatggattttaccatctagacctctctggctaatagctagtcttcaaccatctgacataggaatttacttcttttccttgaatggagaacactttaaaaataataacaaacattattataaactaatatatgtgagagtacttagttgaaacaaaaaggagttttagtagacagtattatactacatttgaaaatcaaggagcagtttatgcaacgtaaaacgtttacaaactgcagcacaatctactgttcgtgaatgtcaaagtgtcatgaggaaagtgtctatacaatcacagagttatatttcctcacaaagttctttacaaagagtgaaatatgtttttatacctctcagtttcagttagaggcatattttgtgtaatatttatggcttaaaatggactaaaggtcctgttcttgccttgtctgaacttgccgcttttgcattctttgagttcagtttaaagacagttactttaagcccattttaaaccctcaggctagaaatcgtaccactgttaattagccacattatttggtctaacagtttatcattctgaaactgagcttacctaatacattgataaattatttcaaaggtatttttatagttcaaatcgcttcacttttaccctgacacgtataaatgactaggaatgaccttcagatagcgtttagcaactgtaaccaatctgacaataatgtgttcatcaggtacctgtggattaaatcacatactggcatatttaagctgaatgtcagtctgaaaaataaatgtactatattaactcaaataccactctctgtgtaggtattttgtcatatgtttaagaaaaagctaaagagaatggaaatcctatgacaataactatgacaataactatgacaagtctttcttcaaagtgcatgcagtcttttgcagtaactcattcagccaagtatttgttctctacctcattcagtataaggcagcctttaatttgcttagaaggcaacattagaaggttagagttcagcaggaacatagaattttaaaatgtgacttcaactgaataaatttgaatttctgtagggagtaaagaatcaaaacacctatttaaagactgcaaaatatgataattatttttaaagtaattgattaaacctggtaggttttcccaaaatgaaaaacaatcagttctaaaaccaaagctgatttttagaaaatgtgaaaatgtaaatcaaccctatccataatagattctctaaaactttatcttacagtcactttcaaataactattcaaaaatgtaactgctatattaacgtcttaaaataatttaaaacattttaaaatatgaatactgtagtttaaaacaaagaatctaggggaaggaaaagtagacaaagaaatgccaattccagtccaaagctgtatttgccaagttttcttagaatgacttttaccgatttatgaattcttatacacagaatgcataatggaaatactgatttttgtctaaagtggcattattgactgctgctgtgatgctactataatgtaatacattattaaattgtttcaaggtgctgttttgcctaaaaattttgtgtgtcttgaaaactatagtactgggtattgagactctgcaaattctcggcatgcttggcatgaggtaatcggtttttattcttacaaaattgtaactatgtaagtgtgtttattaaaagaacacaaactaaaaaagttaacaggaattaaagttgtgggatgaaaaagttacaggataaaaaaatactgtggaaaagtggcaaaaaaaagttgtggaaaaaaagtaa

SEQ ID NO: 5494 - DNA, 2975 bp, Homo sapiens
gagcgggtcaagaaattgaaaaaaaaaaacaaaacatttaaggggttaatatcctacacaattcatttacttcatttgaatgttagagccacttatgtttgtgtttctaatttatagtttaaatttatttgtgtttctaatttatagtttaaatttatttgtttctaatttatagtttaaatttatttgtgtttctaatttatagtttaaatttatttgtgtttctaatttataatttaaatttatttgtaaaaagttaaatgagagtgggtctttctctcatgttcactctggcatcttttagcatttttttaatttgataattataggacgttagcatgcatatcgagtttgcccttatgtggtgggagttcaaacacacaaagacccactgtatgcacacaactgttcttgctggtttgggataggctgccatgcttttttaatgttagtacagcctgtatattcattacggaattcagataaaatttccttatgttctgctgttatgtttgatcgaatcctaatcacagtgagctcttcattagctcaatatgtggtttgccctctggaaacagcctttccccctttttctgtgtattggggatgggagtaataacattttggggaggtttttaaatctcccagaagaggaaagtggcctgctttggcaggtgtgtgcaggatagaatatgtttcatttgttccggtgccaagaatgagcgctgtactacggtagttcccttaggatttgtatgtgctctaggctcatgaagatactgcctcatgagctgtggcagttgtactcttttttgatgacctgaaaagggattatttctgaggaatgaaaggctcccatcatgactgtggatgtggaaaaccttttctagctgagagcatttatatctacaatacattttaaagtcagagttcatgttccctgttttaatcacatgactacatgtcccagtacacaaaagggcactggttggcgttctccttaatgtatttagtaaagatcagaagaaatcctttaagagtttaaatgcccctggaacaggcatatacaggctctagtcaagaatgaattcgagtgaaggaaagctgtgtgacacctggcattcctctgtgttcatggagcttatttgaggctagaagatggattttaccatctagacctctctggctaatagctagtcttcaaccatctgacataggaatttacttcttttccttgaatggagaacactttaaaaataataacaaacattattataaactaatatatgtgagagtacttagttgaaacaaaaaggagttttagtagacagtattatactacatttgaaaatcaaggagcagtttatgcaacgtaaaacgtttacaaactgcagcacaatctactgttcgtgaatgtcaaagtgtcatgaggaaagtgtctatacaatcacagagttatatttcctcacaaagttctttacaaagagtgaaatatgtttttatacctctcagtttcagttagaggcatattttgtgtaatatttatggcttaaaatggactaaaggtcctgttcttgccttgtctgaacttgccgcttttgcattctttgagttcagtttaaagacagttactttaagcccattttaaaccctcaggctagaaatcgtaccactgttaattagccacattatttggtctaacagtttatcattctgaaactgagcttacctaatacattgataaattatttcaaaggtatttttatagttcaaatcgcttcacttttaccctgacacgtataaatgactaggaatgaccttcagatagcgtttagcaactgtaaccaatctgacaataatgtgttcatcaggtacctgtggattaaatcacatactggcatatttaagctgaatgtcagtctgaaaaataaatgtactatattaactcaaataccactctctgtgtaggtattttgtcatatgtttaagaaaaagctaaagagaatggaaatcctatgacaataactatgacaataactatgacaagtctttcttcaaagtgcatgcagtcttttgcagtacctcattcagccaagtatttgttctctacctcattcagtataaggcagcctttaatttgcttagaaggcaacattagaaggttagagttcagcaggaacatagaattttaaaatgtgacttcaactgaataaatttgaatttctgtagggagtaaagaatcaaaacacctatttaaagactgcaaaatatgataattatttttaaagtaattgattaaacctggtaggttttcccaaaatgaaaaacaatcagttctaaaaccaaagctgatttttagaaaatgtgaaaatgtaaatcaaccctatccataatagattctctaaaactttatcttacagtcactttcaaataactattcaaaaatgtaactgctatattaacgtcttaaaataatttaaaacattttaaaatatgaatactgtagtttaaaacaaagaatctaggggaaggaaaagtagacaaagaaatgccaattccagtccaaagctgtatttgccaagttttcttagaatgacttttaccgatttatgaattcttatacacagaatgcataatggaaatactgatttttgtctaaagtggcattattgactgctgctgtgatgctactataatgtaatacattattaaattgtttcaaggtgctgttttgcctaaaaattttgtgtgtcttgaaaactatagtactgggtattgagactctgcaaattctcggcatgcttggcatgaggtaatcggtttttattcttacaaaattgtaactatgtaagtgtgtttattaaaagaacacaaactaaaaaagttaacaggaattaaagttgtgggatgaaaaagttacaggataaaaaaatactgtggaaaagtggcaaaaaaaagttgtggaaaaaaagtaa

SEQ ID NO: 5495 - DNA, 218 bp, Homo sapiens
gccctggctgccttgctgggcccttctgggactgtgcgctggacttggagccccttggagtatggcttttcacatgggcttctataccgcttcgactggaagatccacctccccactgccttttctcactcagatggggacaccgaggtccagaggaaaagacacctgtcaaatgtcacagatctgggaggggacttaagacttatcatgccaagagg

SEQ ID NO: 5496 - DNA, 604 bp, Homo sapiens
tagaaatgttggcagcttttagtaaaagcatttactctgttaccatgagaaaagtttgggtgtcttctgttggtcatagttttacatctgattttacagaatggattattgattttttggaagttgagactttaaaaaaaatagatcttacttgcgaaatgcgatggttgctgggaatacctgaaactgtggattatattgcttgacttctacctcagaatcttctttgtttcatgacttaatagtgctttaagtttggtatattatttgacctctaggaattctttgttttacacagaaataaaaattttaaaatagaaaatgcttttactttgtaaggtaagagagtatccatatgcttagatgtgctcgtttctaaaattctagaggttgatataatcagctcatgaatgcacagctatgctttttgtgatagattgtacataacatcagcagttgaaaggtaaaacaattgcttttttttttttttgcatttgttaagtgactatggtactttgtgattccttaatctatagatgagtcagctccacacttgagtctctttttagagggaaatcagtaataaagctgtaaaataaggaag

SEQ ID NO: 5497 - DNA, 252 bp, Homo sapiens
aaatattacttcatgttcctcctttctaaattactaacttttgttatactggtactgatattttgtcccatttcactctcttctcatacgtgagtacttaagaatatgtacattcttgctctgcactgtatgtgtgagctatatggtattgtgtaaattttttttgaaggaaaatggaaattcttgagaaacagtttgtttaaagaaatatattcaaaatcatttgtgaataaacttgatcatccatctcaa

SEQ ID NO: 5498 - DNA, 452 bp, Homo sapiens
atgtgtaacacaaactctggacatactttcgtaactgaaatgaattcacaccagtgtgctctcagtgcggtgttctgtgacatcctttgctctctgaccaacttaatgacttttgtatgtgtgctctctttataatgtattttatatcactttaatttgtataaatgattttcttgtccttgctacatgaaaatattttcttttttgcttcctgtcctaaaagtcattggttaaatgtatttgcttcctgtggctaaaaataagtctcacccattgcagttatgtcaacgaatggcctatattcctcagctgcaatgaaatggtaacatttgaaactaagaaatgctaaatattttgtttctcgacattcctgatgacgtctggtcttttcttttcattgtattttaagcttacctgtgaatagcccaataaacatgacacactgtgttggc

SEQ ID NO: 5499 - DNA, 2035 bp, Homo sapiens
acctttggaggggtcatgatgctgctgtgaagataaaagtagaatataaaagctcttttccccatgtcgctgattcaaaaacatgtatttcttaaaagactagattctatggatcaaacagaggttgatgcaaaaacaccactgttaaggtgtaaagtgaaattttccaatggtagttttatattccaattttttaaaatgatgtattcaaggatgaacaaaatactatagcatgcatgccactgcacttgggacctcatcatgtcagttgaatcgagaaatcaccaagattatgagtgcatcctcacgtgctgcctctttcctgtgatatgtagactagcacagagtggtacatcctaaaaacttgggaaacacagcaacccatgacttcctcttctctcaagttgcaggttttcaacagttttataaggtatttgcattttagaagctctggccagtagttgttaagatgttggcattaatggcattttcatagatccttggtttagtctgtgaaaaagaaaccatctctctggataggctgtcacactgactgacctaagggttcatggaagcatggcatcttgtccttgcttttagaacacccatggaagaaaacacagagtagatattgctgtcatttatacaactacagaaatttatctatgacctaatgaggcatctcggaagtcaaagaagagggaaagttaaccttttctactgatttcgtagtatattcagagctttcttttaagagctgtgaatgaaactttttctaagcactattctattgcacacaaacagaaaaccaaagccttattagacctaatttatgcataaagtagtattcctgagaactttattttggaaaatttataagaaagtaatccaaataagaaacacgatagttgaaaataatttttatagtaaataattgttttgggctgatttttcagtaaatccaaagtgacttaggttagaagttacactaaggaccaggggttggaatcagaatttagtttaagatttgaggaaaagggtaagggttagtttcagttttaggattagagctagaattgggttaggtgagaaagaaagttaaggttaaggctagagttgtctttaagggttagggttaggaccaggttaggtcagggttggattgggtttagattggggccagtgctggtgttagtgatagtgtcaggatggaggttaggtttggagtaagcgttgttgctgaagtgagttcaggctagcattaaattgtaagttctgaagctgatttggttatggggtctttcccctgtatactaccagttgtgtctttagatggcacacaagtccaaataagtggtcatacttctttattcagggtctcagctgcctgtacacctgctgcctacatcttcttggcaacaaagttacctgccacaggctctgctgagcctagttcctggtcagtaataactgaacagtgcattttggctttggatgtgtctgtggacaagcttgctgagtttctctaccatattctgagcacacggtctcttttgttctaacttcagcttcactgacactgggttgagcactactgtatgtggagggtttggtgattgggaatggatgggggacagtgaggaggacacaccagcccattagttgttaatcatcaatcacatctgattgttgaaggttattaaattaaaagaaagatcatttgtaacatactctttgtatatatttattatatgaaaggtgcaatattttattttgtacagtatgtaataaagacatgggacatatatttttcttattaacaaaatttcatattaaattgcttcactttgtatttaaagttaaaagttactatttttcatttgctattgtactttcattgttgtcattcaattgacattcctgtgtactgtattttactactgtttttataacatgagagttaatgtttctgtttcatgatccttatgtaattcagaaataaatttactttgattattcagtggcatccttataa

SEQ ID NO: 5500 - DNA, 1676 bp, Homo sapiens
agtggcaaagagtgaaagtgagggactggcctggagtgggagttgccacactgccccaacagtgattccctttcaaagagctgtgcttcctaaacattctggggggttttgccagagtcttccccttgctcatcctcatttccaggacactgtcattttagtggtctgagtcaagtcccgtatacattcaagaacagggcataggcgtggaaggtctggaaagttgggtctttttcccttacattgggtgacttgattggccccctctcatgattcctctgtgcctcagtttcctctttggtaaaatggggggaaatgtttctccatgtggaatggaagacagcatggcccacaacgtgggccgagtcctcagagaaatactggaaatcattggtgtggttctggttgttttgttgttttgctgccacgttgttgggctaaggtgccttcaccccaagctgttagtgttccagggcaccccaagctgtcagttagaatctgctcttctggctttggtgtcttgggctttgatttcaggtcaagatggaggggcttctccagttctgagtcacccacgtgaaggtaaagaccctttctatttccagaaagtgtcaggagcacagaaacttgaggaagtacagcctggagccagtgtcccagtgtcctttccattggtaagagttggacagggccttcaggaaaggggtaaaccgaggacatttcagtgcttgcttttgtctctgcctactgtcctgtggtagatcagctaccaggggaacacatttgttctcgtggggttttgtcctggagagtgtagtgaagtccgagagccctagctgccaacccatggtggatggtaacttctgtctcatcaagagtaaaacagtcctgcacacagcagggtgggtttgtgcctttggcccaacaggtacatagccccataatttctgaattattctatgcacttgtttccctcttcttttattttttatttgatatatgccgagctagaatcctgtcgggtagcttttgtatactaagaacattattattattattatttttgagacggagtctcactctgtcacccaggctggagtgcagtggtgccatctcagctcactgcaagctccgcctcccgggttcacgccattctcctgcctcagcctcccgagtagctgggactacaggtgcccaccaccacacccagctaatttctttttttgtatttttagtagagacggggtttcaccgcgttagccaggatggtttcgatctcctgtcctcgtgatctgcccgccttggcctcccgaagtgctgggattacaggcgtgagccagcgcacccggccaagaacattatttttaaagaagtgttaactttgaggacatatctgttccctggagatatttgggcttgaatcaggagtttgtcctacaggtgtcgcccttgatctcaggatgctaccagggctttgttctcgggatcctcgcacctggagagtgaagacgggcatgacggcaggtgaaggggtttgctgtgaaggaagaggagataaggcatttccaggaaatgggaaactgcctcctcctacacatggggcctgtgctcagaatgggcttagttcttataggatggatgctcagtattccttaataaagtagagttccattctt

SEQ ID NO: 5501 - DNA, 309 bp, Homo sapiens
tgaacttctggatctccagtcagatactatggaggagagagtgatggagggctgaggagaggcctcaggttgttatttggttggggaggcacagagcagaggttcaggtctcagcaggtgtcagaggtgattacagcccttcccatccaccttgcagcaggggctttgtgcctttcatctttaactgggcacctgagatgggaaccaatggggaccatcccagacacatgggtttgtctgtccctgacttctgcctctgagattgtctttgttggtctttgtttaataaacgccccgaccttcctcatg

SEQ ID NO: 5502 - DNA, 267 bp, Homo sapiens
ttccagttgcagcctcacctcctttgcctctctgaaccaaagaagccagccctgcttaccccagttcccaaacacaggaagtgattttctgcctgagctttctgagttctgttccctcccaccccagggctctccatgcttattcattgcatttccttcctcattgcttttacccagtctgctgttttgggaagccctgacatgtattttggtgcctacatattttatcttctgatctcactgaaaataaaattggattttacttgt

SEQ ID NO: 5503 - DNA, 4037 bp, Homo sapiens
ccggagactttgcagtgtgcatggtcaggggtggtgccgaagtgtcttccacctgccctgcggaccgtggaaaataaaaggctctgcccccagtgtgagtgtgaccggttgtaccctggagtagtgtctgccctgagctgccagtgctgggtatcccccagccccaggaaatgtggggtcggccaggaccctcacagctctgaatttgcttctgttatttatggcttttcgctgcttcttggtgccccatctcttgtctgtgtccttccaaccccaagctgcttatgtggcccaaccccactgctgtcaactaggcttgaaccccacagcggctgtgctcttctgggaggttcccgcttgctgccttcagccagggcgctcctcagagctctattttcctgcagacaccagctctccttcctgcctttagatcctgagaaggagggaaatgaggggtgctgacacagtccctctgggagagctctgcctagtctggtttggcgagggcccttgatcaccttgcccctcctccctgtcttctctgattcttttccctcaaaatagtcctgagaactaattgtcacactggctcatcatgtctctgtgggtggggtgggagaaacctctgctgcacacctctgtttggaacctgggcagagcaggaggtaaggcaaaggcaggcaggcaccaagaaccagaccccttgagaaggcgctgtgggtgggtctttgttctgctgttctgcctttcctgacaggtggggttggggcacacagacattggaatatttgtactgctctcgtgccatttgagaggctgctgccccaggcaggccagcccctactcctcttggctacactcatgttgctcagactatatttcaaataaaaaatcttctcaccatgcaggtaggctcttgtattcctctccaagtgagcctggccccaccctattccacccaagggtctttcccagacttcccctgtttgtcccatctctgagggagaacaatacttcctactgtctaaggaaggccttctctagattctggagcttgtggttaggaaaccgggagccctgtactacttagttctctagagaccttctgaaggggtgaggggagcggctccacaatggtcaagtcacctccaagatctccaggctagtgacattggctttagggcgtatcgaaattttctaggcaccttcatctttccttcagttgattttcaacataagagaaccccttactggtaaaaagggaaaagggggtggagaagaggaattttataattttcttatagcattcaagaggtttcttatttcttacagcatcgctactgccacagagaactcaaatgtggcagaactgggattagacttgggagactggctgtcttttcactgatggtggagtcagggcccacccaagcacgaggagcaggctgtgtggaggtgtcgtctgacctctaacccaggtggcatggggttgcgcccagcaggatgtagtggagtaaagggaagagggtgctggccgggtgcttagaggtcatctttcaaggaggcattaaatatcaattataaattattaagtcagataaatatgcctgaccttttcacagttgaaaaaatacattttttcccctctatcaaatgccaagtttttagtggaaatgctaatggcagtgggaaaggttgcctcactttcagagagactctcgctgtctgcacccttttaataattgctcttcctggcaaggctgccacttccctgcctccccagctggcagtggggcaacccaggcctgtttccagctacctgcaaagccagacctagacctgccgtagctgttgtcccatgcctaattctagttacaggaagccatccctgtaccctgggtccattcacaggaatgggttccagaggaggctgatagaagggtttgaaatgactggctggatcccttcctgctcagacacagtggtagctggagagcaggcagagatggtagaattgcaggtttgaccacctgtcgtgaccccagatatacatctccttcctgggaagaacgtgagttggaaaaatgctgagccagtccctggaaaacctgggtcctggcctggattctgtccttagccagctcttaacaaatcccttaacctcactgtctcctctccttcacaatagagttagtaattcccatccaactggcttcacaggcttttgtgagcttatgaatgtgaaagtattttctagtttataaaacactatatgaatgtggggaaatctttacttgaccttagggcatggagggtggagcacattttgtctgctgtttggacttggatgctgattagcagttatgaagtggcccagacacctagccattctttagtaagagtgaagatagcattttaagccctccttgtgtgcctagcatcttactgaacactttctggtgattctctcctttaatcctcacaaagatctcacagttgtcctccattttacggagaagaaaccgaggctccgagaggttaaacgatgtgcagaggctacctgtagtgatggtgctgagtcaagcctgtcaaccactgtgctcgttagtgaccaaggctgctttgacaggctgccagcttgtcagtggtttgcagccccccagacatttgctttcctacttcccatgcagttggggtgccctgccaagtgccaggttctctttggagtccatctgtgccttgtcaccccaaggagggcctcgagcatcacaccgttgacatttcgaaacgtggtatctctacaacctttcattctcattgggatttaccttgccatttgaacaccatcattttttgaggactgtctagaaaaggttgcctaaccctcacagggaacacacagttccctcagagtccagcatcttctggtcttttctttttcaagatttttttaaatggttgtgctatcatttgtcatcatcagaaaatgcttgctgtaacaagcgtttatctgcacattatgctgcagtgaatgctctactgatcaagttaaacagataagatcccttcccttgtagaaactacaacttaatacagtctaagacttgacaaattacttagtatttattttccaactgctttatctctgtaaaatgatatgctgaattattataagctaattgttgtagaaagaactttccccttaacttatgtaaacagtctggttttaaaaaatttgataattgtggcccagtaagctcaacactttgccttccccaagactggggaacctctgtcctgttcaccactgtatattcagcaccaggcagtttctttttttgtttgtttgtttttttgttttgaaaaattaatacatatacatggtaagacattccacaatacaaaagggtatacaataaatggtaagcttccccatggaggtcagcctctagtcccctctccagagttaatcactgttatctatatgttgtgtatcctttcatagcaattctatgcatttacaagtttataaatatgtatatttatatatctatttttaatacaaatagtagaattctatacacagtgttctgaagcttgctttcttatatagtattttggagattattccaaattcatacattgggtcagagtaattctttaaaagttccttgcatataacagtgattcaaaaagtatatggatgaatgagtgaatgctgcatgaatgaatgaatctgattcaattggtagctacagctgttctctcagggtctgatctgaccaagacagcaccttctagattctagaatgtgtcctcctgactaaggggttcaggatactgttcaccttctccaacagatgccaccggagccttaggaactgggcacaggaagccttgggcccctggaggaaaaagttgagactaggacgcaggtcccaagtatgggatttttttgggttcctacttaaaatgcttttttctttattggaaaatgatgtaacattttagagaaattaaaaagcacacatatttat

SEQ ID NO: 5504 - DNA, 5019 bp, Homo sapiens
cctccgcagaggctgggggcctccacccagcagcagaccaaccaggaagcagcttgaactggatggagactttccaaatatggaactaactggagaaggtgcacgaaggagacaccacttggggacctctctgagcaggctctcgtgaatcagctcgtcatcagatggctttggtgcatggcacatagcccactggcctcttctggtgccactgtcacccagggctcccgggcctcaagcagtccccacctccaagtgcctggcaacctaggccctccttgaagtttacactttgccactgctggaggctcccctgagtcctctgcatgagttctgcaccccaagcccttgccccagcccagtccagcagcagatgttacaatctgagtgaggacatgcaggccaacttttaccctcctgcatttgcctggccctgatctcgcctgtcctcagggatccagacttcctctgctggtctggcctggtgactctcagggtatcttctccttccagctactttcgctcactgatctcagcttatcctgcaactaaccatccttgagcccagatggggctcagggcccttccagagcctgtcatgtccttgtgcagtggcctttgatgtgtgttcacgctcttcccccttcactcactcgcctgcttcccatgctcccttgtaccccctcgccacatccctgtcttggggcccagctgcagcctgctgcctgcccttcatggctctgcacatggccctttgcttgagggctccccactccctgcccaccaatacccaggtgaggaacagaccctctggcctctcaccccacttcagtgctctcttccccaacttctctcgggctctttgctcatgaggtgagagctggtgtgagggttgtgtcagcagctgtagccagagagaggtgttgactctgagagaccttgcactccatactgaaaggaggtggggtcacagtgaatttcacatcccctctcaaccaggagtggagggctaggtcccttccccatggggagtacacttgggtgttctaggagggatgcagtctatccatgcacttgggtggaggggagtctctgtgcctgggaattaggacccctgctccaaccatcgctcttgatcctggggccccagctctgggtcctcatgtatgggctcccaaggacccagcagcctggatccttccagagcatccctcctggaggcctgggatggggtaggtctgcagctagcctactccctttggaatgcaataaaggcagcattgtgtgccctgcttgccctcatctggtgtggttggaggtctgtggagtcaaggtccccctctcccaggcaggctctctgagggcattctgtagtcccaggcccactggaaaaatgaatctatattttggttcctggaccgaagttcagtcgcagccttctgtggccacagaaagacagcttgtgctgcttgcacaactgagctgctggtgtgtaccccttagcagggtgtctggggacttacgcctttggaattgctcttcattcagaagaggaacacaaaggaagccacccaggaaggaagcacagagctgggggctctggaaacgccctgtgtctctggctacagcaagaccagcccaggagcccaccagcacctgcctctcagctacttgctgaccatttcctgcttctcaagctgcagagaagcttttcattcccacccccacccggaacctccccttgcctaacatttcccctctatggtaacatctctgacttctctacctcctctgtgctcaggtgactccacatcttctgccccagtgtgtccccacctctcccagcctgtatacccagattactttggtgaactgagagctggagtactgttcattcatttattcattcacccactcattcagcagacatatactgagtgctactttatgccagaccctgggctggcagctgtttggaggcaaagatgtatgaggccatctcaggagagactacttgttaggattcttgagttttgaccaacagaaatgaacttggaccaacttaagcaaggaaaaagcgttcatgggaaggatgctgggatagctcacaaaaccaaaagaatagctgaacaattaattggccctgggaagggtgggagctggggcaactacgaggcttgcctcccaggagctgctgcggttggcagatcaacaccaacttgccattggttctagtgggtccccttccactcaagattcaaattccaagtgaaagaacctggcctggagctcagggcttcatagagtgggaggggggcagtcttccaaaagatgcggactcttgccacatggaatggtggagtacggaagggtggaaagggtttggtaggtaaaccctgaagatgcttctaacacacgtgctgttctcccatctcacgtatgacgactctcccacaggtaaccaaaaccacatttctctctgcttagggaattcaagatcatatctaacttcgaattccaggggtaatgacacggcttctattctccaaagtccagtgtcattagggataatctccctctttcagttttatcacaattccattttgaaattctacaacctgtagattaactggtaaaattaaccatattcaaccaaaattgtataacccagcaagaatggaagaatgggtaaagtctacagtccatttctagaactggtcatgagaactcatgtttatgatgatggacttttgatctggtggagggacccaaaccttcagttctgaagctcattagtggtcctacctgtgtgacaggcatttactattggactggcagtcccaggacaaactccaggaatccccccatgtccatctctactcctgccctcttttacgtagcagcaatcatattttcccttgatagggttcatcattctagatactccgatgacttctttataatgagcctgaagtggcctggtggctgcctcagcttccagttcagttgaatagctactacgtctttgaggatgtgctccttgctgggggactaaactctccacgccagcccagtcccaaacctaaacctcgggtatgagaaaagcattgagatctagcaatagcagggccatgtccacactgcgtcctatccctgaaggagaaacagcgccaggtatggttgccggctccaagcgcatgctgcctcctgcaggcctgacccagcctctcggggtgttgtttctggtgccatagttgaattttcaacaaaccatttcaccaccctctcaagacagctgctgctggtttgtgggttcctgacaagatgagtgaatgcctgcccatcaacccgttactattcttttagctgtaaagtgaattctctggttgggtgcagtatgtgaggaggtcacatgatgtttatggcatttgagaattccatggatattgatggcaggagaggcatgatgggttagaaaagcaaatccaaatccagaacaagggcccaaaagggccaagacaaattactgcccctctcagagccacaggtgtagacaggtgaaaacactggacagtgagtgagctacccacacacgacccactggtgccttcagagccttagcctggagcgacagtgtaccgttgataatggaacgcactggccatgccagactttatggctaggcggtcagataacactacgaggggcagcatggccaccaagtgtgccagggccaagtgttcaggctctcccagagcccagtggtgagccagaagggcattttgtacaaggataatggttactttttggccagagcatcacttggctccaaatcctgggttcccgtatcatattttcttgtcaggacttaccgcaagctatgtatggctccgcggtatgccacccatggaaagacacctcatgcaccattgacctgccaggtcacgtggcctgatggcagcgtcggctgcacaaaagactttcccagctgcaatgccttcgcctgctctaggcccaccccaaagctggcagtcttctaggtcagttggtaaatgggttagaacaagatgccccaaagtggcataaattgcatggaattaggccttagtggcgagggattcgacatacagtcatttgtcctacattgtgaaggaaacattctgacctcaaacagatccctcaaccccagaactttatagaaggggcagaccttggcattttcacatgatttatctcccactctgattcacatatgtttgaccaaggcactgggcagctgccaatttcccgtcccttctgtagtcccagatgaatggatacagacctctttggggaaggctgcaaggaaggttcacaacatgcatctaagtgttaaaataagtttttccttcaaaaatacatttgacttcctctccatttaaggtctggaaatcaagtgggagatcttgactttaccttggcacttgagacagaactgttggcccagaagtctttagttaaggtcattactaggccatatcttaggggcgtctggcctttttcattcctgggacccacagctcgaggtctggtttccatgccctatcccttacgatgagcgccctattttgttccttctgtctatctctgttgctgagatcagggagcccacgttcacagcagctctttcaagcagcctcccaggcctagagaggaaaatcagcagagcctcgtgaatgtatttctcgtggcaagaagggagctcatcttctgggtcctgccagagggcagtgagggggttgatgggctgggtgcatgccagggacccaatcaagcatttttatcttctgaaatctttgaattcctgcctttcttggatgtttggtcttttgatataatttagcatgggccaacatttggtccagatttgtattagccaagccctcctaaaatagtaataacagtatctggcgatttgagcttttacgtagaatgtagaatctctggtgagtgaacatatcaataaagacaacctgaacc

SEQ ID NO: 5505 - DNA, 595 bp, Homo sapiens
ggacagaacatgcttgtgcttctgcgcttctgagggctgttctcccccgggaaccatctgtccccaccttccctttcccagagccctcttcagggaagccacaggacttagacccagctcaatcccacaattgggaagggttcatggagtgagtgtgcagagagtgagtgaggacataaggaaggacatgtcccactccatcccccttcctgctcccccatttcctaactcccccagtgtgaattctcagggtcacttctgcctcctcccgtttcccctccacatccaaacagcaccctggtcctctctatcccccctctcctggggtccctcacatgccccttcccttctgttgtgggctgcacaccaaagcctcctcccctccccacttcctaggcactaggatctctctgtggcttcccctgctgggtggtgtcacctctttctctgctttcagagaaacccttcccgcctttcctcagagtgcttcccaaactgaggtcccatggcacactgtcctgggaggcgttcagagggttccatgatggactaggtttggaaccactgggttaaataaacttagagagggctgttt

SEQ ID NO: 5506 - DNA, 592 bp, Homo sapiens
gacaaaaagccgcagggaccatccctggagggggattcagcaggctcgatcggggtccaggtgctggtatttttcattagcctccaggggattctgatgtagccagcagcgtccttggacaacagtttgagatctgctgcttttcaaactggattccttggagcgctggaaatctcagcgatgtcacagggcaggagagggaggttgtggagggaaaattcagacttcccgcccagcccaccatttcaccaggcagctctaaatttatgtgttttataagccaaggttcacacaaaaaagaaaattcgctgggggaaaaaaacagtttctatggcttaaaaaaaagtctgaagaccaccagtctatttcaatactctattttgttgatgaagaagctggtgaccaaagatacccaaagactaagtcagggggatgcaggggtacaggggtgcctctcactttcccaaagtgagatccacataccacagcaaaatgatttgagccagcctgtggatgaacacatttaaaattttatttataaatacatttactgttacatttgacttctctttattaaatacatttgtgattt

SEQ ID NO: 5507 - DNA, 1236 bp, Homo sapiens
tgggagacaccacccagagccctgaagctttgttccttcggtcatttggaattcctgagggcagccagagctccttggtcctttcagtactaggcagaacagcccccgatctgcatagcctgtgaaagcccacggggacatcagtaaccttctgcagccaccatccaatgccattactgtcaagtgagacttggccactgtagcctgggcctgctgcaggagctcttcagaaaggcacatgaggaccacggtttgcctcagtttctggtaaaacacaaggtctggagtgcccctgcaaagggtattgatggacttcctgccagtgacagagcatgtctattgcaaacaattctctcagttacgttcagcacttaagaacggctaatggcaataggatctttagcaactttttcacatcatagaaggtgcaatcgctcacttgggaacactactgagagtgacttctcttttaaaattgagtagcagatgaaaaattaaaatttgaacttgattattaatatcaattaaaatgttttatttattttattaaaagctcaatattttctatgaattcaaaaatacttcagagccaaagccaacttcaaataccgtgaccaaatttacatgattcatattcattatgcattacttggtatacagacttattttcataatgcaaattaataaaatgacacttttactgcactatagaaatattcatgtatgttaaacttttctgattgaggctaactggaaaaagctggggtcgtattctaagtgctaaagaaggctgcttctactgtatagaacccagggctctgaaacagctctagccgcctaatgcacttcacaggtaactccccaaggtaaaactagactctcttgttggttcgcaaagaaaagttaggacttaacacttttttctaaaattttataattcaatttccaaaagtctactctattttatactgtttctacaaaatattccttataaaaacaaagaacaaaaattgaatatttaatgaattgacattttataaccaacctgtttttatctacggtgggaatctttgatgccagaaatttataaagaggttctgtatcttcacaccttgaataagcataataccataaaaaatgacacttgacatgtcaatgtatttgtcatttcattttaaactcgtatttgtggtttttttcccagataaaaatgaaattaaaccatttctttttaag

SEQ ID NO: 5508 - DNA, 4678 bp, Homo sapiens
ccctcttcctctctgctgaggcagctgcctcctgatcctggccagcccacctctcctgctgtccccgcgtgcacaagtctcttacactggacgcccactgctcctcagcgtccagtcctcctgggcggccccaggtcctggacaataagcaacagatgatattgagtgtcgggtggggaaggaggcccagactctgcttcggccatgatttgtgactgcccaggactctcaggttgggctggccctactcaggattacactgaaagtaatggcctcgtaagtacaggtgatggttttggacacgtcaggaattcctaaaggctgaaagagtgtatccaagtaaggtctgaacctccgaatgccttttatttgggggaacacaaaaccaaacagcagatgttttggacttgatctgtgtacgtacatggggacctgtctgcatatacacacggggaatgccagaagaaggcccagtctgcaccaggcgtctggtcaacttagcacaagggcagtgcctggacggacccggagcccccgcatatcagcagttcacccagtactcctcagagactggtttccctctaaacccatcccgggcacataccacccgtgttttgcatgtatttctcatttcattttagggatgacaaacatttgtgaaaccagtgagagaaggcttgatgtgtataaaagacgtgatgtgcaccacctcgatctcggtgtttcaggcactaaagcaacaaaacaacccatagtatctcattctgtcatcagatccagaagaaatatcctggttttccagcatgtttacccacatgttttggccatggataaagtgaagaggcctactcaccattatccctgcagcgtgacaccttttgattgtcactgaccactcagaaggggccacggcctcctggctgtgttcctgagcccccgtcgtgcctctcccagacagcagctgtctggcccttgctgggtgagggcacaccactgccaggggtcagcctcgcacccaggccaggcagaagctgtgctctgaagctaggacagctggctgagaagtgggttcaggcgaagggtgaagccatgtgtagcagttcctgccagtgcagatctggagaggagctggcccggaaggcgtggttgtgaaagcgcccttcttatgttaggaggccttggcaaaattggatttcttcaaaaatacatgtaaaggtctgttgttgaattgtactctgcccctggaagcagatacagatggctgcctgctgctcggctttgcttttgcttttcccaccgtgttttcatctttgttcacttgaggctttccccagctggtgtgtgcaggacagttcatggtaatgttgccctctgaggccccgtacaccagaagggaggccctggaaaattttgtgcttccaacgtggccttcaattcttgcttttttgcccctcggaagcatggggcttttgagcacacttaaaaaaagaaaaatctgtaacttggtgcttattgatgaattgcaagctggccttgcagatggagatatttatctttcagtttatttgaaagaggtctggtttaaaatttgtagcctacatttgttttatttattgtatttgtgtgtttgtgtttgtttttttttaagggtgagccaggtctagcccaacagtctaaactatccagtcaataccgagtgaagtggcagccagcactgttcactctgtgtcttttgaagtgccttgaaggcccagatgaaattttaaagggagggggtccatgtccttccctcccccaccccgcctcattctttaatcaaaggatgtcttctcccttgtttgagaatgaagaaactcgccacctctgacctacctttgcctttttctgtcatggagaatactcacccttcagaaacagaccaaaggccaaaacctgctgatttttctattgaaaatatgtccccttgcaaagaccctaaacaaaaagttaagtttctttctttcacctatttgtacaactccaagttacagctgaatctgtcgtgactttcctgagatctacccggggcttggctgtctgttctgggcactggctccgagttcccctcctgggatttgcaggagggcagtactgaacctgcattcttctccttgtaaatgtaggccgggtgcccctgttctccgggtttggaacaatacgaggttggtgctgatgggatttacttgcgtacgtgctcttcacaaaaacaccgtggatgctgaagttagagcacgtcgccacagagcttgacatcaatgttagagggtctcttactccccgcccagctgtgatgtttcatctgctttggttgttttggtggtcttttttaaaaatagagatttcacatctgcccagaccccactcaaaacgatttggtcaggttctggttggacaagtttaaaatcaaagtagtgcccggaattccctcaaaccacccaacttcatccaggaatacagtctgcagtgcagcaacagaaccgcttaccaagaactgtgcttacatacctttgtcatctctcttccccccttggaagttgtcctcagggggatttgttcctgtcctggggatttacctgggatggtggctgcctgtgcttttgctcatggccttgacagtgctctagttgctggatctaatggcctgtcttggtttctatcacatgagaaggggttgtttttttggggtgactcggactgaattccccatactgtttccacgccgggacaccatgttctccatcaagctaaagaaatcacgtgcctgaaactgtgcttaagttttgggggaaagatggagttcctatccagagcccccagatttccagaatcgagtgagcttcctggaaggagactgcgtcttctctcaattccagtcatctcagtcgttgtcgttaggtgacatgtgcactttaaatgctctcatcggttggcttcattttcaagacaatcaaatgtattgactgtgttttcttcttagaaaatggagagggttaaaaacatgcaaactgccactttcaacctttgccagtattccctctacccccgtgagagctatctggggggaagaatccttaccaaggtttttttggaaaggtacgaatcttaacttttttccccttctgtgtctcagggtaatactattcagagtcgcccctttgctcattttctcccgtatttgttaccttcctgaggcctcagtattagtcgtgagcacaaagttttgagacctttggcgttgtttcttgatgtgggaggggaggtgttagtgcatgcaagggttgaactagatagaccctgccttagtagagggtgggactataaccttagaggccagaacttgatccagaagttgctgtccacagaagtgctttctatttcatcatttttgtttctagggctctttttctgtagccaggtcttcccaaggattttagtatttgcattggagttgaggtttactctaatgatggtggcccagctgtgcccagaggacagccaggcaggccctgggagggagtttagaaagacagtcctggtgaatgggcttcaagtggtcacaaagagggtggctgtgaggtgaccccagacactgcagaacgatgtgcaccctctgcgttttggatgtccttggaatgtgggagcctagaaataaccctgtggatggaattggggcagcggctgctggagatctgtgtgccttgccttccttcagcaggaccgtctaggtgcgcagccacctatggatgcgtcccagccagccccgtcgctctcgtccatcctcagagacaaagaagagggcagggagtttgggcttggttttgaactttcctttcaatgtagcaaagcattcctagttaaccagagccttggaatctactgcctgctggccaggctttaaaatgaaaagtgttttaatgctgccataaaagggaggcgggggggaggaagggaaaataaaggcatctttccaagtactcatctaatttaattgtcaaaagattgataggccatgaattacttctccatctcactaagggttaaaggcgtgcaaccccccactggctgtgtcccctgccaccgaagtgagtgacctgccctacaaccaggtgggaccacctgtgctgcagtccggaggggcttctgcaggaagcactcaccccccacaccttccccggcctgagcttcccctacctttcgtcaccacctgagggcatgagcacaggccatggggcgtgcctggtgagtctgcctgtggttcaggcttagcctgtggtctcctgtgtgctgctgcccgcatgggatgcgcaggggaggcgtggggatccgcaggagggtggttgggatacaccggatacctctgctctcattgcttgtttgcaaatgctctatggacatttgtgtgctaaatcctattaaataaaaaagacgggttaaaacccagatgctgtatattcatttgtaattatgtataaagtgaagcagttttaaactgtaaagatttttttcagtgtgttttctcgaattttgccacaacatactggcttcgtattttatttatctttctttctagttaccagcttcagacccttgtaaagtctccctcagccctttcaaaaaataataaatttcctgtgaagtt

SEQ ID NO: 5509 - DNA, 212 bp, Homo sapiens
tgaggctcccttcaaatgagcaagtattgaagttcatgccatgtgcccagctcctcctggatctgtgaggaaatatctgaaaccttcaagatgttgtacatgtcttatggaaaatgttgctccatcatccctgcactcccttatctagtatatctacctccataagaaaacataaggacaggcaatcttcataaaaatagactccacctatt

SEQ ID NO: 5510 - DNA, 284 bp, Homo sapiens
tgggaaggaggcctgcacttggacctgacctcaagcctcagctccagtgggaccttgtaaaatgctccctgtcagagctctccagaatatgcttgttggagatccttcaggcagtaagggagagttttgcctccttacacagtggcctttgcttgcacctccagctggagatgggtgtgccccagaagtaagctttgcatctcttacaagaggggagctacaggggcagccgtggcctaggcccaaactctgctctgagaaaataaatatctgtaccacctgtc

SEQ ID NO: 5511 - DNA, 1987 bp, Homo sapiens
gaagggggcggggctccctggctgggcttccggtgtggccggtaggaagtgggggccaggagagcagcgggcactccttcctgggcagggtggggcaggatgcagtgagccagccccagggccagaggagtaggggtcatctgttaccttgacaccctctgcacacagcatagccctctctctctccagggctgttggttctttcttctgactcctgtggttttgctaatggcactttacagactccatggagatgtcaggtggaccatcttctagggcccagcaggagtagggaatgtgccaacagactgcccaggttgccgtggccttccccaccccccagatctcctgagtcatcatgctgtgctaatgaaagggatcatatcatcctctctggggatggtgggtgggggtgtcaatatcctggagctcccttaccccaactcaatgacttgggggtaaagttctcttccttttgttgcctacctcttcctccactcatttgggttcagaataaacatgtcctgaagttaaagaggagttaagtcctaaaggaggcatttcttccccacctccctgacctggaactctggctacagccattgtaggaactccgtgcctggcctgtcagctccctgctaggctacagtggaatagcagagcccacaggcttctcgtggggagttggctccttaacatttcttggcaacagaaagccccaggcacagctcagggaggagggaaggcaggtaagctttggacgagaactggcatatttattttgacccaaatcagggatttccccagtccacccagtactgggctcttaagcaaaagtctgagaaacaagacagtggtttgaattctggggcctttgtgtaggattgtgcctgacctttatttatttattaacagcagggccactcgtctagggcagtggagtctgcgtgtctcctggggctggggcagggcattggcagttacgcagtggccctgaacctggtctggtgcccccgaacctggtctgatgccccctcagctctttgacaatcactgtggctgttgggttttctcctatttctaaaaatgttctcttctttcctaagtgacagttttgaagtattggataaccaagagctcaggtcacacagaccttggagccccatctttgcttgcagcttagctttgagatactaagcaagcgagggacttcactcttgaggctgttttttcctcatctgtaaagtggggatagtggtacggcctacctcatagggttgtaatgagcactaaatgtgaagtgcttggcacagtgcctggcacatggtgagccacagctactgtgagtttctgtttatcccccttttttttttttaagcccattgtttattctttgagaatttgttgtaacttcttcaggataacacctgagtccacaggctgagcagctgtggcccagacagaactgctccggcttggctgttccagcaggtggggcgctggcctcggtgagggcacagcagcaaggttcacggatatccgtgtgtcttgtctgtggccaccaggcacaggtttggcttccggtcagtgtcccgacactgtgcgggaggtgacaacagagcaaagcagcgcaggggtcagggaggtacagacactgctgaaatcacactaccccaccctcagctgaagccccacgttccacaaacttggggtcatagattgtccagtcactggctccctccctgtcagcacagcacagaggaaggggctaactgaatcttttaccacttctggcctggctccagaactttgttctagattccttaaaagtcggtagctgatgtcaaactcaattgagcagtagctttgatcccttggtctgggggtcgaaggaagatggtgctgttatcagcggggaaatgtactatttaagatcagctttgttgtaaaaccatttgttctagaataaaactcaattggaaacgtg

SEQ ID NO: 5512 - DNA, 117 bp, Homo sapiens
agccccatccagcccgttccgcagggactagaggctttcggctttttgggacagcaactaccttgcttttggaaaatacatttttaatagtaaagtggctctatattttctctacgc

SEQ ID NO: 5513 - DNA, 873 bp, Homo sapiens
gaagagcttccaggacgcacccaggacgctgagcccaggagcctgccaggctgacgtgcatcccacccagacggtgtcctcttcttgtcgctttttgtcatataaggaatcccattaaagaaggaaaaaaataaatcccacatttgtgtatgcacccactcacccctccaaatcagcaaaaccgcatctaatttgtccgccgaatgccaaagcaaagcaaacttattataacccttggactgagtttagagacatttcttcaatttcccatcgtgcctttccagggaccagtgcagggacagggggagaaggggaggggttaagttaaataaagaagattatttttgtttcctgactttatccaagagcagtgcaatcgttggttatttcacctccagggagagctagggaggagggaggagggctccaaaggagctggaaggagcagaggcctgagagcaggaagaactcggaaccgcagctgaatgtattggatgagaaggagccaggagggctacaccatctgtatgagggaaaagccttgggggagaggggtgggttcctgcctcctgccgagggtaagccggcaggagagagccatcagagggacctccgctgcctgggagttgggttccctccaagggtccctctttcagtgtcctctctctcacctgggtctgccaccctaacaggtggcaactcggcagggctgctgggggcacttcctgcccagtggggggtgccgcccaaccttctcccctccccacccccgcccccgggaccgtgcaggcaccagggttccgtgcacctatttatatttttgaaaactgaagattataatattataataataataaagacattggaagagat

SEQ ID NO: 5514 - DNA, 6933 bp, Homo sapiens
ggcctccggactctggcacgctccagcagccctcctctggaagctgcgtcccctcaccccctgtttcaggtctcccatctccctcagtgacctggatctgacctcacaccatcagcagggggcacccaccatgcacacctgtctcggagtaggcagctcttcctgggagctccaggctatttttgtgcttagttactggttttctccattgcattgttaggcatggtgacaagtgacagagttcttgccctctgtccagtttcagcatctggttgcttttaagccaagtacatctagtttccctattaaaaatgtgtctgaatagcgattttgctttgccaccaaaaggcttttccctgagaacagtgaaggatgtatgtcattttgtggtggttgtatgtgtccttacatagaccttaaaaagagctcacccttccaggccaatgctgaagacacagctccgcttgggagcctgagaacccaggcttcccaggccagagtgtggcttcttaaacggcaaaggaaattcctttgagtcacaagccaagttttcgccctgtctcctgagaccatttccctacgctttgctgctgctgagagttacgtgaggcacttgttaaaaattcagcctcccaggtccctcccctcggagaggctgattcactgggtctgggaaggagcctggggattttaatttttcacaagtgccccagatgattctcatcaccaagcaaattttggaaatgctgttcaacagcgcccttaaattggaaacatctttgcagctcgttttattgaaattcataatcaggggtgtcctctagctcccacggtctccagagcagcaaggccggctatggagctgccgtcgtgtgaccacagtgtgatgtctcagaagggctctgggtgggctgagcatctgggctgtgccctggctctgcttttcaccctggacaaagtcgctgtggacttcaatttcttcacctctaaaatgggggacttggaccaggtagattgctgagctcactaccaggttcaaagttcaatgacaaactcagtttactgaggtttgagagaacatccctccaggggagcctgggagctgctctcccagtctaagcatgtagatatcatcgtttgccttttgtgtgtgtgtgtcccttatttgataaaaagatgttttgagttgttttttttttaagcactcacttgtaattttagtttttaaacccaagtccctctaactttgcctttgataccaaacaattcaaaagttggatctgagtttggagaaagatatttccaacctaagtgggtattattttgaaaccagatttttaatttaatagcctatatttgtagtctgttggataggtgtttccaaagtgtgtcttctcaagtgaaaacgcaactctaggtttcaagtactccttttctccgatcctgtggtacttgaatatccaaaaaccctgcactttgaacaatcagctgttgctatctggaactaaacagaactatgagtaaaattgcctggatactttaaaaagatatttttcctccttcatctcctttgactccaggacagactggaatataagtagtgggtctgcatggatgtttcagggatcaaaggagccacctgggcgcctgagtgccaaccctcagggccacaggtgggtgtggtttgggcacgggtccaagtgactgtgacgggacccgtgggcatgggtccaggtctgtaacctgaagaagttgttttctgacaatcaccaaatcatccgaatgacatcaaaagcagcccttatctcagagactgagatttctgtggtctcaacttcgctttggtataatttctggcactcaccagcctctatcattatgactttccccccagtgtattatttctctaataggtttccttttcacgttcttttagcacagactggcactttaccctctcagtttggaagttagcccctctcctctgttacttttcccttcacccaactacagctgtgatctagaacattcatagtcatatttctgctactactaccttcatttatcaagactttttatgagaataggtaaaccaagcaataacttcctaggactgaatcaccaccccagaagagcgagaggctcctttcatatgcctgaggccacaccccttaacctgttctgacaaaatagtggctggcccatgtaccagctccattcagaaattcaggaagagaaaagacagccctgttgtcacacaaaccggtgtgggggagggtggagcctggtctgcacggcagtcctggtggcccctgtggaggacaggcagggctggcagcatagcctttgttgccacacaaccggaatttgctcccccaggactgtgggagccagtgtcccagctgaaatctttttagtgtgtggctctgaatggcactcacattccattttggctcacatgaaactaactgaagccctttgttcaagcttcaggctcttaggcatggaaatgagaatgtgactgtggctgtcttacaggaaaattcttgtttgtccctgaatgagagcacagaggcattgaattcacagagctgcaaacttgcctgataaatgagggagtggcagtttatagataggtcatcttttttccttcctccaggtgtccttgcctttcttcccaaagtcattcatttctgatgagtatatgaatccccctcttgctagtaaggttctatttgggctaaaacaaggctgaatttttaaagagtatttgaatatattttagaatcaaattgaggctataaattgcatcaatctggacaattccattgcaggaataatatgttaaaaaccaatggggagaagcacccacatctctcctgtagcactccgtgtctcataagcaatttgaagacacttacaagtaactgattccagtcaaattaggattaactgactcaaaaaatggtgtcaagtttctttaatgtttttatgttagaagtgagtttaacagacttgaagaaaactgttatcttttcctgctgtgagtttacacaaatgattccagagcagaatgaaagcagaaagctgttggttacaatattcttttaacctctctgcagcattttacacttactgggaaccttatgattcaccgtaagagtggaaatatacctgagttcgtgtcctaatggtctctaattcacattggatcgtgggcaaatcacctcacctctctgagcctgttccctcctcttagaccatctctaagaccacttcatctatttacacatcatttgcttgaacattgctgaacatctgcgtgaacttggcctctccagcccttgcaggtggaaacagctgtgtcaaggctcaaggctcacgctgaggggacttggagggagggggcttctgcattaagctttcctggtgaagacccttgatcttgtccaaagccctgtgtctttgactggcttctcttcagagtccccgttgtcatcgtaagacccttgctgtttggagggtggtcttgtgactgtggcagctgctggccgctggaatgaggagcctatctccatcctccagtgtgactcaggcagagcattgagaattcccagggcagaaatccttcctgctcaggctttcattctaaaactacagtcttcattaaagctgaactttctgggtagctgagcttatatgcccggcatctgaatgagagctctctttgtaactgtgtgacttgagatctagtttgccagctcctgggaaacaatacatgtgttcttgtttgtgtttgctcagcaagcagatgtctgagatgtaagaagcttttcttttcctgtggcattgattctgacttagagctgaagtaaaagatcactgaaacatcacgtcaagttgaagtcactcataggtctttgtcctttaggcaggacaggagagtcattaagaagcatttcactgtagcattctatcacaatatcatctggaattgttttctttgcccagaaagccttaacttgcctctagagaatccctggtattacaacgatattgcggcattagaattccaactcttctgctgtggaagtttgaagcgaagctgcagcaaaaccagagaatttcctcaagtggcctgtaggctccttgttatcttatgcccccacccctccctcaacaatatgagtgatccagaactggcccaaacacctcagctctggtccctttttgcccttcttggccttactctgttgttcaaagccactttggattgcttggatgcttcgaacagccatgaaaagtagcctgcctgtggcatttagaggccaagcaattgacagaaagggtttcttctacctctgttatctaagcagagggaagtaaacctctcaccgccccccacccctcactgcccccgattaccctagaattgctttcgccaaattgtagttgaagctaaggaaggggaatctggcccctgctgggagagggaactggaatgccacacaaggcaaggcctgcttccttccttcccctctgctgctgctgcctcggaacgctgcagcccaggcttcctcccacagtggcccttggaagcaggccgcagagtagacagctgctccttttggaagagtcagtcccctgtgttttctgaactgtttttcctagcatgtatgtgggtagagctttcatgcatctctagtaataataagctgaaattagttttttttttaattctccaatttaaaacttttaattaaaaagtaaattttaatgtcgaaaatgcaaacttggggagggcagaaagatcacacacaaggctgtcacttcatacttgcaggattgcacagcagccgggcagaggcgctcctcacttcccagatggggcggcgggcagcagagacgcacctcacttcctagacagtgcggcagccaggcacaggcacacctcacttcccagacagttgggcggccaggcaagcgctcctcacttcccagatggggcggctcccgggaagcggggctcctcacttcccagacagggtggccaggcagaggtgctcctcacttcccagaacaattctttatgaatttgataaaggactgaagtgcaactgaaagctgctagtgatgatctggtaatatacaatttgtccagtagccagtttgtttttattgtgttttctaaccataagagatcattaaaggcaaagcctgtatgacgctgtacacacacaaaaaaatggtcaccgcaggccatactaccaatgaaatggtaggtaaacaaatcttctggtcaagagaaaaaaaaaagaaatagcactctgcatgctttgctctacaagacgaatttccctagaaagaatccaatgaaggccgggcatagtggctcactcctgtaatcccagcactttggaggccgaggcgggtagatcacctgaggttaggagttcaagaccagcctggccaacatggtgaaaccccttctctactaaaaatgcaaaaattagctgggtgtggtggcgggcgcctgtaatcccagctactcgggaggctgaggtgggagaattgcttgaacccaggagacggaggttgcagtgagccgagatcacgcctctgcactccagcctgggcaacaagagtgagactccgtctccaaaaaaagaaaaggaatccagtgaaaatggctgcaattacaacaagaagtgaaggaagaagactggtgacatctctgaaggatgcagttgaggttgatccaggtttatccgaatatgctacctttctgagccttaaaccttcatctctcaggtgttgatttgcttctgatagcttcatcatttctccctgaagtcttttacactcttctgttagtttccttgtttcagtatcatgaagtgaagcactgtgtggttgtggcgtgggcccgtcttgcttagatgcattcagtgggacagctttgctgggttccatgtcattcaatttatcattttcattggggatctccatttggaatccattaattcatgaggttttgcctcattccacacagcttccatatctgaagtgtttagtggagcaaaaattgtaccataaacttgtgtttactcttttcattcggatcatagtcaaagggctgtagcattactgaaacagtcacagttgaccctgggtcaataattccactgttgggcctcacacagtaccggtgaggcacggtagtcttcactttgaaacacacttttctatccgatggatttcgcaatttaagatttgtagtgactacatctgtgaaggggcctttgaatttgaggtctatgggcgggtcgaggaccaggatctgctcgtgcttcgccgtggccccggaggcagacgccattggagagacagcgcagagcagggggcggcttgctcgctgggggcgggggacgatggcgagaggggagggggagcgagttcgcatctctccttttcctggttagactctgttcaaccacattcttatgttggcagatctgcttccagattgatttttagagcaccatcactttcacattcctgattctgattttgttttgttttgtttgggttttctgaaacttaaaatgctgccccgaaaatactatatttttgagtttgtgttctgaaagcctccgtgctgctggatctttggggggaaatacaggatccttcagcactgaggtgtttaagatttgcaactagcaatgcaattttttctaaatatggggatatttacctttattaagaaattatactaaacattgatgtccttgatcattttatgttctcatattacttttgattctactatgattgtgtggtggtgaacaaagatcattacaaacaaaaactgtaattttgttatatttgattcaatggaatttacctaaaaaataaagactaaaaatgtgg

SEQ ID NO: 5515 - DNA, 672 bp, Homo sapiens
atgaaatgcctgagttaatgtgaactttggggcttctgcttcatttttacccaacaagcaacaatgccccttgtcctgtagtccacaccgatgttggcatcttggttctgaacccactgaattcaactgcaccttcagttagaaggaatcttcttggcaggtcctgctactgaaaaatggctggccttaggcaagcccttttgcaaaaagcacagctgaaagcctgagtttgggagcctgcaccaccccgatgaagctccacgggagcaaatacagagcctccaggcagtgctatggtccaggctggcttcgtttttccaaggagcctttggtgagttcaattatctggtaaatatccagcgcttcacctgaaagatagtgcaaattggttaggatgccacctcaagaactgtaactgagagctcagaagtgagcaaaggagcttaatgctaaggtcaaaaggagagtgaaaggttgagaacaattgccacgaacggtaatgttacatgttaggagggtctgttttctttttatataagtgtgtcttagatatattttaaatagaaaataagctttctgatttacttgtttggtatttaaagcacagtttgtttttctgtcacctatagagtgcaagaatgcactctatagaataaattatctttaaacatt

SEQ ID NO: 5516 - DNA, 934 bp, Homo sapiens
ccacaaacattactgagcccaaaagatcaaggagtcagccaggaccctgtggacataaagaagttggatgcctggtcccaagcctcttttgccatggtcagtgttcagattgccattagaatgccttagggttttctaattccccttatggatccaatccatctcctggccctgccccttgttggggaagttgcaggaggagaggtggatggcaatgtgattggtgctataactcaggcagcctgggagtcaggaacccagacaaggaatcccattccagcctcaccccaaccatgaccttggcaagtcagggggccactctgcctcatttatgcaaatggagaaaggcgccctccctggggtcccttgagctgctgtaaggctgggctgctgcgacacaggcagcgctttgtaaactgtgaagccatatacgtgaaactgaagagtgcattgggcagtggaagctattttttgccttccctgtgtaacagtaaaatcatctctagtgactgagcactcagtacatttttgtttaatgttgggcctgaggttaactgtgaccatggtccagcttgagtggcttctggagcagccacattttcaaggactgtccaagagccagccagttcagggctcaggcctcacccattgcccactcctggggagaccatcacctggctcatcgtttccaccaagagtgccccacaggagtgccccacagacccgctggaccagcctgctgcgggtcctggccaggggtctggctaacggtgagggctgactctgaactgtctctcagtctccagaaagtgttcaagcctgttgtgttcccaaatctgattcctcctattgtcttgtaaatcaaactctaagtgaaaacttcccatttgtcccttcaaagatttttttttattaaatggttttttaagatcct

SEQ ID NO: 5517 - DNA, 246 bp, Homo sapiens
ggctgccaccgccctgggatctctgaaaaggaggtttcagccacgaggcagctgctcccaggacactgaggccaagagaaatgtaacagagccacagctccacaggcctgcactcggagtctggggcctctgcagagccagcaaggggaaaagtataatctgggggaccttcaaccactaagcctcttgtcagagccctcaggcaggcagatgtgtcacccaaataaacagtgatattgtctccag

SEQ ID NO: 5518 - DNA, 964 bp, Homo sapiens
cgcaagctgggccacccctaacgggggccgggggcgagggcatgggggtgagacccatgggctgcaggctgcacctcctgcagccgagaaacaagctactgccccactgttctgagccctccctccccgagtcatttgcaccactagggacctttagaccaaatggagactgtactactggccccggctgtgagccagcacaggcccaggcatcccagcaagggaaggagaacacgcgaggcccagatctgggtctccctggcctgcttccgtggggagtgggagaagtggggccactggggacaggtcacaagggcaccggccctcggggtctctccaggcccagcagagctcttcaggggtcctgacactggaagaagagaccacttgagccatgtctttttcacggccaactcctgcctctaaggatgtctgagctcccctctggccagtactgcccacctctaccttgtccaggcccccttccccgccctgtcgacggaccgccaggcagggcactctgccttctacctcccggggtctcccatgcgctcctcaagccaggtgtgcacgtggccctggccctggcctgcaggacagctggggggcacccagcccccagaagacccctgtcctacatccctttctggaagtgagtgtccctacagtggattgcaacacatgtcgtccacttcgaccctagctggagtgcctcaccagggggccccactaggaacaaagccaggacaggccccgcgtcaggcacacactaacaaaaccagaagcatggggcagggcagggcggagtgagggcatcacaggggaccaagaagggctgtccttgggggaggcccaggaccacctgtcggggagggggaccgcagtcatttctcattcctcagtgtccaccttgcgacggggatagccacgagtcagcagcttcccggaaagagcaacgtatttt

SEQ ID NO: 5519 - DNA, 1017 bp, Homo sapiens
gagctgacttccagaggacgctgccctggcttcaggggctgtgaatgctcggagagggtcaactggacctcccctccgctctgctcttcgtggaacacgaccgtggtgcccggcccttgggagccttggggccagctggcctgctgctctccagtcaagtagcgaagctcctaccacccagacacccaaacagccgtggccccagaggtcctggccaaatatgggggcctgcctaggttggtggaacagtgctccttatgtaaactgagccctttgtttaaaaaacaattccaaatgtgaaactagaatgagagggaagagatagcatggcatgcagcacacacggctgctccagttcatggcctcccaggggtgctggggatgcatccaaagtggttgtctgagacagagttggaaaccctcaccaactggcctcttcaccttccacattatcccgctgccaccggctgccctgtctcactgcagattcaggaccagcttgggctgcgtgcgttctgccttgccagtcagccgaggatgtagttgttgctgccgtcgtcccaccacctcagggaccagagggctaggttggcactgcggccctcaccaggtcctgggctcggacccaactcctggacctttccagcctgtatcaggctgtggccacacgagaggacagcgcgagctcaggagagatttcgtgacaatgtacgcctttccctcagaattcagggaagagactgtcgcctgccttcctccgttgttgcgtgagaacccgtgtgccccttcccaccatatccaccctcgctccatctttgaactcaaacacgaggaactaactgcaccctggtcctctccccagtccccagttcaccctccatccctcaccttcctccactctaagggatatcaacactgcccagcacaggggccctgaatttatgtggtttttatacattttttaataagatgcactttatgtcattttttaataaagtctgaagaattactgtttaa

SEQ ID NO: 5520 - DNA, 13 bp, Homo sapiens
tacttctggatgt

SEQ ID NO: 5521 - DNA, 125 bp, Homo sapiens
ttcttcattattcctgagagtaaaagtcctcctttagatgaagaatgtggcctggggctgatttgctatcaaaaacaactttttgcatagataatatgttcatatttgcattaaaaaaatcacag

SEQ ID NO: 5522 - DNA, 423 bp, Homo sapiens
gtcggggcttggcttatggagatgcctcgtgaaacacagctgggcaagtattaatgtatatggaacagcctggatttctgcatatggataagccaccttggaataggaagaggtgttgagcctggactgtgggaggaaagagctgcgtggatagattcaaacttcctgtggtagtgctcccagtctgacctctgtagaccttcagtactcactcttcttgcttaggctctctgtgtgttgaaagccatcccgtgttgcatgtgttgttacaattttctgtgatacttgcaatttatgtttgagaagaagtgaaaagtttgccttctgacctcatttccttcttgatcagtgaacactaacattttggggacaacttagtcaattggttttccttacaacaaaataaagtaaaatgtagcagtc

SEQ ID NO: 5523 - DNA, 200 bp, Homo sapiens
gaagtagtctttggtgttcagctgctcccttgcacattttcattgctactgtcttcaagcaccccaaatagagaaaacctgggcgtcagtggctcaatttgggccctgatctattctccctctttcttgtctatgttataacagagaggataaacttaaagggtccaaataacggtccgaatacaaaaggcattccttca

SEQ ID NO: 5524 - DNA, 2135 bp, Homo sapiens
ttgatcgtttgctgccagcccagaaggatgaaggaaagaagcacctcacagctcctttctaggtccttctttcctcattggaagcaaagacctagccaacaacagcacctcaatctgatacactcccgatgccacatttttaactcctctcgctctgatgggacatttgttacccttttttcatagtgaaattgtgtttcaggcttagtctgacctttctggtttcttcattttcttccattacttaggaaagagtggaaactccactaaaatttctctgtgttgttacagtcttagaggttgcagtactatattgtaagctttggtgtttgtttaattagcaatagggatggtaggattcaaatgtgtgtcatttagaagtggaagctattagcaccaatgacataaatacatacaagacacacaactaaaatgtcatgttattaacagttattaggttgtcatttaaaaataaagttcctttatatttctgtcccatcaggaaaactgaaggatatggggaatcattggttatcttccattgtgtttttctttatggacaggagctaatggaagtgacagtcatgttcaaaggaagcatttctagaaaaaaggagataatgtttttaaatttcattatcaaacttgggcaattctgtttgtgtaactccccgactagtggatgggagagtcccattgctaaaattcagctactcagataaattcagaatgggtcaaggcacctgcctgtttttgttggtgcacagagattgacttgattcagagagacaattcactccatccctatggcagaggaatgggttagccctaatgtagaatgtcattgtttttaaaactgttttatatcttaagagtgccttattaaagtatagatgtatgtcttaaaatgtgggtgataggaattttaaagatttatataatgcatcaaaagccttagaataagaaaagctttttttaaattgctttatctgtatatctgaactcttgaaacttatagctaaaacactaggatttatctgcagtgttcagggagataattctgcctttaattgtctaaaacaaaaacaaaaccagccaacctatgttacacgtgagattaaaaccaattttttccccattttttctccttttttctcttgctgcccacattgtgcctttattttatgagccccagttttctgggcttagtttaaaaaaaaaatcaagtctaaacattgcatttagaaagcttttgttcttggataaaaagtcatacactttaaaaaaaaaaaaaactttttccaggaaaatatattgaaatcatgctgctgagcctctattttctttctttgatgttttgattcagtattcttttatcataaatttttagcatttaaaaattcactgatgtacattaagccaataaactgctttaatgaataacaaactatgtagtgtgtccctattataaatgcattggagaagtatttttatgagactctttactcaggtgcatggttacagcccacagggaggcatggagtgccatggaaggattcgccactacccagaccttgttttttgttgtattttggaagacaggttttttaaagaaacattttcctcagattaaaagatgatgctattacaactagcattgcctcaaaaactgggaccaaccaaagtgtgtcaaccctgtttccttaaaagaggctatgaatcccaaaggccacatccaagacaggcaataatgagcagagtttacagctcctttaataaaatgtgtcagtaattttaaggtttatagttccctcaacacaattgctaatgcagaatagtgtaaaatgcgcttcaagaatgttgatgatgatgatatagaattgtggctttagtagcacagaggatgccccaacaaactcatggcgttgaaaccacacagttctcattactgttatttattagctgtagcattctctgtctcctctctctcctcctttgaccttctcctcgaccagccatcatgacatttaccatgaatttacttcctcccaagagtttggactgcccgtcagattgttgctgcacatagttgcctttgtatctctgtatgaaataaaaggtcatttgttcatgtt

SEQ ID NO: 5525 - DNA, 3204 bp, Homo sapiens
acagaaggcagtggaacagaagaatgtttttctgcaacagccaaaatagaatggaatagaatgaagccagctgataccacgggctttcgttatcttgacatagaaggaagcaatgccacggctccagggtttcagatgagatcccatctcagacactgtggcttcctccagatcacacagctttgtactgcctctcccgcctgtggccaaagtcgtgttgcagcaggcaggctgcttggagcttcccatgaactggaaagctcacctccactgcatctttttactggccatccagtcagccgatgtgtaagagtaggaaatactgtgtcactggaggcctccgtagcattgtgtagtgtgctcagaaccactgatctccgtccgcaccgaaggcgggcccggagtgggaggctcggcctggggcggcggcaccggagagggcacctcgatgcctgctctgacctgacccagagggcgaggccctccagcgggggacattcccaggctgagtggaccccacggctctctcccacgcctggattacgacatgaagtttttaccacaagcccgagggcaggcttgagttaggcagactgaaggctaattttcattttctcccagctggtttctgctgcttcagaaaagtacaccttttccttatggaccagaggaagaggaagaccattttatcagtcactgaaaagagtcccctggcactgatgagcctgaagagaactgtgctcctcctcgggggctggggaaggaagacagggactgcaggtgtctcatactcagtggcctccagacaaactccagacaagcacagacctccccactaagagcagccagagggagctggtgaggccctaaccccacccaccgagcaactgagcttccccatccctccccagagctgtgtctctgtgggctgggagtctaatgtcacccccctagaccgtaagctccttgagggcagggacagtgccttatcattgttgaacccgtagcacctaacacgtgcgtggcagcacagtcgtgtgctggagtgagtgctgcagaaccgtgcgtgcagcgcatgatgaatgagtgcgtccgccatgccgtaaggcaggctcacctgtagctatccccttccctgccagatcttctcagagctttagcttttctagcactcgtgcctatggtgaagcatgcactttaatatgcttttaacactaggtgaccaaatcacagtgaagccgggcactgcattctccttgggctgtgctccacgcgggtgggtgggagctgtcttctgagtacatccggaagggctgagcaggtgagtgccctgagcatcctggctgggccccacccaggaagatcttccttctcagatccacgtttggctctaaattgcttcaagtagagattcattctttgaggttgaaaaaatagtttatagtaaaacgaaggcctaattcatggaagcatcattagtcatcaataccttctcataaaatagatgggccagatttccaccaccgcctgcctcctctaacttgggtgatgccagtaggtttgaagggggcagagcactgcagggggaggggggggtctaggctgtgagaggacagggtggagaggaggagaaccctgaaggagagacggaagatgccaggacctttgcttggacagccattgcccttccaggagaccctggagtgtactgagggttgctggactgttccacccagaggagcaaggctgtacaatgagggtctgaatctggcacacctgtcccttatgtaaaaggagtcgtggtcacaagaccctgggctggttagcctctcccgacctcattccatttctatcttctgaccttgcctctcatctttaaaataaccctcatggggtgcccctccaccttcctctggaatccaagtattcctgtttcacatttgccccaaatctttgctgtggaattgggaaatcaaaccagagtcctcctcgcctgatttccagctcaggaagggcctgctggcctgccctgttcccagttacactttcagatccctttgtgctcaagatctcagagggggtggctttttgttaaagagccttcagtcgcaatgctacccagcaccccatgtgccaaaagaaaccagctcctgtgtcaaagggcttccaaacctgatctcactctcaacaggcgatggtgctgatgtttcaagaattgtgtttttataaaacagaggtctcagcatagtcactcttcacatagtgccttacccatgggtatcgtcatatccgggtcccagttcagtttgtctgcacagcagccaccctgcctggcaacagagaccccaagacctacacagtgaaccctactgccccaaaggcgttctccaggtgacttgtgaaaacagacctccggggaagtgatttattgggggtgtacactgggggcaatatggtttagcactgaattcaatttgtccttaggtctatgagtgagtccgatcttttcttgtgaaaggttttgggcatcgtacaacccactctgcctagaaggtgtggaggactcaccacgggcagggtcgccctggcccacagcacgtgagcctgcactcactgcggcctttgtaacaaaaccagttgtggtcctcagcatttgaagcagctgcatacttcagagtaaactatttttcattatttagttttgtcacaagaaatcgaccattgtactactctcacttacagcagttaaacagcatagaactaaaaacctgtctgcatttccattttttctttctgtatggttgtgggttttaggacatagggggttaggagaaggggtttcttgatcatgtcatgaattctcctttgtcctgtttctcctgtttcatttctcctccgcctgctgtatattacctgagctggtgttgtatcttcaagtccatatgcgtatttgcagacctttcctgttcccactcttgttggctcttctgatttatgcacagatggttcccagcatgtgtccagtgcttcatggatgggaccatcccagcaactaatcagacttcctgccagtgtcctaacccccagggcaccctgttcaaccatatttaaaaattggaatttgtataaagttgcttccaagttttataatgcatcattttacatcttttgtaattaaaagcatcacaatgaggttgtctctgc

SEQ ID NO: 5526 - DNA, 175 bp, Homo sapiens
caaccgaatctcaatgtacatagaccctctttcttgtttgtcagcatctgaccatctgtgactataaagctgttattcttgttataccatttgaagtttttactcgtctctattaatatttaaataaatgctggggggtgatagttcttctttttaaaataaacattttcttttg

SEQ ID NO: 5527 - DNA, 1579 bp, Homo sapiens
tgagcccactgcccaccccctcaagccaatcccctccttgggcactttttaattcaccaaagtatttttttatcttgggactgggtttggaccccagctgggaggcaagaggggtggagactgcttcccatcctaccctcgggcccacctggccacctgaggtgggcccaggaccagctggggcgtggggagggccgtaccccaccctcagcaccccttccatgtggagaaaggagtgaaacctttagggcagcttgccccggccccggccccagccagagttcctgcggagtgaagaggggcagcccttgcttgttgggattcctgacccaggccgcagctcttgcccttccctgtccctctaaagcaataatggtcccatccaggcagtcgggggctggcctaggagatatctgagggaggaggccacctctccaagggcttctgcaccctccaccctgtcccccagctctggtgagtcttggcggcagcagccatcataggaagggaccaaggcaaggcaggtgcctccaggtgtgcacgtggcatgtggcctgtggcctgtgtcccatgacccacccctgtgctccgtgcctccaccaccactggccaccaggctggcgcagccaaggccgaagctctggctgaaccctgtgctggtgtcctgaccaccctcccctctcttgcacccgcctctcccgtcagggcccaagtccctgttttctgagcccgggctgcctgggctgttggcactcacagacctggagcccctgggtgggtggtggggaggggcgctggcccagccggcctctctggcctcccacccgatgctgctttcccctgtggggatctcaggggctgtttgaggatatattttcactttgtgattatttcactttagatgctgatgatttgtttttgtatttttaatgggggtagcagctggactacccacgttctcacacccaccgtccgccctgctcctccctggctgccctggccctgaggtgtgggggctgcagcatgttgctgaggagtgaggaatagttgagccccaagtcctgaagaggcgggccagccaggcgggctcaaggaaagggggtcccagtgggaggggcaggctgacatctgtgtttcaagtggggctcgccatgccgggggttcataggtcactggctctccaagtgccagaggtgggcaggtggtggcactgagcccccccaacactgtgccctggtggagaaagcactgacctgtcatgcccccctcaaacctcctcttctgacgtgccttttgcacccctcccattaggacaatcagtcccctcccatctgggagtccccttttcttttctaccctagccattcctggtacccagccatctgcccaggggtgccccctcctctcccatccccctgccctcgtggccagcccggctggttttgtaagatgctgggttggtgcacagtgatttttttcttgtaatttaaacaggcccagcattgctggttctatttaatggacatgagataatgttagaggttttaaagtgattaaacgtgcagactatgcaaaccag

SEQ ID NO: 5528 - DNA, 216 bp, Homo sapiens
ggctgggacccccttctcaagctggtggcctctgcaggcctaggtgcagctcctcagcggctccagctcatatgctgacagctcttcacagtcctggactcctgccaccagcatccacactgccggcaggatgcagcgccgtgtcctctctgtgtccctgctgctgccagggcttcctcttccgggcagaaacaataaaaccacttgtgcccactg

SEQ ID NO: 5529 - DNA, 2797 bp, Homo sapiens
ggcttcttgtggcctgaagagaaagttcattcacagagactgcctcttaacatgaagatcattggacaagccacacgggtatcccatcccgatctgcctcccagaactgtgacacactgggctctgccctcattttctgtttattgctgctgctgtgttttcggcgcaacccacaaacccagtgatgggtaaatagggcagacgccagtgagatcagggagagaaggcccttggtcagagtgggcagtgccaggctctgctttgggttgtgagtggacacccaactgggcacaggctcaggcacccatcctttttccaaacagggatatagaagtggtggaagcagacagaagaggtaagggaggctaagtgggtaacagcccagcatcagggtcactgtggcaacagcaggctctaggggaatcctgtggttatgtagagactccatgtcctggtgtgatgagcaggatcagagtgactctgggaggacaggggtggggacccagagttagcagtggggatggagcagtagaaggaatcactgtttctcctaggagtctgaaggcctcgctgctttctgtgatggctttgcagtaagtgccgcctggcctgcatgcattggctaacaggctgcagaatggcaggaaggactcgctagagattgtcatggccagagatcataggtcacttcaggtagcaagacccctggcaaactgggcacttggcctatgtactgatttgtgggatggtggcaggggtgtggggtccttcaccctgcctgaattctctttggcttctgtgctctgtatgctgctgtccccaagggctctttcttattatggcagggagtggggattggtcctactttctttctctggaaaggaaagcctccaagactccatgtgcttgggcagcttgagaaggcgttcagcaccacgcctagcaggcagaccttgaagcctcacctttagtctatctgcagaggtattcagttcctggcacaggggactaggggcatgtagagtatatgaggaggcagtatggctgtgcaggagccttcatttcagcttcaattaatagggaagaatttatgatagctctatagatgctgaaaaggtatttcgtaagatttaaaatccatcccttattaaaactcttagtaaattaagtctggaaagaaacaccctaatctagataaaggtctgtttcagaaaccaacagtgatggcattctaaagagtcagacgccacaggcattcccattaaagtcagaaactagccaagggcaagctattattcagcagtgtcccggcactactaacccctgcaacaagccagatgaggaacataaggaagaattataattgtcattatttgtagacaataaaactgcctacctgtaaaacctaagaatcaactgaagacctgttaagagtattctgtaagtcaacccaatgatacacatcatgttcctgtccacatactggttttccccaaatcagctgataaattcagtgtaattccaatgagattgaaactttggaattgacagttctaaagtgcatttgggagagtgaatgtgtgagaacactaagaccactctgaacgatgataatgagttggggggtggactgctcgggggtgatcctgccagattcccagaggattctcacgccaccattacctcactcagtgtgacctggagggggtcagacagacgggagagtccagaaacagacccagggctacaggaatttagtatatggtaagagggatgttttaagtggggaaaaaggtggattatttaataaacagcacttttagacaactagctatcaaagctagatctcagctgggtgcgatggctcacgcctgtaatcccggcactttgggaggccaaggtgggtggatcacttgaggtcaggagttcgagaccagcctggccaagatggcgaaaccctgtgtctactaaaaatacaaaaactagccaggaatggtggcgcgcgcctgtaatcccagttacttaggaggctgaggcaggagaatcacatcaacctgggaggcggaggttgcagtgagcttagatcatgccaccatgccactgcactccagcctgggtgacacagccaaaaaaaaaaccactaagttagatctctacctcacagtgtccatacaaattagttccagagggaagatataccacaaaattactcaaaaatttttatacctctggtgtgggacggtcttttctaaactttaacatgagacttaaaagatataataagggaaaagataagcagatttcgcaaccaaaaaatatcgaaagtctctgtgtgatggaaaacatcaaggttaaaacacaaatgacagatatggaagaaaatatttgcagcacataaaaaaatcaacgagtacaattactttaggagaaaagcttgcttcagggtccttagagaaagtcactggggcctgccaagctgccacctaaagacaagagtgagagggctgagttcttccaggtcatcagagttgttgctgcccgtattaggccacacagtggaaccccatttatatcatagcagaagaaataggattatcaatgtgaactgcttagcatggtgcctggtatatacgagagctccacaaatgtgagctataatcctactagtaaaggatgctaagcagttccactgtggcaggtgtcatttgctagtagaatttgtaatcaaacaataggaggggaatctgtgaacgcctagaaaatgagcagaataaaggatattatctttggaagtctt

SEQ ID NO: 5530 - DNA, 376 bp, Homo sapiens
gggggttgtccctgggcccaaggctcatgcacacgctacctattgtggcacggagagtaaggacggaagcagctttggctggtggtggctggcatgcccaatactcttgcccatcctcgcttgctgccctaggatgtcctctgttctgagtcagcggccacgttcagtcacacagccctgcttggccagcactgcctgcagcctcactcagaggggccctttttctgtactactgtagtcagctgggaatggggaaggtgcatcccaacacagcctgtggatcctggggcatctggaagggcgcacacatcagcagcctcaccagctgtgagcctgctatcaggcctgcccctccaataaaagtgtgtagaactcc

SEQ ID NO: 5531 - DNA, 1354 bp, Homo sapiens
catgtgtacgtatatgtatatgcaacacctgtgagacccccattcaggtcaaggaaaaccattgcctgcaccccaagggccccatatttgcccctccccatcacagtcctgcccttcaccctcaagcacggtcctaaacttgtctgcactttagaaacacctggagagcattgaaaactctgctgcctaaggtcagcatcaatcaaaacaatgaaatcaatgaaacaatgaaaccagagcttctaggtgtgtggcctggatagtggtagattcaaagctccacccacctcatcccaggtacatttgatgtgcagctgagattggggcacattccaggtcatcgtcttctgtcagtcatttccctgctttcgtttgaattttaccattcttgtatgcagccttatacgacatagttgtgtttgcttttgagtgttagataaatggaatcctgtgtatgtgcttttgtgtcgtttttgtcactcagcattgtataatccatccttgttgggtcctggagttcatttttaatgctatatggtgttctgttgtatgaataatacctcaagtgatacagccttgttgatggtcatttttattgtttctgattttggtcattccacataattctttgtgcagtcttctgcacatgtgcacaagttcctttgcagaacattgagttgaattgctaagtcaggagatacctttaattttactagataactgttgcccccagcagggtggggtctactgtggctaaaatgtcaggtagatgcacactggttttaattggcatttccctggatactgatgaggttgagtagcttttcatttgttttggatggctgggcatggtggctcacacctgtagtcccagcactttgggaggctaagcagggagattgcttgaggcgaagagttcatatgtttattggccacttggagtttttctgttgtcaagtgcctgttcaagttttctggccttttaaaatgttctgtattttccttagtgatttttcttttggatatttcagatacaagtcttttgagagttagtattcagagtatcttctgctacaatgtagtttgtttcagtctctcttggtattaccaattttaatacttaggtgatgcttactccatgccaggtaaggctcaaagtgctttacaagtatcaacttattttgataaaataagcttatcagtagttttctttatagttaaattctatttgtgcatgtgtgtgtctgtggtttagcaaatgtttcccacccatggggtcttttttattgtggtaaaatatactgaacataaaatttatgttcaataaaaaacaaaaattgtttttaaccatttt

SEQ ID NO: 5532 - DNA, 2866 bp, Homo sapiens
acaacctatgggaaaaggaaaggtcgagagaatcttgtccaggacactgaaatgcatccacacttcctgcctatcacggtccggaggacaccttggatagcacgggaggagaagttgactttgtgacccctagtttaggacccacttcagctgtcaatatgtttgtaactcaggtgactgatttgggggtgccctgagccacccttagaatcacagagctgcgtgtttaacttcaagtcttcccagtccaaggcagggagaggattctccagtgagtgcacacactatgcgaggagcaagcatttctctaagtcaagtgcaaggacttaacttgcgtttgaaaaggaattagagggtcagaaacacccaggttcctccagaaagctccttggagcccaacaacttaacaaatcaacttggctggaagttagagtcattatatgaagattgggcttgaagtatatatttttgcatttaaaagtatcacctatcatattttccactcgaaaattgacatagtagcattgaggatactctgatctagaaagccaagtatttgagcaacatctatagagatctacttttctcctatgtctcctaggctttccatgataattaggtaatacatttaagaaggatatttatttctgttttgctctattcaaagaaacggaatgggatagttattctgtaaactaagtttgtatataactttatttgggtttaatttccacaactggtatctgcaaatattgccagcattttagccatattttgggagaacttggtgtttgaggtcccaggaaatgaggtctgatcaaatgaaatgcaagcacaatttcttacagccatttaactttctgttgggaggatgaattaacaaactcacattgtgcagtctgcttaatccaggcacttttctttgtgcaggtgtagtgagtagttacttctctcccttacacagatgacttgtgaaactcaagctcaccatcttcagtgctggcattttactttgccactacccaaaaacaatgtgagatgtgttcagtggcctctggtactctttgcaggcaagaatcaaacaacatggggactgagggaaggatggggaagtgtagccacagttcttccaaatgtaaatactttttgtttgttctagtggtaaaatgcaaatgcaatccatatttgttaggatggtcaggtctcatgagaaatctatgctatgtgtccagagcttttgaaacagagtccattggagtgggagttagggagtgtagtggatgccaaatatgtttttcttcagtgcttaagagaactgtttcctgaagtccagctttgaacataaacaggggtgtgggttgggggaggagcttaggacaaacctctctgatgaaggtcagcaatagactgaagtcttgactgcatggaagaggaaaaacatcagaactgtctgacaatggaggggacagtgagctacgcacaactgccagcggaggtgaacttgcacctgcccaggccggatgaacatcagcctgcaagaactagttgtttgagttgatttgcagtgctctcaatgggcaagtgccacattttccctggcagagatctccaaaaatttaaaacagaataataatggctatatcgagtgttttctcagtattggagaaatgcttaggtcctatgatagcttcgggacatctttctgtaattttcctcaattaacgggttggtaggggtaaatcttatgacacctttccaccgtcgatttgagatcagttttaatggttaaaatgtttactctccttctgtcaaccctcacctttttatttacacccctccctttttttctgtacagggagagaagacatattgactctgactggacaccctgattcctccaaatatatataccactgtgtattaatctttctctcagtgttttataggagtactaacatttattgctctgtcaataatgaaaggctcgatgtaatatagctgtaatttactttccatatgaatacagtggctaggttcataaaagagaattgtgtgagtctgggattaccacatctaaaacattattctttaatgggataatacaattcattgagcagctaccacttaaaaaacttgcaggacagttagagcctgcatttctagttaagatggatcttgtaaatttaaaattggattaacattggagtgctggggtggctgcaataatttgggggctaactccatttggtttccaagatctcacttctgcattatctttatggctctttaaaccagccacctagccaatcaagggcaattcccatctcatccatcactcaggtctttgtaaagggtgcagccaagctctgcagacttttgcaggattgtctagcctgagtaccgggctacttcttaaatgccgtcactcctgctgagataaatgcgtctttaaaaatagtctctgtggcaggtcactgggggacaatgtacagcattctggccatccacttctttttcacttcatgttctaccccaagagactcccgatgtcggctgtggagggttaaagggatgaggctttcctttgtttagcaaatctgttcacagttcttgatgatgtattttatgatgcccagcttggaaatagttgctttccatagtctcaactgtattgtgtcatctcctgatgctgatttttgatcttttgttttattaaaaataattagtgaaagaggtgtgcctatctgtgaagtttgtagtacatcatcctgaggtcatgtaacaagtaaaccccaacccagcgttccctcctacgttgtgttagttcattaaaactaaataataaaaataactgtaagaaaacctt

SEQ ID NO: 5533 - DNA, 411 bp, Homo sapiens
tgactaaaggagggctgaactctgtattagtaatccaagggtcatttttttcttaaaaaaagaaaaaaaggttccaaaaaaaaccaaaactcagtacacacacacaggcacagatgcacacacacgcagacagacacaccgactttgtcctttttctcagcatcagagccagacaggattcagaataaggagagaatgacatcgtgcggcagggtcctggaggccacttgcgcggctgggccacagagtctactttgaaggcacctcatggttttcaggatgctgacagctgcaagcaacaggcactgccaaattcagggaacagtggtggccagcttggaggatggacatttctggatacacatacacatacaaaacagaaaacattttttaaaagaagtttcctaaaat

SEQ ID NO: 5534 - DNA, 4341 bp, Homo sapiens
ggtgggcaccccatgggactcagtggctcacatttcctgccagctacaccacaggcagatgggagtcggggtggcacaaacaatagaacaagcaggctagtggttttctttgttaaagtgtaaaacagtgaccagaatatatatatctatacctgcatatatatattgacctgagtatttataactgtgtggtgttcatctagcattaggcagataggccacaggaagaaggtgtggagaacccacctgaaccagattgagactcaatccatctttgggggtggaaggacttgacatgaaaagaagccagtcccatgactttggatgacaaactgcctcctggcttggagggatctttgggctcatggatgaatggcgagccacctgttgtcagctgccccaagcctctgggatatgtggattcggagaaagctgaggcccagaggggacactcgacccagtctaaagtgggtgccattcacggaggagagggaggttggagacttcaaccgggcaaaggagcacaaggaaaccaagcagcagaggccccatcagcacagagggcctcgttccacgaacgtagagtttgactgcctaagggacagcacgaatgactcacatgtttcagacaggcctccacggctatggagagaaggctggaggagacacaatggatggttcatgttctggcttagcaagagccaccaagaactttgggtgaagcaagcagatgacaatgaagaggagtaatgttccgaatcatgtttttgaaaaatcaagacctcctgttaagggcccacttgaccctagaataaggcaggagagtgtctaaaatctagctgctttgggtgttttttaaagcaatgtgagtccactgaggaggaagagaccctgggatttcaccctctgggttagtctctgtctcaccctgttagaatgtcacgagggactgtactgtcccctctgtcaccagggaagccacaatgagagcttgaaagggtgctgtcaagataaatgtcatccttcttaaaatacatatgattgcctttttgggtgcctcacagagccccagagtgtgagacctgaaagaatgttcagcatctagctccatgtccctgcaaccactctctgtttgccttctgcattctgcactctgcggggcctttgcagccagactgctgtgtcaatgttactttcttgtcactttcctaccctgatggtcacactagcccaccccaagctccgacattgaggttttcatctctgcagggagaggttccaatgtccaccccacccccaggtacccgcctcttcccacagaagcaattttagaattttgcaaaattcttttccccttattgagattaatatttaagattaaaaaaaaaatacccaaagccaaatgcagttccaaatagtggacataatctcccagggaaatctgggctcgaggcctacaacttaggggctggaatcacaggtctcacatagagaaatagccagcttgaatttgttagtcgtattccttcacctgatgaataacagtgttttaaaacatatttgaaaggtaagtaaaaaactaccatcttgaaggtgaagggagttaagaaaagtaatcaagacctgctcctaagcatatgagaccagatgtaattaatcaatggcaatgcagaacaggaccttggctctaaattaatggttgaccggaagggattggaggcggcagaaccattaaccctacacaagaacactccagcccaaaaccgtgaggaaggtgatatatctctgcattttcccttgttgttgcttgaagtctgtgattggggatttgcgttataaaatgaatattttaaaaagcaacagccctaatagcctctgtgggaactgagtggtttcggactcctcacaggcggtggaaataattaataccatattttatacatctccagagcctttcatcttgaggatctcaaagaccgtagaagacatttaatttctaaagcttgaagtgccccgaggagcaggtagaatttccagcagggccttggtggattaaccaaggccttggattccagaatgtttcatggtaagcactgtggagaacctacatgtcaggttctggagttggccctgagctctatccaccaagccagcaccccaccatccctttgcaggggagtcaaagggccagaactccttgggggaccagaacatggttttccttctgcctatcttagtcatggctcctaaaattgaagctgatatgagctggagtgcaaggagtccttccaccctgccttcaggttctctctggagaaaggttagagaccccaggacaatcaacatgtgcaccgttcccctcctcggcttgagtcctgcactaccaaaatggcctggccatttgatggcggagctccaggggccttggctttctctggctcattgtccttctccatctgggccaattgtccttccctgcccattcagagttcaatttgagcctccactgcagttcctggtgtgggccagctggtgttgggtggccccagggagtcacacagtctgtacccggccccgagatcctctgctgtaactgcagggtcacaggcatcccgggagaatgggcctccaccctcagccagccctcactgctgacaggcacccctctgtcacctcctgccacctgtcagatacccagcctgcccgccatcagccacccgagtggttccgacctccattcacctcaagccccaacaggcccctgtcattccacttcatggaagagacggagccttctgaaatgagatctaccctgaaaatctcttctccttcccctttctgagaaacgtcatccccaccagttaacgtttcctgtacaccctcaccctctctcgtccatctctgttgcctctgcacatcagcacacactgactccacctgggctggctcctgccgcctcttccctacctcctccactagccgcaggaagggcctccagcacccacaactgcccttcctcttgatgcccctcggcttccccccagcctggcagcagcgtcccagcgcctccacattgcccctctcacctcccagctctccacgccacttggctctgcagcgacccctcctagacgctccctggcccctcggcacccagaatgccacattcttgtgtttttttcctccttctttcccaatccctctcaaccatgtatttatttatatatgtatgtatttttttatttattatttatttattgaaacccctactttgattgacaaaggaatcaaggtagatctgaccagtattcccctctcttctccttgtcccaccacatggacatgccttacactggcgtcctctcctgagtccctccgcactctccatcagcaacctcacacctgccttcagacccggctgcaacttcctaagctgcccctgccccagctcctctctgcaacccagccctctcctgagctctaggctgggattacacccgctggagggacactcaccccatctgctcccacggcagcaccatcaactcaacaagtcagaagccaagtggatcatctgtgtccccttcccccacaatccctcctttttctagtaaaagacccgtgatcccgtcagccacccagtctgagatgctgacgttatcttcgactattcttccctgtcctgccttgctaattcttcccactagcactaatctcgactctttgtcacttggactatttcagcaacagtctcatctcccagattacctctgtgcacactgacacgtggtcccgtccatcctgaacatgcacagtgattttcctctcccgttgcacacaaacctttaaaagttccccggcccgtgaacaaatgtacaattctctattctgacattacagaccaccggataaggccccattcttcctttacaccctcccctggtcagcctaggagagttgtttttcctggaaagggtgcctgcgttttactgtctctgtgcctttggtcttgctatccccatcccctggaatgctcccttttcttcccttcaaagcccatgcggaaaccacgtccttcatgaagccctccctgatgtaccaaccactgggatctctccctctgctgaaccaccgtagcactttatttgtacctttctcatggcacttaccatattctgccttgtattatagttatttgtgcacttgtcctttgactgttcttagactgtaagcttgccaagggcagggactgtgttttattcatctgtatccatcacagcactaggcgtggtgcatagcacacagcagttgctcaataaatgtttgttggattaaatcctt

SEQ ID NO: 5535 - DNA, 717 bp, Homo sapiens
atgctggatcgccatggcaaccttcctttggaggttatccaagtcaggtagtgacagcaaagctgagttaaaggtcacccctgctgagaaagatgggcattgataaaggattttaacaagacccagaggagctggtatttggaagctacctacagaggatcgacgaggccctaggaatgggtggcaaacaacatcaggaagaggggggcatcctgcaggggctcccaccagagccccgacctcgcccttcagatcgggagctccagccttcaccagaagctgagattggagctgttcgtaattgttcaatggaagggggaacaaccattttaaccaggcatccagatgggaaagaaatacacttatgccactctacacccaagacacgcattcctgaaaagttctgaacaagccaaatgcttgcaaatggaacgggcttgaccttctttatcactccagaaatgctttatttaatcttttttctattggagcatcactttaaaacctcaaagttgagaaggcttttctttgcatgatgctgaagccagaagccttcaaggaaacaacataaatataaatatctctgtggccagtctctacaaaaatacataaaaatgaattttaagcataataaaatgtgaaaaattgcccaactttcctcacaaatgagtaaaagccaatttaaatgataagaaatgaataaatgcatattaaagc

SEQ ID NO: 5536 - DNA, 3301 bp, Homo sapiens
aggacagctcgtaaaggagagagtaagagtcaccaaacacgtggatatttttggtctgatcctacagtagccggttatctagaccagtaagtggagttttggacatgctgctgctgtcaactcactggctgaaggagcacttcaaggaatgggaggcctttcactgggtccagctctgattcgggtcaccactcctgcactttggcaccccatcccattccagcctagttctggcctcccactttgacgggcacttggaggaggagctgactgtgtgtgtaccagcttcactgggatgtgtttccccagtcaaggaacaggggatcttcagagtcatgaatgttttcttgccagggtcagtgttcccaggaccttagtgcatggtcggggcaggaactggtgcatggaggctgctgggacctggtgaacagtgtgtgatttggttgatttggttcactctgacatgatggatgctgctgatggggagtggcgagttggggcaagcgggtggggacaagcataggacttgaaggggagcaggtacacccctcaaatgtgttcttgggagaagtgatacactcggcctcattatgtgaaacctgtgggtggggttggggtggagaagtagagagagggcaacagcttccacaactgcttcatctctgccaacactaatttttcccacactgtctttgtacatttcagagctttggtctcctgagtgggcctccttttcccactgtgccagggaaggtaggtttctctggctgactgagtactgtgagtgaggcaacactgatgccagcatgggtcttacttgactggggagtaggctgagtgaggggtagggtggggtaggtggggagtagtgtggccagggaactggaatccctggtggatttctgattcctgtggtgagaaggaaagctacaggacctggagaaggggatgcagaggcaggcctgctgaccaacttgttgcaatcacaaaggtgggggtcctggtgcaggcagtgaacaggcttctaatgtggggttcagtagtgccagcaagtgggggaaactttcagtattgcgctaggtcaacacttcctgctgcatttccttccctttgcacagcttgaagaaatagagtagacagaatcacacatcatgtggtgggcagatggaaataagtacctgtggtgaacaagtttctactgtagttggagatcattagaattgaattcagtttctcttagaatataatcaggtataaacctaagttaaactttttcccaaacaaggagcatccaaagacacagtgacttgagctatagatagtaaaaatcatacgagagttgaactgagtcaggtttaggaagcaagtttggttgcatcaattaagcaggctcttttcaattgactgatgctggggccttcagttttattctcagtatagattgccagtattgttaagagtatccaaaggcctttctagatggagacagaataactgacttgaacatacagtgtgcctgtaagtgtccaggctcagagctggtgaaaacccttctgttgggcgtgtgcagggttaaactcctgaagtaacttgtgaggacttcagtgcttgctggtgtcctgggcagcaccatgaatgcctttaccaagacatgccaagttggatcccccgaatgaagcagatgtggctgtggtgtgacccttgctccctgctacacagagcatcgcagggctggcctgtgtggtttccagatgagggtctgggtcccggaagcttgtgttgagagctcagtggacccaccccgcttgctgaaccctcacagttcttggggttgtccagcctggacttgtagcacacatgtcctgaagcaaagctccggtgactgcatgagccacctggccacagtcctcccatggagggcctgccgtgacgctcagtggagagggcagggcctgtgtctccacttaggccacacagtgatgaggaaaccacagatggagcttcttgccgataatactgactctagcccatgattgccttgcccaagccaaagaggaaggttaggttggcttgtcgagcccttgagcgttgggagatggggtgggaaggaggtgagcccctgcagagagttgggtagtgtccttcaggaatgaaaggaggggcaaaggagtcaccagaggtcctgcatttccatcagggtttccacagtcatcagggcttctctcttgagttgctgataggagatgtgagttatgcccagagatgtcttatcgtgaggaaaaagaaacttccttttgttcacatttaggactctcagtgccatatgaagtagcaaaaggcagtatcggccagatcagtgttacattgattctaaaattacagtgtccccattagacaactattttaggtgctggagtatgtttgaagagtgtgctgggaaaaaggaagcatttcttcattgatttaaatcagtatgaatattatatgcctaaataaaaaatttgcacaggtaaattctctcacttgtgaatgggagaagctgccccaggaatctgtgaggatggtattccctggagtctggctttgaaagatttcattgttggtagaaataacaggttgagaaagagggagttagcatcacctaaaacctgcacgtgaacaagggttgacatgatacactatggccttagaaaagggccaggtgaaaccccaagctaatcactgcggtctttcagagccggacagacaggtgccagcagagcccggggctcactctcctttcagtcattcctcagcccttcgaagggaagcccaaacactttgcacgctgtgctgcagacattctggcctggtgtgtctgaaagttgcatcagtcctcacggtgcaaacacagttgatttaggaagtcacacaatgacactgaaatcctacagaccaaaatccacttgtcagcaggagcagcagcccaggcccagcaccagcggtcttccggctcctctgagggctgccacgttgggcgaggggagccatgccaagggtccaggctgctttaggccatctgtgccccactcatctggggacagatggtttttctttattgtaaaattgtggacttttaaaacctgttgactaaacagtaattaatttatatttgtgaaaaatgccactgtcctagtgatttctgatgtaaataatgttgtttatatagtatgtattaaattttcctacattgtaaaactgctgtacttttgattcttgtatattaaaaagtgttactgagcatttttagaattgggctaac

SEQ ID NO: 5537 - DNA, 1190 bp, Homo sapiens
ataaataaaataagaagggggagtgaaacagagaaagaaaaggcaaaagactggtttgtttgcttaatttccttctgttaagaaaggatataaaaggatgttacaagtttgctaaaagaagagaggggaagaatttaatggactgtgaatttcaaaaaaaaaaaaaaagactgtcaaatgaacttttacagaatgcattaaaaaaaaaaaaaaactcctgtgtcggtcagaacaacttgctacttatcatttttgtataaaaaggaaattagtctttttctttttttggtaaatttttgaaaaatattgctaaaagtgcatttaaggagattgggagacaattagcagaatggagaaagtaagtcttttttttttccaaattattaattgtcctgtgtctatgtacctctagctgttcttttttgtacttttctggttccaaaccagtttattctgtggttctataataagttttgatataatcttggcttcttaaaaactgtgtatcattaaaatatatgttctgcaagaattaaaactgagtccatgaaaataccataggaagacataaaactttaaaaggcaactcaaagatgatggaaacgcacttacaagtggtgaccaaaatttttaggtgaagtcgagcactctaattagagaactggaggaaccacatataacacttaacttcccctaccctgcccctccccaaaagaaaccatgacaaacctagcttttaaaaaatattttaagaaagagaatgaactgtggaatttattggcagccaaggaatgtgtccaagacacatgctgaggttttgaataaaaagtgaacttttgtaatttgaattgggtcccgcttagttcttgaattgttatgaaaatcctatatctgtttgtatatttgcaaaccctttgtattataattgttgatattttccctttttaaaaaataccattgaaatcagcatgacaaaaataacactgttggcacttataggtaacgtgattgattcagtatcttagagtttacagtttgtgttttaaaaaaactgaaggttttttttttaagtgcaacatttctgtatactgtaaaagttataataactgaactgtttggtcgagtctttgtgtgttatattccaaggaaaattgaaagtattcagaaattaaaatattatttgatatctg

SEQ ID NO: 5538 - DNA, 498 bp, Homo sapiens
tttttcaatagtgtccctaccctgaagctcttccattggtcatcatggagttagctaacagcccagggaactggtctcttttcccttttcccttaccacctggaactcacctggaaagggcaatcagctggctctatatcagacgccaccacctggtctttgaagtttctgtcctaccagtgccacagctccctctcccacttctgaactacctccaagagagaccatcctcagcagcctagtatgttatgctagtcctggaatggtgtattctggatgtctactcaaggccaaaccccagtattgcctttcgtttccctattcaaggccaaggctagattctcttcattgtctccatttctctttctccagagctcctatagggcaagacactgtttctcatatatttctggatccttggagcttagctcggagcttggcatacatgcccagcatgaacttttctgaataaaataatttcaaatgctgtatacagga

SEQ ID NO: 5539 - DNA, 2643 bp, Homo sapiens
acgtatttcagaaatcactgtgttcatcatcaaattagaatgttggttcttttccttctgcctttttgggaaagagacaggaaagattcacttgaaaacataaatgaacgtcaagactgaaggcaatagaaattaaagaatgtgagaaagttctggtgggccggcaggattgccgcacaagtttatatgatggtcgtatatatatccctgttaaaaactgggatgaagatgtgcaaagtcacagaatgtaatggaagtcctgatggttacagagtaagtgaaagggtgcctgcgctgacgtgagagaaaggaatctgtaaacagtggaaacactgtgggagtttcccatggtgaagagtggaacgaaggcgatatgaactgaaggggtgaagacttgattttggagagggcaacaaaacaagggtgtgtgtgcataggagaatggcccactccaaatacgaagtgagatcctgagtctttgggtgcttcatgatttcctaccatattcaggcctaaagacattgaaaaagcatcttttcttgagatcatggtcatatgaggtcctaatgaagtactacagttttcattctttcaagggtagactaaaatatagtttataaatcggcagtacggtattatgaaaccaagaaagggtttcttgaaaagcttgtcggttcaaagaggaaagatgaatttcaatgtgaaaacacgttttgttgagggctgtactttttaccccctttaagtgctttaacaggatatacgtttgattttcctcatatcttatttacctaggagcatgtaagagaaagaagggagagaaaaggttgcatctgcaggatgccttgataactacacagtcccaaataaaaggcctttttctaacctacctctaatggggttatcagatatgtttttaaatctctcgccctgagtactcttcttgggagttgctgctgtttacagccacagtctcatctatcactaaatatgaaactgggccaaggggaaaattcagtaagttagcgttaaatggaagtaaatatatgtatacctaagagaatgtcaaaataaacaccaaaccaaaagaaggtaggagtgccatttttagaaaagacacaactttaattcctgtcaagagacctaggtctactgatggcagtcactgcattgtacattattccagttcttcagtaattctgtttaaactgtgattttctttattgtgttggtgcaatattttattatcatttaacctcaggatattcagaccaacaggattgtgttgctgctgaaagtctgagcagtgttttaccgtccccagcccccctcccacatggtcacatgttcacttgcttttccttccatctgttggttttgtgagctgagagcatctctggacacatggaagggagccagggattcctgtgatacagattttgaaccagcagagtactttggttttcttcatgtcctaagggtttgatccagaaaccctggtgcttcccctgcagaatactgtacttcatttaacagaatgattgatttttctttcaatcagcatgttcaccaaaaatagaaaagttcttctaaggttaaattttgtatttaaaagttagttggccatttgatcagggaattttctacacacattaggcaaatgtatgcttttcatcctctgggcttacctctctcctctgcaatcctggaagcatcgtgcatagttctttcattgtaagccgctatttaaattcccacaatgcaaaactgttagaccagtaattgtgctactgaaattgtcacaaaacgttattccttgatttggtttttaaattttgctttcgtgtgtgtgtctttaaacaggtaatgtgtatttaagtgttgtctaaacagttgatttttactttagaaaagatcatcttcaactgtttattgacttctgagttatatagttcatgccctgccaaggcattgttcgactccatgatactaaaacataatgaaagaaacaaactccagtatggagaagagaaagtttaattatttggttccatctagaaaagcaacaacttaaaggaatccttcactaggattgtcttatcacctttattagataaatcatgaagtgtccctgtgaaattgaagtgaaactatctctgtaggacttaagagaatagctaaaaggtgtgacttgccttattgaaatgatactggcatatctgactgtaagcagtaggttgaagatatcattttatgaatgtggagaattctacattgaaacagaaaatacctgggaatgaagattaaaaatgtagctgctgttatttgcttggttattcccctcttgctcttctttagtttgaaaaaacaaaaacgtggccttggaattttcattttgatgcagaaattttgaaattgaaaatgtgcatgttttggtgcacaaaatccttctgtgggcaaaactttgtttttgttttgcacagtaagaaacaataggcaagcgttatgtttttggtaagttaactatgaaagctttcttatttttattattaaaaatgtaacaatttaacccacaggaaaaaaaattactttgtatgcttgtttgaaccctatgggttcgttttattaataaaattattacac

SEQ ID NO: 5540 - DNA, 7087 bp, Homo sapiens
tccttggatcctgaatctgtgcaaacagtaacgtgtgcgcacgcgcagcggggtggggggggagagagagttttaacaatccattcacaagcctcctgtacctcagtggatcttcagaactgcccttgctgcccgcgggagacagcttctctgcagtaaaacacatttgggatgttccttttttcaatatgcaagcagctttttattccctgcccaaacccttaactgacatgggcctttaagaaccttaatgacaacacttaatagcaacagagcacttgagaaccagtctcctcactctgtccctgtccttccctgttctccctttctctctcctctctgcttcataacggaaaaataattgccacaagtccagctgggaagccctttttatcagtttgaggaagtggctgtccctgtggccccatccaaccactgtacacacccgcctgacaccgtgggtcattacaaaaaaacacgtggagatggaaatttttacctttatctttcacctttctagggacatgaaatttacaaagggccatcgttcatccaaggctgttaccattttaacgctgcctaattttgccaaaatcctgaactttctccctcatcggcccggcgctgattcctcgtgtccggaggcatgggtgagcatggcagctggttgctccatttgagagacacgctggcgacacactccgtccatccgactgcccctgctgtgctgctcaaggccacaggcacacaggtctcattgcttctgactagattattatttgggggaactggacacaataggtctttctctcagtgaaggtggggagaagctgaaccggcttccctgccctgcctccccagccccctgcccaacccccaagaatctggtggccatgggccccgaagcagcctggcggacaggcttggagtcaaggggccccatgcctgcttctctcccagccccagctcccccgcccgcccccaaggacacagatgggaaggggtttccagggactcagccccactgttgatgcaggtttgcaaggaaagaaattcaaacaccacaacagcagtaagaagaaaagcagtcaatggattcaagcattctaagctttgttgacattttctctgttcctaggacttcttcatgggtcttacagttctatgttagaccatgaaacatttgcatacacatcgtctttaatgtcacttttataacttttttacggttcagatattcatctatacgtctgtacagaaaaaaaaaagctgctattttttttgttcttgatctttgtggatttaatctatgaaaaccttcaggtccaccctctcccctttctgctcactccaagaaacttcttatgctttgtactagagtgcgtgactttcttcctcttttcccggtaatggatacttctatcacataatttgccatgaactgttggatgcctttttataaatacatcccccatccctgctcccacctgcccctttagttgttttctaacccgtaggctctctgggcacgaggcagaaagcaggccgggcacccatcctgagagggccgcgctcctctccccagcctgccctcacagcattggagcctgttacagtgcaagacatgatacaaactcaggtcagaaaaacaaaggttaaatatttcacacgtctttgttcagtgtttccactcaccgtggttgagaagcctcaccctctctttcccttgcctttgcttaggttgtgacacacatatatatatatttttttaattcttgggtacaacagcagtgttaaccgcagacactaggcatttggattactatttttcttaatggctatttaatccttccatcccacgaaaaacagctgctgagtccaagggagcagcagagcgtggtccggcagggcctgttgtggccctcgccacccccctcaccggaccgactgacctgtctttggaaccagaacatcccaagggaactccttcgcactggcgttgagtgggaccccgggatccaggctggcccagggcggcaccctcagggctgtgcccgctggagtgctaggtggaggcagcacagacgccacggtggcccaagagcccctttgcttcttgctgggggaccagggctgtggtgctggcccactttccctcggccaggaatccaggtccttggggcccaggggtcttgtcttgtttcatttttagcacttctcaccagagagatgacagcacaagagttgcttctgggatagaaatgtttaggagtaagaacaaagctgggatacggtgattgctagttgtgactgaagattcaacacagaaaagaaagtttatacggcttttttgctggtcagcagtttgtcccactgctttctctagtctctatcccatagcgtgttccctttaaaaaaaaaaaaaaggtattatatgtaggagttttcttttaatttattttgtgataaattaccagtttcaatcactgtagaaaagccccattatgaatttaaatttcaaggaaagggtgtgtgtgtgtgtatgtgtggggtgtgtgtgtgtgagagtgatgggacagttcttgattttttgggttttttttcccccaaacatttatctacctcactcttattttttatatgtgtatatagacaaaagaatacatctcacctttctcagcacctgacaataggccgttgatactggtaacctcatccacgccacaggcgccacacccaggtgatgcagggggaagccaggctgtattccggggtcaaagcaacactaactcacctctctgctcatttcagacagcttgcctttttctgagatgtcctgttttgtgttgctttttttgttttgttttctatcttggtttccaccaaggtgttagatttctcctcctcctagccaggtggccctgtgaggccaacgagggcaccagagcacacctgggggagccaccaggctgtccctggctggttgtctttggaacaaactgcttctgtgcagatggaatgaccaacacatttcgtccttaagagagcagtggttcctcaggttctgaggagaggaaggtgtccaggcagcaccatctctgtgcgaatccccagggtaaaggcgtggggcattgggtttgctccccttgctgctgctccatccctgcaggaggctcgcgctgaggcaggaccgtgcggccatggctgctgcattcattgagcacaaaggtgcagctgcagcagcagctggagagcaagagtcacccagcctgtgcgccagaatgcagaggctcctgacctcacagccagtccctgatagaacacacgcaggagcagagtcccctccccctccaggctgccctctcaacttctccctcacctccttccctaggggtagacagagatgtaccaaaccttccggctggaaagcccagtggccggcgccgaggctcgtggcgtcacgccccccccgccagggctgtacctccgtctccctggtcctgctgctcacaggacagacggctcgctcccctcttccagcagctgctcttacaggcactgatgatttcgctgggaagtgtggcgggcagctttgcctaagcgtggatggctcctcggcaattccagcctaagtgaaggcgctcaggagcctcctgctggaacgcgacccatctctcccaggaccccggggatcttaaggtcattgagaaatactgttggatcagggttttgttcttccacactgtaggtgaccccttggaataacggcctctcctctcgtgcacatacctaccggtttccacaactggatttctacagatcattcagctggttataagggttttgtttaaactgtccgagttactgatgtcattttgtttttgttttatgtaggtagcttttaagtagaaaacactaacagtgtagtgcccatcatagcaaatgcttcagaaacacctcaataaaagagaaaacttggcttgtgtgatggtgcagtcactttactggaccaacccacccaccttgactataccaaggcatcatctatccacagttctagcctaacttcatgctgatttctctgcctcttgatttttctctgtgtgttccaaataatcttaagctgagttgtggcattttccatgcaacctccttctgccagcagctcacactgcttgaagtcatatgaaccactgaggcacatcatggaattgatgtgagcattaagacgttctcccacacagcccttccctgaggcagcaggagctggtgtgtactggagacactgttgaacttgatcaagacccagaccaccccaggtctccttcgtgggatgtcatgacgtttgacatacctttggaacgagcctcctccttggaagatggaagaccgtgttcgtggccgacctggcctctcctggcctgtttcttaagatgcggagtcacatttcaatggtacgaaaagtggcttcgtaaaatagaagagcagtcactgtggaactaccaaatggcgagatgctcggtgcacattggggtgctttgggataaaagatttatgagccaactattctctggcaccagattctaggccagtttgttccactgaagcttttcccacagcagtccacctctgcaggctggcagccgaatggcttgccagtggctctgtggcaagatcacactgagatcgatgggtgagaaggctaggatgcttgtctagtgttcttagctgtcacgttggctccttccagggtggccagacggtgttggccactcccttctaaaacacaggcgccctcctggtgacagtgacccgccgtggtatgccttggcccattccagcagtcccagttatgcatttcaagtttggggtttgttcttttcgttaatgttcctctgtgttgtcagctgtcttcatttcctgggctaagcagcattgggagatgtggaccagagatccactccttaagaaccagtggcgaaagacactttctttcttcactctgaagtagctggtggtacaaatgagaacttcaagagaggatgttatttagactgaacctctgttgccagagatgctgaagatacagaccttggacaggtcagagggtttcatttttggccttcatcttagatgactggttgcgtcatttggagaagtgagtgctccttgatggtggaatgaccgggtggtgggtacagaaccattgtcacagggatcctggcacagagaagagttacgagcagcagggtgcagggcttggaaggaatgtgggcaaggttttgaacttgattgttcttgaagctatcagaccacatcgaggctcagcagtcatccgtgggcatttggtttcaacaaagaaacctaacatcctactctggaaactgatctcggagttaaggcgaattgttcaagaacacaaactacatcgcactcgtcagttgtcagttctggggcatgactttagcgttttgtttctgcgagaacataacgatcactcatttttatgtcccacgtgtgtgtgtccgcatctttctggtcaacattgttttaactagtcactcattagcgttttcaatagggctcttaagtccagtagattacgggtagtcagttgacgaagatctggtttacaagaactaattaaatgtttcattgcatttttgtaagaacagaataattttataaaatgtttgtagtttataattgccgaaaataatttaaagacactttttttttctctgtgtgtgcaaatgtgtgtttgtgatccattttttttttttttttttaggacacctgtttactagctagctttacaatatgccaaaaaaggatttctccctgaccccatccgtggttcaccctcttttccccccatgctttttgccctagtttataacaaaggaatgatgatgatttaaaaagtagttctgtatcttcagtatcttggtcttccagaaccctctggttgggaaggggatcattttttactggtcatttccctttggagtgtagctactttaacagatggaaagaacctcattggccatggaaacagccgaggtgttggagcccagcagtgcatggcaccgttcggcatctggcttgattggtctggctgccgtcattgtcagcacagtgccatggacatgggaagacttgactgcacagccaatggttttcatgatgattacagcatacacagtgatcacataaacgatgacagctatggggcacacaggccatttgcttacatgcctcgtatcatgactgattactgctttgttagaacacagaagagaccctattttatttaaggcagaaccccgaagatacgtatttccaatacagaaaagaatttttaataaaaactataacatacacaaaaattggttttaaagttgactccacttcctctaactccagtggattgttggccatgtctccccaactccacaatatctctatcatgggaaacacctggggtttttgcgctacataggagaaagatctggaaactatttgggttttgttttcaacttttcatttggatgtttggcgttgcacacacacatccaccggtggaagagacgcccggtgaaaacacctgtctgctttctaagccagtgaggttgaggtgagaggtttgccagagtttgtctacctctgggtatccctttgtctgggataaaaaaaatcaaaccagaaggcgggatggaatggatgcaccgcaaataatgcattttctgagttttcttgttaaaaaaaaatttttttaagtaagaaaaaaaaaggtaataacatggccaatttgttacataaaatgactttctgtgtataaattattcctaaaaaatcctgtttatataaaaaatcagtagatgaaaaaaatttcaaaatgtttttgtatattctgttgtaagaatttattcctgttattgcgatatactctggattctttacataatggaaaaaagaaactgtctattttgaatggctgaagctaaggcaacgttagtttctcttactctgcttttttctagtaaagtactacatggtttaagttaaataaaataattctgtatgc

SEQ ID NO: 5541 - DNA, 2536 bp, Homo sapiens
taagcagaaacattttgttttaatggcagcctgttggcgacgtgccaacatccaaaggccttaacttattttaagaggccgagggagtctatgaaaatctccccttttttacttttttaaagagtactcccggcatggtcaatttcctttatagttaatccgtaaaggtttccagttaattcatgccttaaaaggcactgcaattttatttttgagttgggacttttacaaaacacttttttccctggagtcttctctccacttctggagatgaatttctatgttttgcacctggtcacagacatggcttgcatctgtttgaaactacaattaattatagatgtcaaaacattaaccagattaaagtaatatatttaagagtaaattttgcttgcatgtgctaatatgaaataacagactaacattttaggggaaaaataaatacaatttagactctaaaaagtcttttcaaaaagaaatgggaaataggcagactgtttatgttaaaaaaattcttgctaaatgatttcatctttaggaaaaaattacttgccatatagagctaaattcatcttaagacttgaatgaattgctttctatgtacagaactttaaacaatatagtatttatggcgaggacagctgtagtctgttgtgatatttcacattctatttgcacaggttccctggcactggtagggtagatgattattgggaatcgcttacagtaccatttcattttttggcactaggtcattaagtagcacacagtctgaatgcccttttctggagtggccagttcctatcagactgtgcagacttgcgcttctctgcaccttatcccttagcacccaaacatttaatttcactggtgggaggtagaccttgaagacaatgaagagaatgccgatactcagactgcagctggaccggcaagctggctgtgtacaggaaaattggaagcacacagtggactgtgcctcttaaagatgcctttcccaaccctccattcatgggatgcaggtctttctgagctcaagggtgaaagatgaatacaataacaaccatgaacccacctcacggaagctttttttgcactttgaacagaagtcattgcagttggggtgttttgtccagggaaacagtttattaaatagaaggatgttttggggaaggaactggatatctctcctgcagcccagcaccgagatacccaggacgggcctggggggcgagaaaggcccccatgctcatgggccgcggagtgtggacctgtagataggcaccaccgagtttaagatactgggatgagcatgcttcattggattcattttattttacacgtcagtattgttttaaagtttctgtctgtaaagtgtagcatcatatataaaaagagtttcgctagcagcgcattttttttagttcaggctagcttctttcacataatgctgtctcagctgtatttccagtaacacagcatcatcgcactgactgtggcgcactggggaataacagtctgagctagcaccaccctcagccaggctacaacgacagcactggagggtcttccctctcagattcacctggaggccctcagacccccagggtgcacgtctccccaggtcctgggagtggctaccgcaggtagtttctggagagcacgttttcttcattgataagtggaggagaaatgcagcacagctttcaagatactattttaaaaacaccatgaatcagatagggaaagaaagttgattggaatagcaagtttaaacctttgttgtccatctgccaaatgaactagtgattgtcagactggtatggaggtgactgctttgtaaggttttgtcgtttctaatacagacagagatgtgctgattttgttttagctgtaacaggtaatggtttttggatagatgattgactggtgagaatttggtcaaggtgacagcctcctgtctgatgacaggacagactggtggtgaggagtctaagtgggctcagtttgatgtcagtgtctgggctcatgacttgtaaatggaagctgatgtgaacaggtaattaatattatgacccacttctatttactttgggaaatatcttggatcttaattatcatctgcaagtttcaagaagtattctgccaaaagtatttacaagtatggactcatgagctattgttggttgctaaatgtgaatcacgcgggagtgagtgtgcccttcacactgtgacattgtgacattgtgacaagctccatgtcctttaaaatcagtcactctgcacacaagagaaatcaacttcgtggttggatggggccggaacacaaccagtctttttgtatttattgttactgagacaaaacagtactcactgagtgtttttcagtttcctactggtggttttgatattgtttgtttaagatgtatatttagaatgacatcatctaagaagctgattttgctaaactcctgttccctacaatgggaaatgtcacaagaatgtgcaaaaataaaaatctgaggaaaaaacccac

SEQ ID NO: 5542 - DNA, 189 bp, Homo sapiens
taaacactcaagaacctcaggagcgctgccagcttgacactggggaatccagccagtccagcacactcttccatcctgtcctgtccaatgcgggggcactgcagaactctctagaaatgtcatgattgagcttcagagctaaaatgccttcacccttcccccaagttggaatatatcctcccccaaatt

SEQ ID NO: 5543 - DNA, 1025 bp, Homo sapiens
ggcttccaagctgatgtttgtacttttgtgttactgcagtgacctgccctacatatctaaatcggtaaataaggacatgagttaaatatatttatatgtacatacatatatatatccctttacatatatatgtatgtgggtgtgagtgtgtatgtgtgggtgtgtgttacatacacagaatcaggcacttacctgcaaactccttgtaggtctgcagatgtgtgtcccatggcagacaaagcaccctgtaggcacagacaagtctggcacttccttggactacttgtttcgtaaagataaccagtttttgcagagaaacgtgtacccatatataattctcccacactagcttgcagaaacctagagggccccctacttgttttatttaactgtgcagtgactgtagttacttaagagaaaatgctttgtagaacagagcagtagaaaagcaggaaccaagaaagcaatactgtacataaaatgtcatttatattttccaacctggcatgggtgtctgttgcaaaggggtgcatgggaaagggctgttgatattaaaaacaaacaaaacaaaaaagccccacacataactgttttgcacgtgcaaaaatgtattgggtcaagaagtgatctttagctaataaagaaagagaatagaaaacacgcatgagatattcagaaaatactagcctagaaatatagagcattaacaaagtaaaattaatatattaagttataattggaatatgtcagaagtttctttttacattcatatcttaaaaattaaagaaactgattttagctcatgtatattttatatgaaagaaaacacccttatgaattgatgactatatataaaattatattcactacttttgaacacattctgctatgaattatttatataagccaaagctatatgttgtaacttttttttagagaatagctttatcttggtttaactctttagttttattttaagaggggaaaacaaaaatatcttgcaagcagaaccttggaaaaaaaaa

SEQ ID NO: 5544 - DNA, 984 bp, Homo sapiens
tatgccagaactgtgagcaagattaggagttctattctagatacttaaaaggctttttgccttgcacaaagtatatcctatgcaatttctgatttgctgtgaaatcagaaagcaggtatacacttttgggttttctgtttgtttggttggttttcattgtaggggagggattttttatatatatataaaaacacacaccacatgcttgaaggtcttaatttggtttcttggtccaagtttaagaggtccaagctttgtatacaatactgcatttagaaaaattgtcttttcttaaatgacacaagcaggtttagagtggagaatttaccctttccaaatttatggttccttggtaagcacggtattctaaaccagcagagcacttgttaacgtttggaggcacagtttcacccagggcgaccctgggttcttttggaaaatgccctaagaaatgtttgaagtaacgctgtcacctcattcatttttaatgagtacaaactggccgtttcaaactgttctttttcctaattaatgtagctttcggatgacataaatccagtatctctgcttatgacataaatccagtacctctgcttttcttttgctgtgctcttgtttttaacttattttttttttaacaactgtagtacactaccctgagacactgcatctcgatttctatctctagttagagttgtacttttaaaaaaattaacgggaaagaaaataactttgtgaagccagtgtattctgtttttaaaactgtgcctgcagtgcaatactccttctggtgtattttatccattatttcacttgctggtcgtcatttcacagccagctttgacatgcccgtgaggacaggagccgccgcttcagttgtcactgcagagccatcgtatgtcagttgcaatttccatctgaagctatgtctttgacttcactttaagcagaaaattttgtaccctggtggtcgagtcttccctt

SEQ ID NO: 5545 - DNA, 158 bp, Homo sapiens
tataattattactttattgcattttttaaaaatttgcatcttctgaggagcttaatgtgtttttgcaacttaagatgactagatattaatcattcctataaccactgcttggtaagcgatgcctcattcttctgaaataaaaaaaaaactttgactgt

SEQ ID NO: 5546 - DNA, 1852 bp, Homo sapiens
aggaaaggcggggctccttcctcaaacatcggacggcggaatgtggcagatgaaatgtgctggaggaaaaaaatgacatttctgaccttcccgggacacattcttctggaggctttacatctactggagttgaatgattgctgttttcctctcactctcctgtttattcaccagactggggatgcctataggttgtctgtgaaatcgcagtcctgcctggggagggagctgttggccatttctgtgtttccctttaaaccagatcctggagacagtgagatactcagggcgttgttaacagggagtggtatttgaagtgtccagcagttgcttgaaatgctttgccgaatctgactccagtaagaatgtgggaaaaccccctgtgtgttctgcaagcagggctcttgcaccagcggtctcctcagggtggacctgcttacagagcaagccacgcctctttccgaggtgaaggtgggaccattccttgggaaaggattcacagtaaggttttttggtttttgttttttgttttcttgtttttaaaaaaaggatttcacagtgagaaagttttggttagtgcataccgtggaagggcgccagggtctttgtggattgcatgttgacattgaccgtgagattcggcttcaaaccaatactgcctttggaatatgacagaatcaatagcccagagagcttagtcaaagacgatatcacggtctaccttaaccaaggcactttcttaagcagaaaatattgttgaggttacctttgctgctaaagatccaatcttctaacgccacaacagcatagcaaatcctaggataattcacctcctcatttgacaaatcagagctgtaattcgctttaacaaattacgcatttctatcacgttcactaacagcttatgataagtctgtgtagtcttccttttctccagttctgttacccaatttagattagtaaagcgtacacaactggaaagactgctgtaataacacagccttgttatttttaagtcctattttgatattaatttctgattagttagtaaataacacctggattctatggaggacctcggtcttcatccaagtggcctgagtatttcactggcaggttgtgaatttttcttttcctctttggggatccaaatgatgatgtgcaatttcatgttttaacttgggaaactgaaagtgttcccatatagcttcaaaaacaaaaacaaatgtgttatccgacggatacttttatggttactaactagtactttcctaattgggaaagtagtgcttaagtttgcaaattaagttggggagggcaataataaaatgagggcccgtaacagaaccagtgtgtgtataacgaaaaccatgtataaaatgggcctatcacccttgtcagagatataaattaccacatttgccttcccttcatcagctaacacttatcacttatactaccaataacttgttaaatcaggatttggcttcatacactgaattttcagtattttatctcaagtagatatagacactaaccttgatagtgatacgttagagggttcctattcttccattgtacgataatgtctttaatatgaaatgctacattatttataattggtagagttattgtatctttttatagttgtaagtacacagaggtggtatatttaaacttctgtaatatactgtatttagaaatggaaatatatatagtgttaggtttcacttcttttaaggtttacccctgtggtgtggtttaaaaatctataggcctgggaattccgatcctagctgcagatcgcatcccacaatgcgagaatgataaaataaaattggatatttgagaa

SEQ ID NO: 5547 - DNA, 1262 bp, Homo sapiens
ttcctgtggaatgactgtcacacatcagagctggctggcccggggctgcagcctgacccctctgccatcggcctctagttctccaaggacctagaagacagatggagttctcccctgaactccttgctgctaagaagtgctgagaagttactcgcctggcggtggctccagggttctctggttctctggagcagagttctctgaataccccatcccccaactgctgattttacagccccagggaagacagtggtatcaggctgggagcggcctcctctggcctcccccatcagtttgcaggagcaggggtgcaggatcctgttctgagctgggtcaaacaaagcagggccgggccttcctgccatccccaggtctcagatggaattacactagaggccctccgctgggaagcacttgaggtagggcaggaggggggctgtgacccctgccctttccccgccagagacctcaggctctcagcacattccacaggctcctgagtccccgaggcctgggccagcttgggcaagccaagatcagatgtctctgtgttcgggaaggtctccgtgtgggaaagcccttgggggatcccgggtgaggagtgttgccccatccagagaatgaatgagttcctttaagtgccaccgccagcaagcccagaggcacacagtccgagtgcacccgcttagcctttacattcctctccaccgacaaaaggaaggggaaactcaatcagcaggacttcagaaagggccttgtgtttatagctttgtcaagtaaatttggacgcagctggagcacaggccctgtttgtttgcacataataatcttgtttatcactttaaaaaattcagtaatatctcagcagtcaggcttctggttgtgaaatcacattgtatgggatttataccaaattatgtatttgctaaacattcactgcacacgtgtacagcggagtacgaaaaggaacgttgtccacaggggatttatggatacaacagcaaacattttataaactatgcacatgcattacacacatgcacacacatatgcacacacatgtgcaaacatagccacttttttgtcaagagttaccctttggggctccttaaaccagaatgggagtttgaaagagagatcatactccagctgaagtttgttgacccttttctaaaattaaaaagatcaaatttagtatttgctggatatgcagggagatgagactcttttaatctcaaaataaacagattctttcaagaacg

SEQ ID NO: 5548 - DNA, 40 bp, Homo sapiens
cagtggatgcctactgggcttctgcaaccgctttccacgg

SEQ ID NO: 5549 - DNA, 19 bp, Homo sapiens
gtacagtggacagcttagg

SEQ ID NO: 5550 - DNA, 872 bp, Homo sapiens
gaaaggtgtaattaaaggttaatctgtgattgttatgaagtgaatttgaatatcatcagaatgtgtctgaaaaaacattgtcctcaaataatgttctttaaaggcaatctttttaaagatttcactaatttggaccaagaaattacttttcttgtatttaaacaaacaatggtagctcactaaaatgacctcagcacatgacgatttctattaacattttattgttgtagaagtattttacattttcatcccttctccaaaagccgaatgcactaatgacagttttaagtctatgaaaatgctttattttttcattggtgatgaaagtctgaaatgtgcatttgtcatccccactccatcaatccctgaccatgtaaggcttttttattttaaaaaaacagagttatcccaatacattatcctgtgatttaccttacctacaaaagtggctcctgtttgtttgatgatgattggttttatttttgaaatatttattaagggaaaactaagttactgaatgaaggaacctctttcttacaaaacaaaaaaaagggcagaaatcaccccaaggaacgatttctcaggttgagatgatcaccgtgaatccggcttcctctgagcattcgatggccttagcacctcatcaagccagcacatcctgcctgctgttgcagcctggctgggtttattcttcagttaccctaatcccatgatgcctggaaccttgattaccgttttacatcagctcttgtacttttcagtatattttcataatgagttatattgtcatttagactttgaacagctctgggaaatagaagactagggttgtttcttaaatttagctcatgttataataaaaagttgaaatg

SEQ ID NO: 5551 - DNA, 5548 bp, Homo sapiens
attgcaataggagcttggatggttcgaggaataggcattggaggtggtttctggccgtgattggatgtgaagtagaagaggtcctcgatcatggtgttagaattgactggatagtaacaggtggtctggtggatagcggggagcatggctcagcaccagagcagaggcccagccagccctctgcagcccaaacgtccccaacggttgcctggcaccatctctctctgatgagacgaatctcattttcatttccattaacctggaagctttcatgaatattctcttcttttaaaacattttaacattatttaaacagaaaaagatgggctctttctggttagttgttacatgatagcagagatatttttacttagattactttgggaatgagagattgttgtcttgaactctggcactgtacagtgaatgtgtctgtagttgtgttagtttgcattaagcatgtataacattcaagtatgtcatccaaataagaggcatatacattgaattgtttttaatcctctgacaagttgactcttcgacccccacccccacccaagacattttaatagtaaatagagagagagagaagagttaatgaacatgaggtagtgttccactggcaggatgacttttcaatagctcaaatcaatttcagtgcctttatcacttgaattattaacttaatttgactcttaatgtgtatatgttcttagattagaataatgcaacttcgagtatgctttaatatttcaatattcaagttacaaatgtataaggcagttagaaataatacagtcacatgtcacttaatgatagggaaacattctgagaaatgcattgtaaggtgactttattgtgtgaacatcatggagtgcacttatacaaacctagatgggacacctatgacccacccaggccagatggtacagcctgttgctcctgggccacacacctgtacagcatgtgaccgcactgaataccgcaggcaattgtaacacagtggtgagtatttgtgtttacaaacataggaaaggtacagtaaaactatggtattacaatgttatgggaccaccgtcatgtaagtggtatgtctttgacagaaacatggttacgtggttcatgactgtatattcactggaagatagtcaagactaaagacacattagagcaaattgacccctttaacatgtgattattgtccaattaaagacagttgatttaagtagcatgaggtattattttatttgtattcgatctgtgttacctgggatccagtatcaaatatatccacattctttatcagcaagcattcatggccattcagaagaaataaattaggtaacttgataataaggctaagtgggagagtacctgttcaatagctcatatatcgagtaccctgtcatacaggaacaagttaaaggacacaattgaggttaggctagcttctacaaattgcaatatgcagtttttgaaagattttctaacaaaaagccaataaatgtagccatctccttgttgtttgcaatggcagagcatcctagagttcctcagctaacctctcattatgtgtcttaaatgcaaaagagccattaattatgccagtatttgaatcaaagaggtcattctctgtctatagtgttcccatccatgtgttccaaatgggagcatagcatgaagtgatgcacatatttcaccacggtatcatgtacttcatggccagtgttttatctcagcagggaactacgccaagttgaaagatggggttgggtaaagtagattaggtgaagtagaacataaaattgaatagtacccaattaaagttcctcagtaagaaaaaaaatgtgtttttgtaggcaaaaagaacatttctaaagtctcaaggaatagcttcctaaagtgttgagtaaagaggctaaataaaatgagactagtttaatatagagagaaaaatacctttatggagtaaacgtgtacatgatgatcatgggttgtcagtgatttgtgaactgagagcagcaacaacattattttttaaaaatcttaaatcctctcaatggatggttaacaaatgctcaaagtccattactctttttattggctcttgcaggttttgtgttttatcatcagtgcttttagaaatgcaggccttaacttactgaactgaactttctgaaaacgtaatgtagcagtatcaatatacttttgggcataaaaatagtttcctaggtaaggggtgtgagatattcaaagaatacatgtggctaacaagtgtaatgagaaagttcatgtgtcacatgaaaatgatcatgtttgtgttgctacagcttttgtgggaaatttagtttaaaggcagctcttggtgtaccttagtatattttaatccacaattataccattgatactgagaggtgatacccgatgatcttctctataatattcttagagtaaaacaaaatctcaaaagtattaatagctcttctacccttgaaggtgactggtcctgggacagttagaatctttcaggtttacctctgttcagcagatacttcagtaggatacatagcttttcttccagtgaaacaaagttcatatcatccattgtttttcaagcacgtgacaccagcctcaaagtaaatgacatgaccagtggttgaacagtctaattttcaaatttaatatagagcatataacttctgatttgatagtatttattttaaaaaattatgttttcatcattcatttgaaaatgaaaaagccccaaagtgagaactttgggggagggcctagaacatggatagatctcttagtggtctttccaaaagtacatgtacttgaaatattttcattatcatactattctttgaaaaaaaagatgcttactgtatacttgttttcaagcatcctctaaaatcaaaggttttgatcacaatatgcagatttctcttgatagatacttaaataggctatttctctcctcttcttgggcaatgccttgttttctcctctgaatatttgcatttgaaaggattgcttcctgttctgctcattgatcaaaggtagggccaattaaggattctaaccctaacccagcaccacaaagcccccctggagcatcttcccggctggcaggaccatgccatctctgtggagaaggtgctggggagggaagtccttccagtgccacatggagtgaggccctgcccatgctggggactttggggaggaatttggtattctggtggccttgctcagctctcattgagatcttttcctatcagaatgttagtgaatatacttcgcagctctttgttcagcaataaggaatattctttcaattcctgctcttcaagccaatttactacacccagttgtctttccagaagttcatcccagcggtaatatgttggtgtttgttcttctttggatttcacatctgttttctggtagaagtgagcactgttcacttgtgcagtcgtcttattttccttcttcctagatgactcagctctttgtaaatgttgtgctcaacttctaggggccagttctagactttggagatgcagtgtctcccaggtgtgcacggacacctggtccgtggaaacaggtgtgatgggcacaggctgctgcccttctgtctggtcgggggattcctcttcttcaagctgctcagctaacccagaagaggggagagagtactccggtggttcccagagcccctcccgttgtgccgcttcgacctgacacctgctcgatgctgacttaggcttcctgccaccaagcaggaaactagaaagagaacatttcagtgtaaggtctgttcccgacagcatggattagcttccgtgttctgaagttgttcttttcatggtgtctgacaccgagggcgttgttcgtccatcaggcgggattggatggagtcttggtgttttgccttctcagggaccaaaaatgtatcattgactccttaacagtgaccttcctcccaaggacatatccgtgttcatttttcataggttttactcatattcataggtagattctgttaatgtgagttggaaagaaaagaccaatttgtacaccagtcacaccacaagacagtttatcatataaaatacctcaattttttgtattcctcatttccacctcacaattgtactggtgatgaattttaagggtctgtcctttagcttataggtgatgtttcacatctggccagattcttatacctccattgtatacttgaaaaggttcagaattacaggaacagcagtgagaatttggcccactaccacgactcatttgtttcattcacattcctcacgtgcaacaacataattatattttaagaaaatgtaactttgttacatcaaaatatgttgtctagtaaaaagttgatattcagtagaacaaggatcatgtaaataaacatctatttcacatgtacccaaaagcatttaaaaagcagaatccagggcccagagcatgagccagggaggaggatgtttttcttcttttctctatttttccctaaattgtgcaaacataggtgagtctcttaacctttctgtgcctcagtttttctacctctaaaggggtgggatggttcttcaaattgtttctaaaacaccggcactttcagcagtgttctggtggcctgagatgagagcaccgtgttcagaagtgcctgggagtggcacagtggaaactccgcttgcacggaccatggagtctgctcaggaccatgctgtaggacacacagcctcatgcgctgagaaagcaaaggaagtgctgggtgtaaagtttgcatgattccatgaagctttagttttcctttttttgttttaaaagaaagggttttatatgttctattgtaaaatatggaaattaaacagggacttcagaaagccgcacagaaagatcaccttccgatggtgtgatgtgctcctgacattcggccgaggtctgtattctgaaaaagatttaatggcctgtgaaacacgtggattctgttgcactggatttgtaataaatgacgctgaacttcctgcttccaagcagctcaaccctgatgctgaactgacaccaggcgaatgtcagggctcccaaaccactagtgccaaagggtcatgttgaaaagttcagaatatttatttgtcagaatataataattgccccccaccttagtatttttgcactttacagaaatttagatactgtttttcagtggcttgagcgttttgccttttcaaaggataactattattttcttgaaaatggaatataatcatgagaggaagaagatgtaaaaaatgtcaaatgttgattggttgtgtaaaagttttgtcatagacatgtattggggagcttccaattagcatacatagacacatgtgtcagtggccaagacctgcttatattttgctttatagatgtagtcatagcatgttgttattgcctcatgtaaataaaaaggctattaagttttccagtaatatttattaatctgtatgtgttttaaaataaaataacttatttctagctg

SEQ ID NO: 5552 - DNA, 444 bp, Homo sapiens
taggtgtagcagagatctcgctcctgtgtttccctggccagaggccactgacagggtggggggacatttttgttcctggtgtttgtgttccagttccacgagtgtacgtttggattttcaacttggtttcgtatctgccaaagctttgtacattttttatgtggtgttgatttcaatcggctactgttctgttctgtattttggcatctgtgtttttaagtgagatctgtggttctctgttttgtgttttaattgttatgttttggtatcagctttgtgctggctttgtgaaatgaattgagaagctatccatctcatttctggtatagttcatgtagcattgtaatcggttgttctttgaacgttcaaatgactcatcagtaaaaactgtctacagagaagtaaatatctatatctatatatataaatatactttcagcataa

SEQ ID NO: 5553 - DNA, 837 bp, Homo sapiens
caaagtctggaggcagatgaatggtttctgaccctcaccagggctgtggaagggtgggggtgggtcattatagtattcaggatttacagtgcagtattcacgtgtaacttttaagttttcagtacagtgcttttatacctttaatgcaatgttgtattcatttgggtactattgtgtagtatttaggatgtatgcatgtttgtttatatgtaagcttggttggtgctttcgcttttgtgctacctttcttggatttttgtaccagagatgtgctaaactgatgaaatacattgagaaagtttccatcttattcttttatatgggactgatgatgtgtgttggggtagactgctcctgcagagtttggaagaagtcaccagcaaagccggcctaaccaagaaaagtcaaggcccttcatgaccttgctgggcacagaaaacaccctcgtggagtacactaatttgaactggactggtctcagtgtgagcacttggcacactttactaaacacatatacaaccccaccgtgagtcaactttaaagtaaacattaaagattcttgtgatacaatcatttttggaaaagtgtactttatcattttaacaaagcagtatggttgggaatgagacaattctctattttacagtgtatacagatacaactatttcccctaatagggtgggaaaaatcgctactcatgattactcctaaatttgtgaagtttatagttctattgtctttaaatgtaactcatgtttatttcaaaaacattcacaaatatagaaaagtatacaaaacaaaacagtaagattgtctgtaatcacatcatatgggaat

SEQ ID NO: 5554 - DNA, 1887 bp, Homo sapiens
aacaaaacaaaacaaaataaaacaaaaaaaaggaaggaaaaaaaaagaaaaaatttaaaaaattttaaaaatataacgagggataaatttttggtggtgatagtgtcccagtacaaaaaggctgtaagatagtcaaccacagtagtcacctatgtctgtgcctcccttctttattggggacatgtgggctggaacagcagatttcagctacatatatgaacaaatcctttattattattataattatttttttgcgtgaaagtgttacatattctttcacttgtatgtacagagaggtttttctgaatatttattttaagggttaaatcacttttgcttgtgtttattactgcttgaggttgagccttttgagtatttaaaaaatatataccaacagaactactctcccaaggaaaatattgccaccatttgtagaccacgtaaccttcaagtatgtgctacttttttgtccctgtatctaactcaaatcaggaactgtattttttttaatgatttgcttttgaaacttgaagtcttgaaaacagtgtgatgcaattactgctgttctagcccccaaagagttttctgtgcaaaatcttgagaatcaatcaataaagaaagatggaaggaagggagaaattggaatgttttaactgcagccctcagaactttagtaacagcacaacaaattaaaaacaaaaacaactcatgccacagtatgtcgtcttcatgtgtcttgcaatgaactgtttcagtagccaatcctctttcttagtatatgaaaggacagggatttttgttcttgttgttctcgttgttgttttaagtttactggggaaagtgcatttggccaaatgaaatggtagtcaagcctattgcaacaaagttaggaagtttgttgtttgtttattataaacaaaaagcatgtgaaagtgcacttaagatagagtttttattaattacttacttattacctagattttaaatagacaatccaaagtctccccttcgtgttgccatcatcttgttgaatcagccattttatcgaggcacgtgatcagtgttgcaacataatgaaaaagatggctactgtgccttgtgttacttaatcatacagtaagctgacctggaaatgaatgaaactattactcctaagaattacattgtatagccccacagattaaatttaattaattaattcaaaacatgttaaacgttactttcatgtactatggaaaagtacaagtaggtttacattactgatttccagaagtaagtagtttcccctttcctagtcttctgtgtatgtgatgttgttaatttcttttattgcattataaaataaaaggattatgtatttttaactaaggtgagacattgatatatccttttgctacaagctatagctaatgtgctgagcttgtgccttggtgattgattgattgattgactgattgttttaactgattactgtagatcaacctgatgatttgtttgtttgaaattggcaggaaaaatgcagctttcaaatcattggggggagaaaaaggatgtctttcaggattattttaattaatttttttcataattgagacagaactgtttgttatgtaccataatgctaaataaaactgtggcacttttcaccataatttaatttagtggaaaaagaagacaatgctttccatattgtgataaggtaacatggggtttttctgggccagcctttagaacactgttagggtacatacgctaccttgatgaaagggaccttcgtgcaactgtagtcatcttaaaggcttctcatccactgtgcttcttaatgtgtaattaaagtgaggagaaattaaatactctgagggcgttttatataataaattcgtgaag

SEQ ID NO: 5555 - DNA, 2068 bp, Homo sapiens
aaaccttgaaatggccttttttaatatatataaataaatgttaatattatttatgtttattatttgcacagaagagttctagggagatgtatttctaaatgtttcccaggctaatacaggaaacaagaggtaccaaaaaagaaagtttattttttaaaattctaagtagagtatattgaaaagaaaaagaagagccttaacatatataaaagtttaaagaagagtaacacttgaaaagtgtgtttagatttattttttcatctcatttttaagaacaagcagtacgatttgttttcttcaacatgtgtgactgcgcactgagtacaaatgtgtgactgctcatggttaatgcaggcaggtgtgaacatgggggaacaatgagcagagatggcagagggcagagcacatggcccccagaggcttccagtctcactgacacaggagggctgggctccacttcatccagatgaaggaaaggaagacctcaagaaaaattcacagttgagtgcatcccagcattctgttccgggcaggcatttcaggaagaccgccttgtaggtattacatccctggtgtcgtattttgcctgttaaatcgtaacaagcaataaacaactttcactttgcaaagacagtgtgtccagttaccactggtgtatgaaatgattaatacctgacctcacagagtatgatctcagggcacttccgtaaggcaagtccttttagaggctatgaagaaaacagctgcatggcacataccaaagctgctgcacagctggccaccatggcaccctgcaccaggccatcagcaccacgtgccaaggagctcagcggtcttcaggcatttttgtaatgagccattagttctgtccctctaaaactagaaaaggaagggcaggaaatgataacaacccaaggcaatgatatggcatgtcatcttccgagcccttctttctactttgtcaaacagttcttagttgctggctctgctcggcaccgggactgtgaagggtgtactccctgctgtgtgggagggacctagggcctctttggatgctgtcttcgaggacagcaatgcagagagggcataggatctgaggacaaggaaattcctcagcatggcgtatcaggaaagcatggctcattctgcaatgagccatgagtgtgggccatcgcaagtcacagaaaatgcacctcattccagtcaagcagaaaaacaggcacaggctcagtgtaggtcccaagagagggtgcctggactcagcaactcagacctgggcttttctcccagctttcagggacagctttgtcctgagtctgcctctgttcacggggatgcttggctggagtcacccccaggacttatccatgcatcactattcagaagacacagagggcccctctctccacattccaaacagagtcctggtttcctcagcctcaccctgcatagcttgcacaacatcctcagaaccattcactggcaaatggaggggaacgtgctgactgggactcccagctggagctgggaggagaggtccacttcccttagaacacctgagctgctgcatgagtggacgtcagaagaatctctatgccctgttaaatggggagacaaaggggtggtgggggcttcagccagtgatttcggaccgaaggtgacagccgtcccaaccctgcccagcctgatgccacctcctctgttcttggaacaacgcataggaaaagaatctcctttggaaggtgacactgctccctgaattaaggtaatggttgcgagcaccaagtacaaggactagacgcatatttacctgcgtatctgagagttccagattcccagcttccagatgatccttgcacagacaacctaccttctttccagaggatgtctttctcctctggagagtagatgcttgctcttgggaaacggaatgaccttggcgctggcttcaggaatatgcatcccacagccagtttagagaaatacatgttgtaaatggcattgacagctgctctttaggatggggagtattatggaaatccacaataacaatctatggcaagcaact

SEQ ID NO: 5556 - DNA, 4244 bp, Homo sapiens
gtgactgtacttgatttttcaaagacttcatttaacactgagtgaaatattactctgcctgtcaagtttttatacctgtacacacacagacacacaagcagacacacacatatatacatacgcaattgtatatatatgtgaactttctcagcatatatataaaatacacgtgtatatgaggatgtatgtgtatatgtttatacacacaggagtcagtgcccatgtgtatggaagacaaatacacatacatatatacattttgcagctatggacaatttaccacaggatgcatattaaagaaagtcatagtttttttcttttttaattgaaagggacaagtatcatctaaatattatgccttgagaatgagggcgtgaaacacaatatcatccccaaatgtgtcttgtattatcataagttagatgttttagtttaaaaatcagaaagacattcttagttaatctttgaaaactcatacagtggtattgctagtttaaaatgagtcacttacttcatatcctctcgttcagtttagtaagcaaaggcttcttggcttctctggtgatggggtttgttttcatcgggcatacgttttctgcaatggtttagtggctggggtgagccactggcagtgtgcttacctgttgtctgaaacatagatagatcccacgttgatgtctgaacgaccgtcttttgaaaactcatcgggagtgaatggcatctcgttgtaagtactctaatatacagtgtgtagtttgtttctgttgttcacttggagtggatccagcttcactgtcatgtgcgaacacagtgacacgtttggccagtgacatttcaatcactgaaaatgtgctctacatctcgtatggatttctaggcctgatatccaacagaaagcatagacgtctcaggttattcgttactctaaggtaaaaccatctaggatgattttcccccttgcagttatgttatcattcttataacattgtatgttaatagaaaatatatttgcataatatgcatatatatgtatatttaccaagattttgtttcttacgcttgctatcatggcagcatgcgatgtcatattttcctttatgtgatgtaactactttctgttatctagaaattaagattgaagctaaaacacttctactgttcaatttcagaaactaagaatcatcctcatgcctttatttctgtatctgacatatttcataagcacatccaactactcctagactgactaggattctgcaggaacatgacccgtacacaccacgcgtcacccaacgacccatgaccgttctctgaggcaaaggagggcaacctgacagcaaacacagtcactgttggttccttctgatccacagcctcatcagtatttggactttttaaagctcgtagaaacaagacaaggtgcaccggtttcatagacgcaaccttaacttactatttagatgagatctttctaaagaaaaaaaaaagagatgatatattttttgtaaacaatatttctatcacaggcatccataaactgaaatgactacagttgtgcaaacaggtgtcacagtgaagttgagcatttggagaaaaaaataaaaagcaaaatttgcaggaagaactgctaaattaatactttatcccaaaatgccacgtatgcctcaccctctctgttctatccaaaaccaaggaccagagtgctccaatggtaggccccagttgtctcgatgtaggtagaggcaccaccctccccgaggatgcgtgtggtgtggactatccccatgagctgaccactacttgatttttctttggtggccgtaacaacctttaatttgtgggcatctgcaacagttcaaaacccaccatcagataaaacataatccacaaaatctcacgctagaggcaattacctacttttagacccttttccctctttcattcctatctttttcctcctaatcgctgctctctggttttattttcatctggagactagccagggatttctttggctttggcttttctctgaccattttttccatgggtaacaatgggggatcctaaaagttaaacagattgggaaaaaccttgttaagtggccttatcattattatcatgttaaagaaaaaaaatacatttgcaaagaccttatccctttcaatacttcaggtatctttttctgtatccagtaattaaaggtgtgaggtccacatgcagaagagggaccccaaaatgtaaatggatgtggacaaaaacagtcaatggtctatttaagtgtataatttatactattcagaactgtgacattaattctttctgggagaaaagtgatttaaaacttttttgatgcatagttgaggtacccaaatatcaaaggcagagaccccatggggctccaaagagctgcagtctccttcccaaggttttctggatataaatttgcatggtatagtcataatagcttttgagctttttatatgcatttggcaccaagactgggatccacaactttgtagacactgcgatgaagttaacatattagctatactataaatagtgtttgtaactacacacacacacacacacacacacacaaatacatacatatattctgtaaaaacaaaaaaaaactttttaagatccttgggtatgtgtttgctttactccatttcagaagaaaattacttttcttctaacaaaattattttatagcttctccatttttaaaacttgtgagagcattgagaagagaactctgactgtgttaacagaagagagttgaattggagtctctgttgtgttaaaatgacctctcgttactccacagtagttatttgagccagtgactgagtcgcgttgaggaattctgaacccggacctctgacgttgttgggaggtggctgttacccacacccagacctcttgagtaaggacagaaacgttatcattggggatataatgagatttctttcttaacaattgaaagtaataaagagttaattttctcagtagtcctgtctttccaaaatgcgccacaggggctcaagatctacagaagaatcttgttatgacagtttgttattacccatattcagatatccttgagataatggaagagccctgctacataactccctacagagaaagactgatagacttgagtagtccttaaaacaagtgttattcctgttcaccaaccccgggactgtggaggggtttcactgtctataccatgcgacatccatttcccctgaatctcaaacgaactagaaagtatgtcatgataatatttccattagatttggaagctacctgtacatctgcaatattgtgtttttaacgccagcacccagaactttgacatgttcagtcactccctgaaaggcacttctctcttgtccaaacacagcgttgacatttttactgaggagatcatctcaaaggtgatgccaaacgagtctggggctggttttaaggggacaggcacattgcagttgtaggtgttcattttcagcatctagtagataatccattggtgtttgtcccaccattggtgtattctaacaagaatgtgtccaactttgaatctcctggcttgaaagtataaaccatcacttaattcttattttaactctccacctgaaaaccagttcatatttctggccattttatgtaagcaaaactgaacaattggtgaaacattttgttactcttggaattgactctggctgtcagtgtgagccattagagtaacatcgaatcttggggcaaagaactgcccaggtgaattaaatttttccaggacactagctagtgtgccttggattgattacctcttctactgcattgaaaggcgccatgttttcctgaaatactaaattcccaacacctgggtaaacaatgaccttccagagagtggctcccgtatgcctctccctaggaccaaccccatgaacatgttttgtcacgtttgtctcatgtttctacttcacaagtcagtgagtgtgtttaaggtaagtacaggattattctagtaggaataggcgattgctgtcataatcaattctcatgttgatttcattttattgtaaagataaatttaaacccagttttgcttaagcacattgatgtaattttttggtattatttgacatgaaaaaacagcaaaattgagtgatagatacaatatgaaacttgttgatgaatgaattcaaatttattaaaaaaggagtaactgacct

SEQ ID NO: 5557 - DNA, 501 bp, Homo sapiens
tagacatccatctattgctcgaagactaaaggaaacttcatccatcacaacccattagtcataaaactaccctgaccccactgtttgaagaagaaaaggtgcttaccctggagatgctacagagacacagtggaatagaccttgacactaacactctaattcaagcgaatgttggaacaccatgacctcctctgtgtgtcctttctccccaaggacaaaatgtagaaagatgtgagataacttactcaagattcccctccagaaaaatacgtatgtttaaaaacccttcctgctatacataggaaaagacacacatccacctaaaattgactgtactgtttaactgtcaattctcctgaggctaaacacagtttgtttttcttgtaatcacttttcatgttaaaataatcagcattcaaattgtatgctttctgaatatagactttctgggaaaaggtttactgctcgtaaggaaacattttatgtattaaaataaactgt

SEQ ID NO: 5558 - DNA, 721 bp, Homo sapiens
gatggggaaacgtcctcgtgagatgagagcctgagccaggcagcagagcgctcgctgctgtgtagactgtaggctgcctggtgtgtctgatgagaagcgtccgtcctcgagccaggcgggaggagggagtggagagactgactggccgtgatgggaatgacagtgagaaggtccgcctgtgcgcgtggaacactgtggacgctcgacttccaagggtcttctcacccgtaatgctgcattacatgtaggactgtgtttactaaagtgtgtaaatgtttatataaataccaaattgcagcatccccaaaatgaataaagcctttttacttgtgggtgcaatcgattttttttctttctcctttctttcaagtgtcgtgagtcgtcttgattgtatattggaaataactgtgtaacaaatcgtattataaatatttcaattaattttactctgaatttgtttattaaaagacttttgaacatgaaatgattagtattacttgaatgcatccagaggatatttaaaccaaaatgaaaaaccagaaggccatttggtgtcccccctcccaggtgtccccttgtagcatatgcattatgtcatctgaattgaggcctttctgtgaacagcatcataacttctatcatggaaagtgtactatatataatgtttgtgtcatgtatatgcctaaattttaattatctataaataaaacatctgacataa

SEQ ID NO: 5559 - DNA, 636 bp, Homo sapiens
aaggtggattcagagggacccccgggacaagggtctgagacccaaaggcacagtttagaggattgggggaagggagaacgaacccagggagcatattgctgtaaacgcttcaatgtgtgtagctttaggatgtgtttgcaaagttttgtttttttaatgttgtgttattttgctccagattttcatctataaacaaaggagcatttgttttgattttactctttttggtataaaaaattttgctagcttagtaaaacgaattggaaaacttgactatgatctggaacagataatgcaagaaggaacacataagtaagttgctttggtgccaagaaaataaaaaagctattatcaggtctcctaactaccccagtttgtaaggaaaaataaaagtttttataaaattaaaaaaaataattgcctatatccttattatgttaacctattttatttttctatatttcgtacatatataagtattattcatggttccaagcaatgagtgtaatgtattttctcccaatagtaattgtttatattcataattattcagctctgctgctaaacacgtagttccacttcgtttttttcttcttgctactgtagttattacaataaatactgtatttttgaagc

SEQ ID NO: 5560 - DNA, 1440 bp, Homo sapiens
ctcttgaaatataggaacttaaataatgtgaaactggattaaacttaatctaaatggaaccactctatcaagtattataccttttttagagttgatactacagtttgttagtatgaggcatttgtttgaactgataaagatgagtgagcatgcccctgaaccatggtcggaaaacatgctacacactgcatgtttgtgattgacgggactgttggtattggctagaggttcaaagatattttgctttgtgatttttgtaatttttttatcgtcactgcttaacttcacatattgatttccgttaaaataccagccagtaaatgggggtgcatttgaggtctgttctttccaaagtacactgtttcaaactttactatggccctggcctagcatacgtacacattttattttattatgcatgaagtaatatgcacacattttttaaatgcacctggaatatataaccagtgttgtggatttaacagaaatgtacagcaaggagatttacaactgggggagggtgaagtgaagacaatgacttactgtacatgaaaacacatttttcttagggaaggatacaaaagcatgtgagactggttccatggcctcttcagatctctaacttcaccatattaccacagacatactaaccagcagaaatgccttaccctcatgttcttaattcttagctcattctccttgtgttactaagtttttatggcttttgtgcattatctagatactgtatcatgacaaagactgagtacgttgtgcatttggtggtttcagaaatgtgttatcacccagaagaaaatagtggtgtgatttggggatatttttttcttttcttttcttttctttttttttttttttgacaaggggcagtggtggttttctgttctttctggctatgcatttgaaaattttgatgttttaaggatgcttgtacataatgcgtgcataccacttttgttcttggtttgtaaattaacttttataaactttaccttttttatacataaacaagaccacgtttctaaaggctacctttgtattctctcctgtacctcttgagccttgaactttgacctctgcagcaataaagcagcgtttctatgacacatgcaaggtcattttttttaagaaaaaggatgcacagagttgttacatttttaagtgctgcatttaaaagatacagttactcagaattctctagtttgattaaattcttgcaaagtatccctactgtaatttgtgatacaatgctgtgccctaaagtgtatttttttactaatagacaatttattatggcacatcagcacgatttctgtttagataatacaccactacattctgttaatcattaggtgtgactgaatttcttttgccgttattaaaaatctcaaatttctaaatctccaaaataaaactttttaaaat

SEQ ID NO: 5561 - DNA, 1053 bp, Homo sapiens
ccacgcctggttctgtacatgtggaaaactcacagatgggcaaggcctttggcttggcgagatttgggggtgctaatccaggacagcattacacgccacaactccagtgttcccttctggctgtcagtcgtgttgcttacggtttctttgttactttaggtagtagaatctcagcactttgtttcatattctcagatgggctgatagatatccttggcacatccgtaccatcggtcagcagggccactgagtagtcattttgcccattagcccactgcctggaaagcccttcggagagctccccatggctcctcaccaccgagacagttggttttgcatgtctgcatgaaggtctacctgaaaattcaacatttgctttttgcttgtgtacaaacccagattgaagctaaaataaaccagactcactaaatcctttccaataattgactggtggaaggaaaacaaaaaacaaaaactaaaaacctcttagcttttctgcaattcaactttttatttttatttttatttctatcaaagacggtagagagaaacagcttgatgctgtttctacatcaaaaaaaaaaaaaaaaaagacagactgttggtcttactaaggatgtttttaccagcctgcctgacttctgcaaacctaccctgtcaaggagatcaaagggacgcaggtttctgtttattctgaacaagggccaggccccgcggagtgtctttggtggatcccagataactcctaggtgctgctctcagacactgaggagttgagcaaatctgttctattctgcagaacccataggacaaataagagttctactagaattaacagcccaaaagaatagctacagctaagtgaagccacttacgtgggctttaaaaaaataatgtgttagctgattcacatgcactggagttaattagtcttagaaatgtgtgcatccatacaaatgcacaacataaagtgaacatattcctaggccctttctgcctgtgtcagggccaggaagtagaggctgggaactcttctggtccccagtatggcag

SEQ ID NO: 5562 - DNA, 2529 bp, Homo sapiens
aatagggtgttttctgaacattttgagggaagctgtcaacttttttcctctgaattaacattgctaacctaggcgtttgaatctctaataactttatatgtaagaataatagttggaatttgcactaatatttaaaaacatgttgaatcatgcttctttcacacttattttaagagagatgtaaattttgttcctgtcctctttctgtcattacaggtctggctcttgtaaccgtgatcaaactgttcatgttgtctgctacatttttgtctccatccatttttcctaccacctcctgaaggctatctgatagtcagtcacattagcagccccaggcagcagacaacaggaaagttaggaaatttgtgtttcgtgtcatttttaggagcatctgataaaacctccagcaggttttaggaagtattcatgtatttttctggttactttctgtcgtctctaattgaactcacctgatgaaggttcagtgttctggggccagaatttatgattttagatcaccttctttggaaccttagatcactgtgttttgaaatcatgagtttgcttttaacttcatagggtcaactttaaaatgatatgcactgttaattttaaagcatttgctgcagataattaaacttagaagtgcctttgactttaggatacaaatattacagaagaaaatataatttcactttttaaaattggggtgggaaaatcccattgcatatttgaaataggcttttcatactaagcttcatagccaggagtccccagagtcttgttcctctgaaagccactggggagtggcctctggggtgctgattccacagaggtgtatgctgtagacaggagagtgccatctatgccaaaactcgccctcaaaaacaaacaaggcttgctgggaggcgtgctgggcttggccatcagtatttccagtgtggtaaactattgctggcacttccccctggaaataactaatgaggttacgagttgggcacctgcacagatgtccttctctcatagttcctaatgcttaggaatagaggagaaataaaaaaatggattctctcaaaacactgccatttgaatagcgacagaagtgctcccccagcccccaactttggacagcaaagttgaggagaatgagcagacacagttgtttgcttgatctgaatctctctaaagtaaagtatttccaaactgtgtgacaagagcctacctaccactgtagcggtcaaagctgaagcttcttacagcagtgaaacggggcaccacctcccccacactcctcattccccgcttaaaacatggatactttcaaatttgactgtttcttaaactgccatcctaagatatggaaaatttttatagtaaagtgtctagttagcttatttccttttctaaaacaagtgttttcaagataactgtattttacctttatatgtactgaatagctgtttctttttgaattatttgccttttaaaatttgataatgtctctggatataacaggacaggagttcttaaaaaatatcttaagaaattcactttatgggtaaacccaaggtttttgccaacttgttgcctagaaaataagggctagtttcagtttatacaaatagaattattaaacattttacagtccttgattagaaaccagacccaatctccttataacaccacagcgtatcctgccattgacagtgtaatcacaattctccctttttcatttagctgcttttttattattactaaatgttttggattgagcatttttccctctgtaattttcttccttcacgtttattttaactcttgtagtattttattgttgttaatttacaagtttaaaaatattaggtactattaataatggttaaaaatagaaaaatgcatatttttgtatgataatcaaatgtaaaatacttttatttttgctggacagttgttatatcatgattattgtgctacagtttattgtgcataatatgaaaaacaactatgacagccttcagtcgggccagggtgaagctgcttataccacctctgccgtcagagggacatgtggtgacagcagtggtgtggctgcacagggcgcactagagagagctcagcacccctgctgcccgccagcagagcccgtgctgagggaatgccgcacagatgctgatgcactgggtgaaatttctagtattgaacgtaaaggtgtacagtgtcttgctgttattttatgatggaaactgattttgaaaccaaaaatagctaactaactttatttaaggaaaggatattaatttgtactaacagagggtgaaagctgttcacatttgtcaacaaaatctgcttgctgcagtagtaacctcaagtggttaaaacttgatttcccgagaaaactaaaacctttgtgcctaaaattgatgacttgagttcaagtgggatgagcaagaagatgtgttatcttgttgttcaacagtattgaatgtgaaggaaattttgatggcttaataaaattccacagcgactgtt

SEQ ID NO: 5563 - DNA, 473 bp, Homo sapiens
tctgttttgtttctttaatttttttttttaacagtcagaaccactaatgggtgtcatcttggccatctaaacatcatcaatttctaaaaacattttccttaaaaaattttggaaattcagacttgatttacaatttaatgcactaaaagtagtattttgttagcatatgttagtaggcttagttttttcagttgcagtagtatcaaatgaaagtgatgatactgtaacgaagataaattggctaatcagtatacaagattatacaatctctttattactgagggccaccaaatagcctaggaagtgccctcgagcactgaagtcaccattaggtcacttaagaagtaagcaactagctgggcacagtggctcatgcctgtaatcctagcactttgggaggccaaggcagaaagatagcttgagtccaggagtttgagaccagcctgggcaacatagtgataccccatctctta

SEQ ID NO: 5564 - DNA, 167 bp, Homo sapiens
gcggcgcggcgcggcgcgggcggcgaggttctaccttcgaggatttcttttccattgtgtcggtgtcttttttacatgccctggtccaccggaaggccggcgcctcctctgtcagtgccgtgtacgtgtttggtcaaacgttcctaatggtgcctgaacctacactg

SEQ ID NO: 5565 - DNA, 385 bp, Homo sapiens
aaaggggaaaaaaagtgcctgaagcaaatcttggttgccttctaacggcaggtgggcataaggctgtccttcaggaccagccagtttacaagcatgtctcaagctagtgtgttccattatgctcacagcagtaaatgcctacctctgtgtttgacatctgaaagaatacattgaagcagcttgttgcatttgtttttctggcttagtaatctaatagatttccttaagggcaggagatagactctggcccttgtttctagcctccttccttgcagtgtttacaacatagccagtgtttacagcatagcagatgctgctgctgattaagagaatagatgcaaacaaggcatgcatttggccaaaataaacaaatgctggtctgtcc

SEQ ID NO: 5566 - DNA, 310 bp, Homo sapiens
tcaggccgtccagagctggcatttgcacaaacacggcaacactgggtggcatccaagtcttggaaaaccgtgtgaagcaactactataaacttgagtcatcccgacgttgatctcttacaactgtgtatgttaactttttagcacatgttttgtacttggtacacgagaaaacccagctttcatcttttgtctgtatgaggtcaatattgatgtcactgaattaattacagtgtcctatagaaaatgccattaataaattatatgaactactatacattatgtatattaattaaaacatcttaatccaga

SEQ ID NO: 5567 - DNA, 1665 bp, Homo sapiens
gagatttcatctactaaagagcatttggtttttcaaaacatccctgaactgtataatttacaaaaaaaaaaagtctcgtctgagaactgtgaactgtggaagaaatcaaaactattttttcttttaaaaagccacgtaatgaaaccactaatgaaatcccagcaatctgcttcacattgaagtggaaaaatatccaaaaggagcagcttcaatttcattgaggtgaaagtgcactatgaagattgttcacctttgctgcatttgggagttatatggttatttggtaacattaagaactactggattttaatgcaatcctgcataaaaatataatttatactatgtgaaaaaataagacaggacttaccactaggaaccaccaagaccaatcatcattaacttttttaagattgtgttttattaaaaaaaaaaaacacttaaatgtgtgcagctattttcttatgttgaaaagactgaaagtttaaaacatgaaaaaaatcaatattaaacattttttgttcacactgagatactgtgtatgtaaaatgccttaattattaataagccaatgtgttatgataccaatatctgttttaaaaaactaaaaccaaccatgcttctggcatgataaaatcatggaattaaatcaggggtttacattcttgtagagtgttcttgaaacactctctgcaccatttttaaaacttgagaatagttttagtatctctgatattttttgccagaatcatcatgtcatgtatgaatgtgttatccctatctaaggaaaaaggtgaatatgtttttgtatgaatgtttaactggaaatgtccatggacttggctaatttatatttactttttattgtacatagatttctaatatttttcattcctgtatcatttaaacttccttcatttgagtaaattcactaaatatttctattttttgcttttttaaattctgattttatatgaattctaattctttttcactacatatgttttaaagagttacatacagtgatttagaatggtttacagttaatgctgatcttgtattttaaattccaacactttgtgtcactacctcctctaatggttagtatgatatgctagcagactgtatgaggtctttttttaaaataccacttttagtgtcagtgaaccaaattctggaatgtcttaacagctctaaatcttacttgtcttgaaaatgattggggtttaataccactgctggtggttcacacatcatcccatccttaatatgcctgacaggcatctgagcaaaggtttttagtaattgaatttctctgcagtagtccttcaagcacttgaatgtaaacctttagcatttattcgtttaatgactactgatacgaatctcaagcagatttcttgctcttaaaagttatgtttcactgagttctggttttgtgtagctatattttatatagctagatattcctcacagtgaacatgaattgtaataattggttatttccttaagtctttagattataataatttcagattattgcacgtctgtgatttgagaggtgagttatttaagaggccagttttcaggacatgggaatttgaattgtaaacctgttatctctgtgaaacttttaacatgataaaatataacctttctttgtgctta

SEQ ID NO: 5568 - DNA, 3884 bp, Homo sapiens
cctactctgaatgaccgtgcttgacctgttttcttaaaaggcctacgtcctccatggaagtgccagctcattactaccactcccactcaactagaagcctgtgttctgtacacatcatactgaactcttgatgagctgagcctcaagtacctgtgtaaaagagctcccatctgatctgcagtcattacagaaaaagcaaatattccctcaacatcagaacaatgctcaagtctttcaagccacgtctgagcagtcaaaggcaaattagaattaacaagctgagccaataaatgaattggtaaaagggatgctagaaattcaactgaagaaaaaaagcaagtcaagtacgtattcagcattaaagatgaatctcagaagtcatggttcaatgttgacactgtgaggataacaactagagacagcttcatcttactaaagaatttatggtcaagtatatttggacctattatcctcggcaagccaagatgcaaacattttttagctatatttctttagtatacccactgctgtaattttatattaggatactaacttgaaacatggctgcagcctctacttcttcaaaaacatccccccaaaataccagatttaaatatccaaatactgtgtcagtgtatacttcaactgttttgtttctcttaactcaaaacccattctgtcattgtaacacaggcagtgttaccatggaaattgtttttggtaaggtaaaaattatttctttcaggttcctttcaaatggccgaactaagagaactccaaaaggaagctattaacatttactgaaatagtctgtggttctctatacaacatggacaaaacatacaagctgttgtctaagaaatgcaggtcatggtgcacattaatcaacaggttcttctccccccgcccccacccccgcgcctttttttatgccctcttattaagcacaggtcaaaaaatcttaaggaacaaatactaggaaaactggctaaacatccttccctgaaagcactggaccatcttttaaagggcacatctagcaatggaattggaagttctagagccacactctttctttagtgccaacgttactgagcggctactctccttacctactttactaaaatggcatacagattggcattgacctgttgaagaaattttaccactaagaaatcttttgcctcatctacaaagccatagttaagacttgaggcattcaacttaatgccaagtataagcatttccccctttttctttcaattttattcttcattctgactacagaaacttggccctgaactacgagattagccaagccaacagtcttctaatttgttttcagaaacttcaggccgggtgccgtggctcacacctgtaatcccagcactttgggaggccaaggcaggtgaatcacttgaggtcaggagttcgagaccatcctggccaacatggtgaaaacctgtctatactaaaaatacaaaaattagctgggcatggtggtgcatgcctgtgatcccagcaacacggaaggctaaggcaggaggatcatttgaacccaggaggcggaggttgcagtgagccaggattgcacctctgcactccagcctgggtaacagagtgatatgtttcaaaaagaaagttcagtgtgccaaggaaatacttgtgtaagctcagctttttatttactaatatactgatcaaacatctggcttacaagcatagggaaactacttatgtggctggctgagcagtaatttcaagtatgtgaaatcttcatttcttttacagaatagttatttagagaaacttttcttgcctgtattcatggctgtttttgaatttcaatttattagtcataaatagtgccactcttctttgattactaaataggacatggagcaagctgacctaggtgtcacaaattattcatttgacctgtaaggacagagaaaacccttcaatatagcttaagaaattgagtaattttgggccgggtgcagtgactcacgcctgtaatcccagcactttgggaggccgaggcaggcggatcacgaggtcaggagatttgagaccatcctggctaacacggtgaaaccctgtctctacaaaaatacaaaaaaattagtcgggcatggtggcgggcgcctgtagtcccagctacttgggaggctgaggcgggagaatggcgtgaacccgggaggtggaacttgcagtgaaccgagattgcaccactgcactccagcctgggcgacagagggagactccatctcaaaaaaaaaaaaaaagaaagaaagaaagaaattgagtaattttgatttgttccctttgcttgcttcaacctccaggcccactgaggatggcaaagcggataggatcttaagtctttttttctgttacttcctacagatggtagaagcattatttacaactcccactgcaacactccattgcttagttgagtttaacagtagtgagtcatgtcctgcaggatccagtatcttttttttttttttccgagacgtagtttcgctcttgttgcccaggctggagtgaaatggcacaatcttggctcaccgcaacctctgcctcctgggttcaagcgattctcctgcctcagcctcccgagtagctggaattacaagcatgtgccaccacacccagctaattttgtattttcagtagagacggggtttctctactgaaactgatgttggtcaggctggtctcgaactcccaacctcaggtgatccgcccgccttggcctcccaaagtgctgggattacaggcgtgagccactgtgcccaaccaggatccagtatcttaaaggcccatactgtaaaggtcagcctgcctaggaattctgccacatttacacacacccctggccaaagtaatattttttttttccatgtagaacaaattatgggcagaaagtaaagttagttttagaagtgctgtttgtggttggagaattgtaaaaatcttttaaagggataagggaattagtggcttttaatataaccactgcttcagcccgaaacacaaaatcactgttacatggaaaactggttattaggccagatttatattcatgtctgtctagagtatttcatgtgtgtatgtgttgcttacgttgtctgtctccaaagtctctcatctcttttaatcactgcaaataaagcaatactgaaaacttgagagaatgcaccttaggggaaggggctatttcaagacagaaaacaaaggaaatacctgccttttgaataagatcccgcttttgagtcttacctatgactttaccagggtagattagaaatacacatcctcctgctgaccctctgccttcaatagctatctatcttaaaagctgaagtttgaactgcagcatctgcttgacaggtgccaggttccttcggcagggggacgatcactctatatatcttccgttgcctcagattcctgtggcccaaggatcccaccaatcctcgttccccctaaacatgctaacaaaaatcccttatcgtgggtattaaaataataacagttacactgtatgcatatttatgtgctccttttgtctggtttttcttttcatcatgtataagctgaattcagcattagtttctcacatcttcccccaggtatccccaacagaatttttatgtcccagcttgtattaaatagaagtgaaatattaaggaaaataaggaacttgtgcaactttttttatgcattgttctcaaccatttaatttattgaaaggagatgctgcaacagttcttgatttagcagcagttattctcttgtttacatagttatgtttttttgttgttgttttgctctgtactggaaacaaaaataaagttttctacattattttc

SEQ ID NO: 5569 - DNA, 252 bp, Homo sapiens
gggtcccttaaactgatgtcttttctgccacctgttacccctcggagactccgtaaccaaactcttcggactgtgagccctgatgcctttttgccagccatactctttggcatccagtctctcgtggcgattgattatgcttgtgtgaggcaatcatggtggcatcacccataaagggaacacatttgacttttttttctcatattttaaattactacaagattattaaagataaaatgatttgaaaaactc

SEQ ID NO: 5570 - DNA, 238 bp, Homo sapiens
gtgcctcagcctctcaccccctcctcctcagggcagcgctaggggcctcccctatgcctcagccccatctctgctcctgtttgaattttgttattgttgtttggttgttgtttttttaagttgattttaattttttgtttggttgatttttttgtaaaaaactattttatatataaatataaatctatatctatatctattaaaaaaaatgaagtccagtcatattgatgttaccatt

SEQ ID NO: 5571 - DNA, 2340 bp, Homo sapiens
acaccaccatcatcaaagagctgctcaagaaatttttaaaaacgaaacaaagttatggggttaatctcctacacaattcatttacttcatttgaatgttagagctactcatgattatttgtgtttctaatttatagtttaagtttatttgtaaaaagttaaaagagagtgggtctctgtggctctcactgatgttcactctggcatccttcagcatttttcttttttcatttcataattgtaggtcattagcatgcatatcgagtttgcccttacgtggtgggagttcaaacacacaaagacccactctttgcacaaaactgttctcgctggtttggaataggctcccgtgcttttctaatgttattgcagcatggatgtccattacagaattcagataaaatttgctaatgttctgctatgatgtttgatctcatcttaatcacagtgagctcttctatagctcaatatgcggtttgccctcaagtgtgcactgtttattactttgtaatatgccactgtgagtactgacatttagagctgtttaaaggccgagaactggaaacagcctttcctccattttctgtgtattggtgatgggagtgataaccttttgggggagctttctaaatctcacagaagaggaaagtggcctgctctggcaggtatgtgcaggatacagtgtgtttcatctgttccggtgccaagaatgagcagtgtactgtggcagttccctttggatttgtatgtgctctgggctcatgaagatattgcatcgtgagctgcagcagttgcactctttttcagtgacctaaaaagggcttatttccgaggaatgaaaggctgccatcattggctgtgggtgtgaaaaacctttcctagcttagagcatttgtatctacaatacattttaaagtcagagttcgtgttccctgttttaatcacatgactacctgtcccagtacacgaaagggcgctggttggcattcttcttaatgtatttagtgaagatcataagaaatcctttaagagtttaaatgtctctgaaacaggcatacaggctctagtcaagaatgaattagagtgaaggaaagctgtgtgacacctggcattcctctctgttcatggagcttctttgaggcttgaagtttgattttactatctagacctctctggctaatacctattcttcaaccacctcggttactctgacataggaatttacttcttttccttgagtggaaaacactttagaaagtaataacaaacattattataaactaatatatgtgagagtacttagttgaaacaaaaaggaattttagtagacagtattatattatctttgaaaatcaaggagaagtttatgcaacttaaaatgtttacacactgtggtgcaatctactgtttgtgaatgtctgtattatcaggaaacatgtctatacgatcgcagagttgtatttcctcacaaacttctttacgaagagtgaaatacgtttttgtacctctcattttcagtcagggacatactttgtgcaatatttctgtgattgtgcctatgcatgatgaatgaatgcatttcaatcatacattgcctaaatcataacttgatgatgcttgggaaagaatcaacagttaaaacttcatgaagttctaatgtctgtgttccaaaacacatcacattattaggttgtagggagatatgtaggtgtgctccctggggtggggagttttctagttactagaccatctccatttttagcacttggcagcctcatgatccttttataaatgtgagattaacaggagagcagcaatacgattttgccaatggaataacagatttgccggcattcactgaaagagggcagatattgggtccttgtaacttcaactgactcttccaaattgtatgaatttatcaatgtattacacaaatccagtttcagaatgataaaaaatgttagaccaaataatgcggctaattaacagtcgtatgatttctagcccatgggtttaaaactgtatcttaaagagtcattttaaaataatataaatattaaaaaatgtaactgctatcttaatgttctgaaataaaacattttaaaatataaatcctgtagtttaaaaggaagaaatggtgggaaggaaaagtagagaaagaaatgccaattccaggccaaagcgttatttgccaagttttcttagaatgaattttaccaatgtatgagttcttgttaacagaatgtgtaacggaaatactgaaagacttttgcttaaagtggcattattgactgctgatgtgatgctactgtaatgcaataaatttttaaattgttgc

SEQ ID NO: 5572 - DNA, 2531 bp, Homo sapiens
acaccaccatcatcaaagagctgctcaagaaatttttaaaaacgaaacaaagttatggggttaatctcctacacaattcatttacttcatttgaatgttagagctactcatgattatttgtgtttctaatttatagtttaagtttatttgtaaaaagttaaaagagagtgggtctctgtgcctctcactgatgttcactctggcatcctttagcatttttcttttttcatttcataattgtaggtcattagcatgcatatcgagtttgcccttacgtggtgggagttcaaacacacaaagacccactctttgcacaaaactgttctcgctggtttggaataggctcccgtgcttttttaatgttattgcagcatggatgttcattacagaattcagataaaatttgctaatgttctgctatgatgtttgatctcatcttaatcacagtgagctcttccatagctcaatatgcggtttgccctcaagtgtgcactgtttattactttgtaatatgccactatgagtactgacacttagagctgtttaaaggccgagaactggaaacagcctttcctccattttctgtgtattggtgatgggagtgataaccttttgggggagctttctaaatctcgcagaagaggaaagtggcctgctctggcaggtatgtgcaggatacagtgtgtttcatctgttccggtgccaagaatgagcactgtactgtggcagttccctttggatttgtatgtgctctgggctcatgaagatattgcatcgtgagctgcagcagttgcactctttttcagtgacctaaaaatggcttatttccgaggaatgaaaggctgccatcgttggctgtggatgtggaaaacctttcctagcttagagcatttgtatctacaatacattttaaagtcagagttcgtgttccctgttttaatcacatgactacctgtcccagtacacgaaagggcgctggttggcattcttcttaatgtatttagtaaagatcataagacatcctttaagagtttaaatgtctctgaaacaggcatacaggctctagtcaagaatgaattagagtgaaggaaagctgtgtgacacctggcattcctctctgttcatggagcttctttgaggcttgaagtttgattttactatctagacctctctggctaatacctattcttcaaccacctcggttactctgacataggaatttacttcttttccttgagtggaaaacactttagaaaataataacaaacattattataaactaatatatgtgagagtacttagttgaaacaaaaaggaattttagtagacagtattatattatctttgaaaatcaaggagaagtttatgcaactgaaaatgtttacacactgtgctgcaatctactgtttgtgaatgtcaatgtattatcaggaaacatgtctatacgatcgcagagttgtatttcctcacaaacttctttacgaagagtgaaatatgtttttgtacctctcagtttcagtcagggacatattttgtgcaatatttctgtgattgtgcctatgcgtgatgagtgaatgcatttcaatcatacattgcctaaatcataacttgatgatgcttgggaaagaatcaacagttaaaacttcatgaagttctaatgtctgtgttccaaaacacatcacattattaggttgtagggagatatgtatgtgtgctccctggggtggggagttttctagttactagaccatctccatttttagcacttggcagcctcatgatccttttataaataggagattaacaggagagcagcaatacgattttgccaatggaataacagatttgccggcattcactgaaagagggcagatattgggtccttgtgacttcaactgactcttccgaattgtatgaatttatcaatgtattagataaacccagtttcagaataataaagaaaaaatattagaccaaataatgtggctaatagtggtatgatttctagcccgtgggtttaaaactgtatcctaaagagtcattttaaaataatataaatatttaaaagtgtaactgctatctttatgttctgaaataagttaaaacattttaaaatatgaatactgtagtttaaaagaaagaaatggtgggaaggaaaagtagagaaagaaatgccaattccagtccaaagctttgtttgccaagttttcttagaatgaattttaccaatgtatgggttcttgttaacagaatgtgtaacagaaatactgaaagacttttgcctaaagtggcattattgactgctggtgtgatgctactgtaatgtgataaattattaaattgttgcaaagtgctgtttttgccttaaaattttattttgcgcatcttgaaaattatagtattaaaggtattgatactgtgcaaatactgggcatgcttggcatgagataatctgtttcattttcacaaaattgtagtataactatgcaagtgtttattaaaagaacacaaaataaaaaaggtatgggatt

SEQ ID NO: 5573 - DNA, 2316 bp, Homo sapiens
gatgccttctctctccatctaccttccagtcaggatgacggtattatgcttcttggagtcttccaaaccaccttccctcatctttcatcaatcattgtacagtttgtttacacacgtgcaatttgtttgtgcttctaatatttattgctttataaataaaccagaccaggacttgcaacctataaaagcctctcgtttgtttttggggtaggcgtggggtggggcaggtgtttgctttgacaccctgagcattgtcaaagttcagtaccacaaggttcatccagatgaattaatatgacagttagctgggagttataatgctaacttttgatttcatattttgagacagaatcatgaatatatttcatacctgaaaagcagattaaggtttagttccatataagtaagaaatgaaattgaataagatagttctctagaattagttgctgcagatgacactgaagattattttaacatatgttccagttgtttttgtaaccttgcagaaaatacacatatattgataatgagaaagtcaaagattattttaaatgaattggcttaacttttcaattctttgaactcttcaattttcttcctgggggctatgaaagaaacatgaaggttagctgacagttgggccagccacatcccattgcaaataccctctaaacatatcaagaccattgtgtgtgtgcaaaacaaatgtgaggaagcaggagccaaacacttctgcctgatcagtgactaacttgcgagacagaagccttcaatctcttcgtttctttgaaatcttgagatcttgggttgagtgaactgaaggctgcgaggtcctgagggagcaaggggaggcgagagccacagtgtttgctttgctctgtgcagagctctctgcaaagtatggtgggaaggctgctaggggcagcgttgaaaagaattgaatgtgttccatcctcgaggagttcacacacctacacataatcccccagtgcgtgtggcctggaggctttaaggagatgtatgtgggtctgggtcttagagaatggtcaggaattagggaggtgagaagagcagagaggacatctcagcagaaggaagtgtggcagaagccaggatacaagacatggggcaggctggtaggtgctgatgaattttagaaaatccactgggaaaggtagatttcaactagattgcagaagccttacagatttttgttttcaaattaattgccagtgaactgttagcattcacagaagtgtttgaatagacttaattgaattttattgatgaggattcaagacacagagattaagcaactggtgcaatgttataaactttatttgtggaatgtgctagacaggaactcagattttctgacacctactctgatggtgtctctaaaataatctttctaactttatagtttatcaagggtaaccccattctatcacatgccttttgagaatttgggttcaatatttggagtactctggactcatcagacatctttaataaattgtaatacattgccactgtcattcaaggtcctatgtgtgtctttttgcctattcataccaaaaatatcttttgatccctgactctgggtcgggcatagtattaagggcaggggacacaaagatgtatgagagcacattttctgtgaataaaaagctcagagtttagagttctgtatgtagcatattcaaatggaaggccttctatgcaataaaggctaaataatacatcaacttggtggcattttatttagataaggtgcaaacattattgtacatatgccccccgcccccaccaccccattgtatcctatagcacagttgaactggtttaaaagccatgcatggggaggtatgatttcactagtttttgtgtctctttcttttcctctgtacaattgagtgcataaatattatgaattgtatcctctgaacacagtattaatgctttaactgtagatgattggctggggtatcacctctggttctttccatctgtgattagaaatggagaggacatttttatttctatgtaaaagtagaagctttaagaatcagcttctgatatttatatcagaagaggtaagcacccagattcttgttgaattctgaggtcttctcatctttgcttgattatagggtataaagtattagaacaattgaatcttaaaaattgtgcttaaggaaggtactaagacaaaaatgtttgcttaaggtaatcttcatatgtatacaataactgagacatggatagtgcctacgtctttggttaaagtgcaataaacaaagaactatataaatt

SEQ ID NO: 5574 - DNA, 440 bp, Homo sapiens
ccaaactgtagtccttctaaaggaggacatggcagtcaaaaagtctgagtaaagctgttttttgtattttatatttgcttctgccattttactgtcactaattaatgtttagttcttatatttgttaactgatttcggtgtcttgaatatatttttttaaattatgtgtatgaacaattctagtttcatttgttcaatcagaagagcaaataaccattcctttcatgttttgatcactgagtgtgtctgtaatcatacctacattaaaatcattttctatgaatatataatatatacttcacatttttagtgaacttctctaaagaagaggacagaatatactggacttaaccacgaatacccttgagtgtccaaattgggaaggaacttgtttcttctgttatactatcaaatgcttaaattctgtttccttttttctt

SEQ ID NO: 5575 - DNA, 3015 bp, Homo sapiens
attgtcgcaaccactaacaattgtggtctctggtgatcttatttttaaagcctgtattatttaaaatgcatttttattgaaaggcctgcattaaactgaatggtttcacaggcatttgcttgtcctgcatagtaaggaggtagaatacatagaaaattaatacaatgttttagaaacagccaagttaattttagaggcaagaacatgatttgatgctataaagtaggcattttaatattgtaaacatatactttggctgtattgaaaaatataaatccatgatggctgtacaaataatttagcctcattcattttttaaaggaattattccttaagacatgccatctctttttagatatactcaaaagactgagaggcaaaacttggcttttagctgcagcacatagccctgttatatttgatttattttacatttcatatgaaagcataattttgtccacatgtgactcaaattgcattggtaattttttttttttttttgtaagttaaaaaaactacagagacactaaaggtgaaaatggatgagacaattatagtattattttcattggtctttttttttgagatggagtctcactctttcgccaggctagagtgcagtggcgccatctaggctcactgcaacctccgcatcccagattccagcgattctcctgcctcagcctcctgagtagctgggattacaggtgcctgccatcacgcctggctaatttttgtatttttagtagagacgggggttcaccaagttggccaggatggtctcgatctcttgaccttgtgactcacccgcatcggcctcccaaagtgctgggattacaggcatgagccaccgcacccgacggtcttttcaaagctatttatttttaggactatgtggtaatttcaccttcaggtgataaggattttttttttctcccagctagtgctatctttctcaaaataatttaaaagtaggcgagaggctaggatgtacctatatttaccatgtttacttaccaggaatattttctaagtgccatagtctttttcataatacgtatgagttttaccttttcagaggaataatttcaagtcatttatttgctcattaatgatagcagtagtcatagacttaagactattctagagatcttcatctccataagacttttacatttattttagtaaacttttctttctatgcctctttaatggagtggttctgttatttaagcctgttctaagtttgatcaaatggcaatgactaggtctagttttagtttttatttttgcaggagtctattgctaaagaattttattttgatgcttgttaaatttttattttaattaataaggtagtcattcctgtagagggataagatgcttgtagagttgtgggtatcattccaaatagaactgttatgatttgggaaatattctttactacaaaggacttatttcataattacaaattttccttcatatttgcctttgtttataaaatcttcaggaatgacattctctagcaataaaaggaatgaaccgttatgtttctaagctgaaaagaggaacaggtgggtaattatcctgccatacttaaatatagtggaaaatcctctattgagaatgtggataaatgaacaattgtaagttttgcatcataaactgagaactttcttttgacaggggggaggcgggagggatagtaggtgggggtgatctgcttgcttcttttaccacaggtgatttttaagtaacttgggtttaatttacagagatgaaacatgacagtctgagtaaaatacccagtgatgtagaagtgtgcctgtttattatgtagatacagacatccagcaaaaacaggagaatcacatgctttaaagaacactttctcttaggtttccttgagatatgttcctccagtgcaagcaagataatggtttacagaatttgctttacacaaaacttgtcaagaactcatctgttaaaagcaaggaataactagtttatattttccaataatgttcaaggttttctccttaatatgtttgaaattattgattttggcatttttctaagcaatttatgtaattttatttgaagaaaatgttttgtataatgtttttcccagcctaaacagggagagtcctaacagtgttgtgcttgtatgattctgagactttatttgcgtaagtgatactactatactttatttttgacccatgcctttttaagctgtttcatattgaaaggtggaatattgtaaaaattttgtcaaagatgtactgtagtgctatttgaagtacctgtaacaaaacagttggccctctgtatccatgtactctgcatctgtggattaaaccaattgcagatcaaaaatattagaaaaaataaaaataatacaaataaaaatacagtataacagttatttaaatagcatttacattgcattaggtattagtctagggataaagtatacaggcggatgtgcgttggttatatacaaatatgtcattttatgtaagggacttgagtatacttggatttttggtatctgtgggttggggggacggtccaggaaccaataccccatggataccaagggacaactgtacttatttacctttattgtcattgcaagcttcttatggaaactttataggaatgaaaatatacatgttaagaagattaaacattagatagtagatggtttgttgcatgctagaactgttagtattgttgaatcaattactttggtttcatgaaaaaataaacgataaatatctttaaagagaactagaagaattttttgtttgagtgattccaggctgtagtatgatcatttactgaagtagtttgattggctggctaacttagaattattgtttcttgttttgtactgcaataggggttataattgtaagataaaaatgtgtgtgtgtttaagggaagtaggtggtggttaaaattcttggaaaattttcagaatactttaaaaataaagttccaagttac

SEQ ID NO: 5576 - DNA, 1268 bp, Homo sapiens
aaagtgttttggaacattgttcattaaaccaccatttctatacaaaaaaattgcatagtattttctcagttactatgactagtttatttttttctcatgactcttatttttttagagaaacatactttcactagaagaggttagtggaaccatttattaattgggaaaatgtcgacggcatgttcattaatagtgccaactttcttggaattcactctttctctttcgttaacacatcttccctatgaccttttttttcttttatttcatctataaaccccatttctgtagcatttctttttttatcacactagtttcttttcctccttctctctttcttgctccaatccctaccaataatgtcatgatgcagaggcatttgaaaatgaagatgaaaagatggtcactttatttagccagtcaagcttattctactgggtgtcgccaaagcgatttatcatttttattttaaatatattcatggttgaagtgtttcaacgttattggacaattaggaagaatgtccttaactcttacaagttattttataactgatttttaaaatgctgtttttcagtattaactatgttgaccttagaaaacttttacaaaaaatagactttatgttttagaacagttttaggttcacagcaaaaatggagcagaaaatgcagagatttcccatataccctctacctccacacattcacagcctcccctaccgtcaatgtcttataatagagtggtacatttgttacaactgatgaacctacattgacacattattatcacccaaagtccatagtttacgtgagggttcactcttggtgttgtacataatatgggttttgacaaatgtgtaatgacatttgtcaaccgttatagtattatacagaataatttcactgccttaaaaaatcctctgtgttttacttattcatccctccctctcctttaacccttagcaactgatcttttcactgtgtacatagttttgcttttaccagaatgtaatgtagttgaaatcatacagtatatagcttttcatgcagtatatagcttttcagattggcttctttcatgtattaatatgcatttaggtttctctgtatcttgtcatgtatatgtagctcattttttttttagtgtagaataaaattttattgtctggttctaccacatttcatttgtccatgcacctattgaagaacatctcagttgcttccatgttttggcgattatgaataaagcgactataaacatccatg

SEQ ID NO: 5577 - DNA, 1428 bp, Homo sapiens
gtttgcagagcatgccaggggactacgtttctcagggtggtcctatgggaatgagtatggcacagccaagttacactcctccccagatgaccccacaccctactcaattaagacatggacccccaatgcattcatatttgccaagccatccccaccacccagccatgatgatgcacggaggaccccctacccaccctggaatgactatgtcagcacagagccccacaatgttaaattctgtagatcccaatgttggcggacaggttatggacattcatgcccaatagtataagggaactcaagggaaaaggaaacacacgcaaaaactattttaagactttctgaactttgaccagatgttgacacttaatatgaaattccagacagctgtgattattttttacttttgtcatttttcatcaagcaacagaggaccaatgcaacaagaacacaaatgtgaaatcatgggctgactgagacaattctgtccatgtaaagatcctctggaaaaagactccgagagttataactactgtagtataaatataggaactaagttaaacttgtacatttctgttgatcacgccgttatgttgcctcaaatagttttagaagagaaaaaaaaatatatccttgttttccacactatgtgtgttgttcccaaaagaatgactgttttggttcatcagtgaattcaccatccaggagagactgtggtatatattttaaacctgttgggccaatgagaaaagaaccacactggagatcatgatgaacttttggctgaacctcatcactcgaactccagcttcaagaatgtgttttcatgcccggcctttgttcctccataaatgtgtcctttagtttcaaacagatctttatagttcgtgcttcataagccaattcttattattatttttgggggactcttcttcaaagagcttgccaatgaagatttaaagacagagcaggagcttcttccaggagttctgagccttggttgtggacaaaacaatcttaagttgggcagctttcctcaacacaaaaaaaagttattaatggtcattgaaccataactaggactttatcagaaactcaaagcttgggggataaaaaggagcaagagaatactgtaacaaacttcgtacagagttcggtctattaattgtttcatgttagatattctatgtgtttacctcaattgaaaaaaaaaagaatgtttttgctagtatcagatctgctgtggaattggtattgtatgtccatgaattcttcttttctcagcacgtgttcctcactagaagaaaatgctgttacctttaagctttgtcaaatttacattaaaatacttgtatgaggactgtgacgttatgttaaaaaaaaaaaggtgttaagtcacaaaaagcggtaataaatatttcatttttg

SEQ ID NO: 5578 - DNA, 2449 bp, Homo sapiens
cccagaaactaagtagcacaatctgtagatgagtatagtgatctcatttcctaaactgtaatgcacagacctgaggaactttacactgaccagctttaaaacagtactttaaaaggaaaagcctgttactgtttatttacctaaaagattcctaatgtgcagcactgttttctctttcagttagttgactcaaagggggaaaactaaagaatgcaaaacttttgctattcataccactgatgttcatcaaaagtatgcgatctaaaacatgactatcatttcctgacaatggggcatctcggtggcctgcctggctgattcttccttaaaactaaaatctctggaaaatggatttgcttcttaccctgtgttttctgcaaactgacttactttgttccagccaaagcttgctaataatagaaaactacccatattccaaaagtagatttcctctgtatcccagcatactttgtgaacctggctccttcttcactacctcagatctaatcaattagtccatgtaccctccttcctcactacagtcataacacatgagcatatctacctagaagccaatttctactgatgtagccacaactttttagaggcctattaaacatgacgttatccaattgcaggtcaacttatagttgtagccttacaacttacaggcatcagaaaataagtaatcaaattaggtacctggaaacatagctattaccatctcatattactgtctaattaaaataaacataacgcaaacatgtttgtccttatatattctacagtggatagaattaggaattgatggcttaaaaaaaaaagtctatgaagagtctgtttaactcttcatgttccatctttctcttctgaagtaaactattttgaaagttctctttttgaaatgaatttgtgcttaactgtcttcactattaatactatttagaaataagctaattggatcagtggcttaaataatagctgactgtgtgtacatatgtatataatatgtatatacaatatcaggcatgcatgtggcttggaattttgtttcctccataaaatgtggaagtgaattaaacaagttttagtcatttatacaaagtcacaaatataaagttcagtttgtcacaagattaaattgctcacaaggtaaaattgtattgtttggcaaaatcacaagtaacaatcctgtgagttttctattatgaaggttaataataaatgggctcatttagttgcctgggcacctattcacaaattcatttgtcagcctctttttagttctcttaaaaaaaaaaaaatcatatgatcattttcctttttgggggtacttagcttccatgcctataaagtctggtaccagactgacttgaaattcataaacaagttgtccaattgccaagaatatgttaacaattaaaagttccaaactaaagccaatagcaccaagtcttcataagaatacaaagtatacatacagtattgcttacctggaggattcagatcatttaggaattctctttgatgaaagatcagttcccatttgagttcctccttgcactgagttttagtgatatagaactagcttgtagttagtgtttcattacattataaagaatagttttacacacgtatttaccgttttccaaatttaaactcagaaatacccaaagcaggcctgcttaagcccactacctggcatataaacttatagtaacactttgttactttctttttaataggacaagcatgagttaggacaaactctaaaaattcatattcttcactattcttgttttcctttgattgatatagaccaaagatggtgtactctaattttttaaaacagtaatggaacacaatttttttcattcttcctcctctccattcgaagtaaagatccccagttagtttttatataaataatctatagggattcaaaaggtgtcacagtccacttaattagtcaaattagcaatggctaaacagtatcaagtactgcagaatttatcactgaaatggataagaggaaatagtttagtcacaggtttttacagtccagcaagggccaaagaggtatagtatacaagttaatagtatttgtgttgagcaacatggggctagtgggatcacagaaatctggaaaaaaaaaaaaaaggctttggcttatcaagcctagtgtaaatttctgcatctcacacgactttagtttggccaggtatttatctgccaaaacaaggacaaatcttgttgtattaacagcagggtcacttctcattttctttgctgacttacctttttactgaccgttgtgaatttctgtctcaaaatgtataatatagaaatgcaagaaaaaaacaaatgtacagattgtaaagttttttgatacctaatgtaagttttctttgtgtaatatttatatgataaaagacattaggatccctac

SEQ ID NO: 5579 - DNA, 847 bp, Homo sapiens
tcaaggacttgctgggtgtgcttttcagaaagttggtaatgaagttaaattaaatttcttattgaattatttgaattcaatgaatgcactgcagagactattctttattgattttgacatttggagtcgctctttgtggattatatttccttgatatttttgagacttggggtgtaattgttcagtggtttttgctcattaaaatttctgggaccattgtttataaatttattgctaatcttacagtattaggattcattataaaaaccaacattttaatgtatacgtgttagggtaaaactcgttgaagtgctgtgattgtcctgtattcaattttgtatgtttcacctctactgtgattcagacagatcatggtggtcactgggaatttttgctgtggccctgcttttccttcttcccacttgtctcatgtctgtgaaactggtacaacctgccataagatgaaatgaattgtctcaacaaagcaatattagaagagcctttactatcttattggtgatgacacgtttcttaagtaggagtttgagtgaattatttgatatattactttgttaataatagttaacaatagtttcttattttctttcagagtttgggccttttagattgcatcaaataaagatgagctactttaaaagacagtctgcggtactatttgaagagagatggtttagttacaagtcagtaacttagattcatgagaaaattttgtgttgacattccataagatgagttggcattagaattggaagtccagtttatttctgaatcaaaaaatgagcgggctattgtgctgcctttaataaaatttgagtgatgtatacat

SEQ ID NO: 5580 - DNA, 402 bp, Homo sapiens
caaggattgtaaattcttggaagcaacggggagcttccatattcccaccagagtgtgggaatgctgtggccatgtgattgtatgatctccttgcaactcagtgtgagttgattcctccaatatgggccagatgcttttgaatgatagggaaatctacataaaatccagtgtcctctttattgagggagtatatgtatccatctcagtgatccatgtccttagtgaagtccacattattctctgtggggacaagagctgggcagttttgaatgggtcttgaggtgggtaccccatgtgcactttctgaggatgcctcacttccctgggctctgcagagaacacacagagagaagactttcagagctcacaggagcagggagcaggagcactctaagggaattc

SEQ ID NO: 5581 - DNA, 643 bp, Homo sapiens
agggcatacatttcctgctttcaccaattaaccactgaattgctattttttccttttggccagatagctaggtttctggttcccccacagtaggtgttttcacataagattagggtccttttggaaagaatagttgcagtgtttataggatagttgtggtaagaatctagtttattttgcatttggctaattggtctgtgctgcatggttatatactcctggattatagattaaaagtctctgtagacatctctgtgaagagcaagctatcattaaacatgtctgtttatcagcactgtctctttattcctttcccaacccattttaatagttctggcaataactactaaatctagaatgatgtgattaatgaataggctttagctctataatatcttctaggttattagaattgaaacctgacagttttataaaaagtcatgttatctcatgagctgcttcccacctggctgtataattttatcatcatggttccccagtttcgatgagttctcacagtcaaatgagagtttgtttaaccaccttaggagaaacatactacaaagtcatcaagaataaaggttccaaagtaattatgatttttggtttctttatgccctttggtttggatattttcatgtgc

SEQ ID NO: 5582 - DNA, 3901 bp, Homo sapiens
gtgagggtgggctgccctcttcacatggggcaccaggaacaccgtctggaacaggaaggacatcgggcaggactgacactgtgtcttgtgaaattgtttttttgttgttattttgtgttttaattttttttaatttctctctgagtgtacatacaacatactcaagcgggaccttctttctctgtcaggcccttgacctggaatgggggcctttgtcaaacactgttgaaggagaggctgatgtgtctgtgatggtgagaattcccaagggctctgacaagtagattcttcgactgaggaatctaccagttgtcgaagatgatccgttagtgatgttctctgggaagtggactgtggtttttccagaggaactcagttaagaaatcgagagtggattagactcccagttccaccaaacctatgagccttccactgtggatgggggccgtgatcctgatggtcacattgctttaacccagcagggcttcggccaggggctttccacttgaggatagcagcttcactaggctggccggccagctccacatctgactgggttcttacttctcagccagtacctgccccatgggctcaaggattcctggccagctcctgccacctccagcagacctcagggagggttgagtttctctaaggacccctcaaacatgtcgcaaaatgaaccaaacttctggctaggcctcaaaactgacttggtcccacttggaggccccaggattggtcctgaggtacagagccactgccaccactggcggcctgggaccagctgggtgtcagccacggatgagccgaatagccagtcagcatgttgctgctggcagcctgtgcctttgtcagctcttctttcaaaagaccccaccgacagaccgcattccacccccaacatcggcactgagggacatcgggggcaagtttgcagtggggccggaaaatatggtggccaccctaccatgagagtcagccgtaggggaccccagaccccttggtttccttggaaacaacatacctcttcccccttatccccagtcctttttcatacctagtgggatacagaagaagccaggacagtggctttgccagctaagtgacttttagagtaacagataacgattagagtggggaaccgtcaaagctgggtacacatttcctatcttcctccagcttccagctaggccagaagggcatgctctggaacccagcaggatcacagctgcctgtgcacgtcttcccttctctccctgctgcggcacttatggagaggatctaaagcagccggtgtggcagctccgatagcaggcacagggaatctgttaaccagacgctagaaactaaattataacttttgcatatgtgagaaaagacaacattggtgctaacagtgaagtaaggcccaaaggaaagacggcttccctggacaaagaagacctcagggctacccaaggaaataggaggagtctagagtagactcacaaatctgaacaagcccaagtcttccagttctgaggagaggaggtcttcagtactattgaaggagacattgatcttctggatgtacagttgtgcaggttgttcactgcacaagggcacctgcagctaatggaggctggaattcagcttgtgttctgctcactaagctgtgtgcgtgccctggtgtggggctacttctcccaagaagaaggggtgcctttcctaatttgcaaaggtgccatatgggctcacagcaccctggaggagaagggcctcaaactgtgcatgtaagcctttgttttgttctgctcagatattctggatattacctcttcttggtcagaattctattctcagggtgtgtaccatgatttgtctgctaagaagacgggttcctgctttgcagagaaggagccggggaccagcttgaagactggctctgggacacactgaccattgtgaaattcagccttccctgtgggtctccataccattttatgatgtgtatgggacatacgttgttctcccctctctggatcaaggtggtgacaggcagcctgctgccgtatgcttcagtggcacacaccaaaaaaccgggattatttacagcagccactattcaccccttttggcagactctccacctgagttcagtgagagagaaaatgatttagatcttggtgctggggcaaggccatcagcttcagagaccttgccaggcccaggctgggtgccctgtggcctgagaactgagcccagactttgacaaacccacctcaacatcaagcctggggcaggtggaaggtggtctgactgcactgtctccatcttatgcaaagccaggaactcactcactgtcttaagtgagccagggcaaaatttacacccctcacgtttccctctcccttcttccccaccaacaaaacccaggaggtagctggcagagtagctgtcaggaaggagaaaggttctttctggctggttgtttttaattggcttagtgatctaaactggccccttcctcctctgcctggtgagttggcctaaacattcctcaagtctagcctcaggagacctgcccctcccccccgacctccaccccctcagactccatcccccacccccaggagcctggctgtctctagcgaggggtggagaatcagatttagagggagggagagtctgacctggatcctgacctgtaaccagctgaagacggtggaggctttgtggcttgctgagggtgggggttgggagagggactggaaaccttcctcctcgggaaagaaatgcctgggaggaagggaagcctgatattcagggtcaaaacagcccttctaattcacaaccccaaagcaggggtttctagaagttggtcaacagatctggtgagggaagtccccaggccagacgctggactcctgcaatgagggtggaggactcagcctggcctctgcctggcctgtttcaaagtctgggccactggcagccttctcttgctcaatccgaggtggaaaaagatcacctcccagtgacctccctcagcccccaggggagtaggtctgtgtccaaagctatgtggcaggcttgtttgaaggacccagaggggcccagctgacctgtctcactgctcctggcagcccagccccatcggcaggtggcccctgcctgggggttattcgggatggttcagccagggcctcccaggaagagtgctgtggagccacggtgactgtcctggacagcaaggagcatgctaccccagtgagcacttctttttgagggacttgatggggaggtggggtaggcagaagggacgtggcagaagcgggaagactttggtcaccatggctctgcaggccttctgcaaatcagtgctggcctgggctggaaacagctctgtgtgtgaaggtgaggactcttggaagcaggccatcctggccagacaccctagcaggaaggggctcacctgtcacccttaggcagcctgagggctggtggggacttttgagtcttgaggggatagcggaaaaagctgagctcataggtgcccagccagcctcccagctaaaggtgctcagagccccactgccccctctctctgtgcaggtggccagtgcccctccctgctctgggagcattgctagccttctaccccatccctggatccacaggggctatcgaggagacccagtgagaatgtagcattttgttcatccccagggtagctgccctggggtctgggcactctgcctctgggagagaggaagaagaaaggggccccattttttaaaaaactgtacagagcctttggctttatgtgtttatgttcttcacatgcatatgtgtgtatgtgtgtatatctttccccccatcaattggtacaatttttaataaaatcatttaaagcaaa

SEQ ID NO: 5583 - DNA, 816 bp, Homo sapiens
tgcccccatcccactgggacatttagcaaggaggttcagccccttctctgggatgtggttctattcccccaggaaaaaggagccccagccttctgaggctgtgggaacctgtggctgccttggacgctgcagccccctcctcaacggccaggccagagtctgagacaggacccaggcaccctcacggcagggcctctctggggcctagaagtcttctcaagctgacttcctacctccccctccatctctagataagtgtcatatatttgttgagggcaaaagactatggactggaaggcagaaagtgggatcctggccccactctgcctttcctattgagcaaccagctctgggctcagtttcctcacctggagggttggacccactcacctccactctagccccgaaccctcctgccccaggcttccaggccccatcaggcctgccctgagttggccttgtccactccttgaggcagatcctggcactacctcacagctccctggggacggccactccctggctgagggccctcccctcccctctgcctgtccggaacgggaggctgaaatggaaaagctgccttggccctgcttggctgagtcacaaggggcagtgggctcttgggtgctgttccaccctgaccctggctcacccctcttcctaggcctgggggcaggcagttcctaccatgtacccctctcaggctgcctgcctgacaaggtcagcatcatttgctctcctgaatttatgaggtttatttatttttctctttcctactcctattaaagaacctcgtcccagtgtttcctgctt

SEQ ID NO: 5584 - DNA, 3706 bp, Homo sapiens
acacagctcctgggagctggggagtccccggggagaggaaaagggaatcactctgttaaaggccctccgcgtgatggccatgtggttgccggtggcttgcgccattgtcactgagcagtgtggcaaactctccagcatggcgaccttgtgagggcaaggagtggcctccctgcacctcacacgctcatctctgtgcacatgtgtgttttcacgcacgggcacagcccctggtgtattcctgtactagtatctggcatctgaggctggtgcaccctgacctgggcctactgctgcccaggccacaagccttctccactatgatgagagaacaaggcttggtggcacccagcacctggctctcctggctccccgtcacccccccagggcctggcctccctctccagctgcaggctttcacctcttgcctgggctggattcccccagtcccagattcccaggatgcccaaccaggggaatcccagtaaccatgcgccagcctcctgcctctcctgagtggtggctgaggcctggaggaggagaggccacacagctggcagggtctggcctgggcaaagaagagtagagctcacgtcttcttggtgaaaaggaggatctctggaaagtcctcctctctgaaatgggttgggatggggagcgacaacctcctcttcccacagcaggatgggagagcttactcccaggcccccacacccaggtcagacatcacgtgcaccctgaatgtaggcaagggcctggccctgcagcccagggtcatttcctgctctttccacttcctctttccccaccgtcctgcactagcaccagggccaggccaaggcaagaatcagacagctactccacagacagagaaacaacttccagctaagtatgacatcaggacttgtctttcctactaagcctccatccccgcccctcccctgaggcccacgtctgctgaattatccggactccgcacaagctgtggcttcctctcagttcaacaaacatttcctgagcacccactaccagtaatccagccggtaggcgacggagactgccagcaggagggagggaagaaagccagtcatccggcagatctgggctgttctgggcgggagctgttctgggccacaggtgccctacagggctgggggcaggatggcggtaggagccccaggggaccctcccacctctgcctggcagaagcaagtgcccttctttcttgttatgtgtgccttctgctcctgagccctagtgtggacctcaccgcatggtcccctctgccccctccttctggtcctgccatggctgctgctctctgctgaaggctgtggggctctagggagagtccagatcaccctgggatttctccactgcccaatgtgaagcctaaactgtggggtcccagctcagccttcctcactggctctcaactccaccccacccctctattcaggaaggtgaggggcatctctttagcagaccagactgttttgagaagtgtctctcatactttaactgaagagtcatgcagattctaatggtctggggagggcctgagagttcgtcttttttttttttttttttttttagttagggtcctgctgttatcacctaggctggagtgcagtggcacaatcatggctcactgcagcctcgaaccctccaggctcaggcgatcctctcacatcaacctcttgagtagccgggactacaggtgtgccaccacacctggctaatttttgtattttttgtagaggcagggtttcaccatgttgcccaggctggtctccaactcctgggctcaagcaatctgctcgccttggcctcctaaactgctgggattacaggcatgagccaccacacctggccgagaattcgtatttctaagaggcttcaggtgaagcccatgctggttcctggaccatggttttgagtagttaagggtttggactagaatatatgaagggctgggggtgaagacagactctagactctaaaggttggtggctggctatgtaggggatgggggagtgctacccctgtcaggtggtgggggcttcctggctgcagagttgggtgggagacttggggaagatgctttggaaggcagtgagtgggtggtgtcaacttctagtagtgcagtgggagagctggtcagggatgggatggagtgaagggggcagaggcatttggtgtggggttgatcagaggaattttggaaaggcttggaaacattcctatgtatgtgagacacacctatgccagggcaaagactccaagctcaagtttttctcttgccttctagtcacaagaacatggctttggagtgtgacactggcctaggaatccatgactcccaaaggacggggctaggggtagaggaggttcaggcaaagcccttagattttggagacatcaggcagatgtctccaaaaatgattgtgatcaagaatctgaattataagattcacagtctgctccccaacccagtgctgccaactgtacagctgcgcctccacgaaggggcatatgccaggctcgtctgaccctggaatgaggatgtaggaagcaggcagagctcgggttcagccctcacaatgggactgaagcaggagagaaggctgggcagaagggctgtggggaagtagggcttgtctccatggatgacgtccagaaggatgtcaggaggaggaatatcacaggagttatagacattggagggaacagagactggcacaggacctcttcattgcaggaagatggtagtgtaggcaggtaacattgagctcttttcaaaaaaggagagctcttcttcaagataaggaagtggtagttatggtggtaacccccggctatcagtccggatggttgccacccctcctgctgtaggatggaagcagccatggagtgggagggaggcgcaataagacacccctccacagagcttggcatcatgggaagctggttctacctcttcctggctcctttgtttaaaggcctggctgggagccttccttttgggtgtctttctcttctccaaccaacagaaaagactgctcttcaaaggtggagggtcttcatgaaacacagctgccaggagcccaggcacagggctgggggcctggaaaaaggagggcacacaggaggagggaggagctggtagggagatgctggctttacctaaggtctcgaaacaaggagggcagaataggcagaggcctctccgtcccaggcccatttttgacagatggcgggacggaaatgcaatagaccagcctgcaagaaagacatgtgttttgatgacaggcagtgtggccgggtggaacaagcacaggccttggaatccaatggactgaatcagaaccctaggcctgccatctgtcagccgggtgacctgggtcaattttagcctctaaaagcctcagtctccttatctgcaaaatgaggcttgtgatacctgttttgaagggttgctgagaaaattaaagataagggtatccaaaatagtctacggccataccaccctgaacgtgcctaatctcgtaagctaagcagggtcaggcctggttagtacctggatggggagagtatggaaaacatacctgcccgcagttggagttggactctgtcttaacagtagcgtggcacacagaaggcactcagtaaatacttgttgaataaatgaagtagcgatttggtgtga

SEQ ID NO: 5585 - DNA, 870 bp, Homo sapiens
attacacacacacacacacacacacacacacacacacacacacacacacacacacacacacacacgccgagcagctgtctcgggtccagagcgagcagcgtggagctcagtgacagcagcagggagaaatccactgaaggaaaaaacccaaatttccactccacaaagaaaacagctgcaagcccccagggacttacctggggctggcatgtgtgactgtctcggatgaagtgactgacccagtgcacactggatcaaaatgctgctttcctctgtgtctcacagcttggctgagctctgtctctgcaggttagaagtctgctaaagatcaaatgtgaaagtacttggagaaactgaggcctcttatgtgtaatgtgtaagttaagtgagccatatattttcttgcctcttccggacattcatgcttgtgtcccaagcattcccttggtgaattgtcacgtgagtggggccagtaagagtgaagtctgctccttgaatccaagccccatctggggcttctctaacaaatctgtagtaagtatacggactccagggagagaggctgggcttctttctctcatttgttccttgtggaacaaatgggcaaaagaagtgtgaaaatgtgggtgtttatgtctgtgtatatgtattttttacttcatgcatggcttctcctccaacttcctcctgcacttaaaaagggccaggttccaaattagacttgtaaatatggtgttagtgtttgacactactcctggatagttccaaacatcttccttgtggcaggtttcctggctgagcccgagcttccctccctgtttattgtgttcatgatcagtatgtgtttccatataaaacttttctcaacgg

SEQ ID NO: 5586 - DNA, 653 bp, Homo sapiens
ccacgtttcactggccttcatgacttgatgccactatttaaggtgggggggcggggaggcttttttccttagaccttgctgagatcaggaaaccacacaaatctgtctcctgggtctgactgctacccactaccactccccattagttaatttattctaacctctaacctaatctagaattggggcagtactcatggcttccgtttctgttgttctctcccttgagtaatctcttaaaaaaatcaagattcacacctgccccaggattacacatgggtagagcctgcaagacctgagaccttccaattgctggtgaggtggatgaacttcaaagctataggaacaaagcacataacttgtcactttaatctttttcactgactaataggactcagtacatatagtcttaagatcataccttacctaccaaggtaaaaagagggatcagagtggcccacagacattgctttcttatcacctatcatgtgaattctacctgtattcctgggctggaccacttgataacttccagtgtcctggcagcttttggaatgacagcagtggtatggggtttatgatgctataaaacaatgtctgaaaagttgcctagaatatattttgttacaaacttgaaataaaccaaatttgatgtt

SEQ ID NO: 5587 - DNA, 67 bp, Homo sapiens
ccccagctccagccatccacccctcagcccttttcttcaacgtcaccaataaatttttttttttttt

SEQ ID NO: 5588 - DNA, 243 bp, Homo sapiens
gcctgagagaccatctttagcagcctcagcactgccaggcctgccctgaaactccagatcctggctaagagggaaatagctccttgggacacaaacaagaaatgtggacaaggagggacatttgcatactcctactgtctgtgtggtcacagctagtttctgtcagctgggctctctgggagaaagctggctgttgtccaatgccttccttggcagccaagtggataaaacctttaggagccc

SEQ ID NO: 5589 - DNA, 354 bp, Homo sapiens
gcagctatggctgcatagcaagtagtaggcaggaggccaaagacttctgagacctggggcacccgggcctttgcggcagctactggcagggcctggccacctcataggactcagttcccttctgaacactcgggggacatgggcctctaactgcccactctgatatgcctgggtgagcctaggagggaaggctctgatttggatttctccagtcaaagctcacagaaaaaaacctggcactttgattttcatgggatggtcctaacagggtcagtcacctccgagcagtttgggaacccagtttcttgtcctgggccctcaggtcagcctggctgaattaggacccttccttgg

SEQ ID NO: 5590 - DNA, 1341 bp, Homo sapiens
ccatctgggccctccgacttccttcaaccaaaccagggctagagtcctgacctgccagtggtctttggatggcttgccccgtgcagcatcttgcatcctgagtcagaagtggaaatgtccagcaggggaaggacaggcaggtggatggtgtgagcacttttatcatctgtgtctcatcaggagcatctggggtgcctgtaggaggaaggccacagggcatggatcagccccactgcatctcaagtgaactgtatagccaagtcttaaacctctcacggggcaagcctgacacagaccccctttagatgctcaggcatactgtttccatcccgattccactcttcggctctgacacgtcccttgcaaagtctccgcaggtgctgtgaagagccttccatggtagagatttctcttaagagtgtgatttctcatagggctagtaagggagattgtatacctgttgtccacagtcttcaggcagctccccaggtctctgaaccccagagtgtcatcattggagagagcagtgactgcgagagatggtggaggccgctaagcatggtagaggctagaggaagtctatccacaggcagttgtgttcccagcaattcctcccatcctgcatggttcacaccaagagaaccttcagatcctaccagcaaccgtagcaccttccacccaggggactcccagaagccagtagagagaccaggagccacctcaatcagcaggacagcctcactgcccctcttgcagagtcccctttgcccatcctgaatgcacagtctccctgctcatgcccttcagtcccctgcttggctgtatgcactgtctatattgcactgagagaggaagggacagcaggagtgaggtgaagagggcggagagagggggcaggctcggcaccggccctcccagcccggccagcctgagcttgctgccctccagtagagacagaggggcagtgtttgcatgggaggtgtttctgcctgtccctgcctgatgtccctggtggagcaggtacctccgggcgggcaagcctctgatttgcacacctgaaaatcgcggaattgagtttcgatagattgatttttaaaacttttttggagtagggggtataggggaatcatttaatttaaatcattaagattcccctgctcaaacccagattcctgtgtacagatgctatttagagggaatcagaaaaatgccaagccttttctctttgaatgtgctatttttataactgaacttgtacatatgtataaagagagacacatcttccttttactaactggataaaaaaatcttaaataaaatggagtgagataattttatgta

SEQ ID NO: 5591 - DNA, 1197 bp, Homo sapiens
agatgggcagtttgttcttaaggccatacagatggcttatttcctttgccatcagggctttccacagtgcccaggtttctcatgttgtaaatgtagtaatgcttcagtcacaggggaaaattatatcctcttgcttactcctgtgttcctggtatgcggagaatgagaatgaataagttaaataatggaagaagtataatttctgattatgtcactgtgtagaaatgttctcagtgaccagagtgcattatttttcataatttgggtttagaggatttgaagaaaggaagaatcttgggcttagtatcaggaagactccatcattttcaaattttgttttgcttcttgacttttggattcctttgaagagacctggtaaaactattaacaattcatttaaaaaattggtacctgataactttaccagtacttttttcctttttatttatttgttttatttatttttttttaccgctccttgtggagcagggctacaccataggcagtgtgcccagagtaaccacttttttcctttttaaaatataatattaactttatgtttgaatgttgaatgttttgtctgtctcttaggcaaataatgttataggaatcaataatttaatttttgttttatttgttttttgatggagtctcactctgtcacccaggctggagtgtagtggtgtaatctctgctcactgcaacctccgcctcccgggttcaagcaattctcctgcctcagcctcctgagtagctgggattacaggtgcgtgccaccacgcccggctaatttttgtatttttagtagagatggggtttcaccatgttggccaggctggtctcgaactcctgactgaccttgtggtccacctgcctttggcttccaaagtgctgggattacaggtgtgaggcacggtgcccagccaatatctttattttaatttgtttttatttcctttatttttagctggttttgtccattttcctaacaaagcagggaccctgggtttctttttagtctgtctgttatataaacttgaagcctgactccattctatttgcctggagttagtatactttcttagggtgaaaggaaggcagcttgtattgagccttttaaagtattgaatgcttgcaaattgctaacattcttttgtgtaaaataaccaataaacctgttttgtcatactctactta

SEQ ID NO: 5592 - DNA, 484 bp, Homo sapiens
tcctgtaccaaagcttgagtgtcaggttcaggctttattgctgtcttcaacaacaggtgctgcttagtcatttcttgaaaaagattggcttcaagaatggaggggaaatgcagtttctatttacctttaggctgattttccaaattatttgtgaagctgtttttagaagatgagagactaaggattcttctcttttatagctatttgccttaagaacttactttagattcttattgaattcataatacttatctctgaaaatgtctttgactgtaaatttaggaattaagatgcagagtcccatgtgtcctctgatctaaagttgcatggttggtctgaaaatagagttgggcttaatgttgacttctattactcctgcatggagcagttgttatgaatactaatacatcactttttaacttctgtaaaatacagatcataatattctataggtaatgtttaataaattgcctgaataatatac

SEQ ID NO: 5593 - DNA, 89 bp, Homo sapiens
agatcatatggtagttttgttttactaatctaagggtactagcatctacaatgatatagacaaaataaaatatttctttaatggcatcc

SEQ ID NO: 5594 - DNA, 354 bp, Homo sapiens
gccccaaggggccctgagggtaaggactgaggcactgagggtccctccctatactcctcaggctcctgggtggcctgttatgccagcggcctctgttccctgcagtctgtgctgtgtgtctgggcctgtctcggggctggcctggcagcgctgcacttgccatgctggaaaccagcccaggcctcccagggaagggcccagccacttccagcttttgatcttggggccagaggccgccttacacacaccccaggtgtccatggggagcactggattgctctcccattatgagcatccttcatctgggcagaccccccaccctgcagatgcttctaataaaaagctcttctcatc

SEQ ID NO: 5595 - DNA, 364 bp, Homo sapiens
gatagttgatatagatggaaagatgggtacgttgtcctgtatccagcctttcaacagatgtctggccagacgaagaacattgtgtcctaatggtaggcaggagaccaaggagcagaaggcttgccttcctgggagcaggttgtttgagctgttttagagcagtgagccctaccattacatcctgatatctggggcttctgaaggtctgtactgggagtgaagagtggcttagctatttacccgctctttggggacagggcaaactaaatgcatcccttcttacctaactcccaacccctgccctgggctgaggcatatgaatgctatagttgtgcattaaaataaatgttttttatctcctgga

SEQ ID NO: 5596 - DNA, 470 bp, Homo sapiens
ggtgaaccccagtgcaacaccaaacttcaggggcacaagcgaggacacatctaagggaccagaataagactcagctacaggcaaaagggctccttcccgtggctgcttcaacccagttccccaggcccagcttctggaatagacagttccttctggttagatgggtcctaccatgtggcaggaaacagccattgcctggcctccccctgcattcctgtctgggtgaagaggagacgtgttacggcagagcaggtgggcaaggccagggctaccccaggcccatgtggcctcctccttgcttggaaggggtgactctgagcacaggtagacgcagacgtgtgcagagaatgtgctcttcggaggaagaacactgatgagcgagctctgtaccagcccttgccatgtacagccaagagcctagaatgacatggcccttctcagcagtaataacagatggtctcagcgcctca

SEQ ID NO: 5597 - DNA, 1202 bp, Homo sapiens
ggggtgggctgcagaacggggtgggaactgggggacctgggcctcaggcctgctccaccactgactcaccgaatgaccttgggcaaggcactgccctctctgtgccttggtttccccatctgtagaatggggagggtggacactggaaactagatgacttctttcacctccaaaattcccttagtttctatgaaaatattgggggtaggggggtggattaggagattgaagggttgagaagaaagagaaattgtccaaagagtcctcagaacctgcctggagaaatgcgcatgggggtgggcctggtaagtcccaggaaccacaggaagtgagctaaggctcacccagagcagctgggtctccaggctgcctgggctttttgtcctcatgaacaactctggagcagctgtctgtccctcagagggcacctggaggcagcaaagattatcttatttattttattttgttttctgctatatttagagtggcaaaaaaatagagcagagggtttctgctgtctccagactgtctaccaaagagaaggcgacagatgcctcctgggtttggaagggggatgcactgtggatctgccatccattctgcagtctccagcagagcaggcagtcaggccccagcgtgcctccatcccagtgccccgatgaccatctggtcagccctcccaacctcccttccagggggcttaccagcaaagccatattcggctaggaatttggaattcacaacctttattaacccctggcaaaacttcccgtttgcatgtcaaatcacattgaagcctgaaaattagcttttcttactggtttttccaataagtaatagcaaagcccacttatcatacttaaactacagtaaagaaaagaggtggttctctgcagtgatcgtttagtgtggccctcaaacattaaatatcccgaggtctccttggtgggtggcaggatttaaattcaatcaaatcctgtcctagtgtgtgcagtgtcttcggccctgtggacacaggtgaatgagggaccagccctgccctgggctgttgagaagagatcagtccacccagagttagacattgtttttgtagaaaacaggcatttattatgtctagggttttgtgttttttttttttccttacaggataaaagcctttatacagaaacaaaatggaacctttcatataaaaccttttcttt

SEQ ID NO: 5598 - DNA, 1031 bp, Homo sapiens
ggttgctcagaggctgcaggaccctccagggcctgcgggcataacctgatctgtagctgggctcagccacaggccttcctggttggagttctgggctctcccaggcctgggtggcctctgtagctggtctcactgcccagagggaactgcacacacagacttctctcttacgttcatggctggcttgagatgagttgaaaataacttcgccaggccagtgtgtagaacagctggtccaaccagacagactttcacaccacaattacttccatgcctgagcaggatagatttgaagtgcaagccggaggcagcagatcaggagtagggacaggaaggacaggggatgcctgacctgacaggtggcttcaggcctcgggaatcacaagacatcctgaacacattgcctcctcatcttcttcctgctcctccacctcctcctctccttgtccttctcctctttgtcctcctgctttccgtatccaagtcttgtacttgtttaaatttattcctaaatattttattctttttgataagtggagttactttcttaatttcatttagattattcattgctattttatagaaatacaatggatttttaaatgttgatcttgtattccgcaatcttgctgaagttgtttaccggctctaatacttttgcggatttcttagaattttctgtagacagatcatgccatctccaaatagagatggttttacttcttcctgtctgatctgaatgccttttatttatttttcccaattgccctgagcagtacaatgatgaacacacgtttcaagagcagacatcttgtcttgttcctgactctgacaagaaagcataagtctctcaccatttagtgtgattttagctgtgggtttttcttggacatccttatcaggttgagaaagttctcttttatttctagtttattgagtgttttatgatgaaacggtgttaggttttgtcaagtgatttttctgtgtctatgggcatgatcatgtggttttgtcgtgtattttattaatgt

SEQ ID NO: 5599 - DNA, 783 bp, Homo sapiens
ccaaggcaggaagcggaggactgtgacagagaggagacacactgctcatggtcagggcttgtagagggaggagcgatggggactctgtgcaggatctgcttcccttctctccaggacctgcctcgaggtgccccaggccccggaaagctcttgcagaattgcagcttggactggggcagggctctccttgtgtgtttttggagaagatgggcagtagatcgctccagggactcttggggatgtagggcagaagagaacagcactcatttcacagcggggtgtggagagaatcaggtgagccacagagcccaccccagacacagaaggacctcagagggcccaagtcctcagacccacacagaacaggggctgagggcactgagaagccagctgtcctccttacactgagatggaaagcagagatgcatccatccacacttcctgcagagcggcccaagccccaaccccacctcgagctcctggatgcactgctatcaagaacaatgaggggctgaggggatggccagcctatgttgctgactccatcatcctaaccctccttctgccttctggtctcctcgtgcctcctcccagatcacccttctcttcccagcgccctaaagcctgtggggtgatgtcccattctggctgctccaggtgggagatgtgcgcgtgtctccctgccagttacccaggcttcactcttcgaacctggaccacagtctctggtgatgtgtgtagtggccacatcatgcaaatatagtctcaccattcctaggagct

SEQ ID NO: 5600 - DNA, 2052 bp, Homo sapiens
gcccagcatcctggggatccagcggatggacagcttggctctcccagagaggtgaaggagcacctggccttaggaatcctggctgccaccaccacaaggctccccatttggacattactggctatcttgtgccctggaacaactctgaattaattagactcatggtctggcattgccagctttttaatgggaaaagagattagttataccttataccattatgttgtgggcaattccagagaattcagtacctgcttggtcaggaggatgtgcaccatcttgcctttgcacaccagtcacctgaacaaggaaacttgtcacaagtgtttgtaaccatggggttgttcatcaagggcttttctattaagtacatgacttcacaaggaccgctcagcatggctcactggagagttccatgagagaacagcactcaagcttctggccgcatggacccgatggctcgcattctgtgtagtgttttacgtctccatggtaactgtgccctgcacccctcggtagccgccctgttagttttcagtctccttttctttctcaccatttatcacttccctcactgccctacccaggctttctctcccacttccctgactctgggaataactaatatttaagcaaggtaagatgagaagcaaggggtctcagttctaggaatacagtgctagttgattgtcaggtatgttgtaaatagaccctctttggccatacactccatgcctagatgcctcggagagcatcattctctgcctaggcaaggccctgcatcccttgcctcaggccgggctgagtgtgactgcagctcctgaggatgggcctgccctgtctggggtatgcgtgatccctagatacatgttcccacagaggtgcctgctccgtcttcgctcaccagacactcaggcaggctggcttagtctttgtgcgtggcgattttgtgctctgggccctttctctttttccagccagtttccattcacttgccttacagcctgccctggccgtcactccccagctttgttcagcaatggtgtggttggagagttgtgctgggatagcgcaggaaggtgggtcccggcaacacgcaggggatgagtggacctggaactgacaatggcgtgctgccaagtgttcctgagaggtgtttaggcacagcagaggggacgcggggggcaagaacagcaggacgctggtttaaaaataactcaccgccaaacctgtggagcagtgtggggcatcctgccagaggtgcacaggctggagtttcaggcactgcaggctgatgacacacagggagagtggccctgcctcctgtcctccccggggtttttgcagactcgaagtctcactgcaccagtgtctttgatggtggtgagggtgggtgatggtgcccagcaccaacagttttagtggcctgtccttgacctgccgtggtcctttgtaaactatggctccatgctgtgtgacagatcaacgtgctgatggtaagtagactaggcttccccaggcatgccgtccgtgggggcctgaagagacagtgagtgccattggccccattcgcagatgtgggagactctgctcaggcctgtgaggctgggcagcccttcaccagagttcggaggagcagtgtgtggcgccacgtcccgactggccatacccacacagaagcagtgctgcccggggcctcatctgggccagcttggactctgcttcctccaggagcagcagggaagctctgggccacctccctggatagcaggaacttgacctgccatgtgtgccctgccttcctggccagctgtgcttgttatcttccattctcacaaactgtctttgaagcaatagaataaagaatgtgtgttttctttcctggtatacatacatgatcccatgctcccaagctccattcttccttccctcaactctctgccctccacagagctatggagaaggctggagatgaaagctttgtagtgaggactgataaagatctcatcactgctccttataataaacctaataaagcaagaaaccaagcct

SEQ ID NO: 5601 - DNA, 1172 bp, Homo sapiens
ggaatgggaagatttgcagttaaagatggctaccatcagggaagagatcagcatctgtgtcagtcttctgtacggctccatgggattaaaggaagcaatgacatcctgatctgttccttgatctttgggcattggagttggcgagaggtgtcagaacaaagagaacatcttactgaaaacaagttcataagatgagaaaaatctacgagcttcttatttacaacactgctgccccctttcctcccagactctgacatggatgttcatgcaacttaagtgtgttgttcctgaactttctgtaatgtttcattttttaaatctgacaaactaaaaagtttaacgtcttctaaaagattgtcatcaacaccataatatgtaatctccaggagcaactgcctgtaatttttatttatttagggagttacataggtgatgggggaaattgttaactacctttcattttcctgggaagtcaaggttacatcttgcagaggttgttttgagaaaaaagggcccttctgagttaaggagccatagttctatcaatgatcaaaagaaaaaaaaaaaaagagaaactgttacagtatgattcagatcatttaaaaaagcaaaatcaagtgcaattttgtttacaaatggtgtatattaaagatttttctatttcagatgtactttaaagagaaatattagcttaactcttttgacatctgctattgtgacacatcccattgctggcaatgtggtgcacactccgaaacttttaactactgttttgtaagcctccaagggtggcattgcagggtccttaggcaatgttttgtttgcctttatgcagagaggtgctccaagtgctgtgattgagcaccgtgctagaggaactgtaatgcttcagaagttgtagcttatacaaaggaaacaggtcctgctggcttaatttaaacagttattgcatgaagtagcgtggaggccctggactgctgctcgttctttaggatggactgttctggtatctggtattggtttagagactgttaataagggacatcacaaggtgatgggattcatttgaagcactctatttctgttttaatggttttatccaattttgccttcccaagatttttgttctacataaaaagttcatgccactttttaatataaaaaaatttaac

SEQ ID NO: 5602 - DNA, 4480 bp, Homo sapiens
agttttttgcctcccacgttgggaagtcattagttgaactattttcacattggccccccacacaggccactctcttccctttcttggtgaagtaaggaaggagaaagtggttactagccaggcatacccctagcataagtctgggcagctctatgggatgataaattacacttttaagttcttgctggaggttttaaatagatttagacaaatgttaaggaaccatacttctctgggacagcatggcatatagtgatatatgctatttgcgttctccagatgtttattgaagatacagatcctaattggttacccagtttgaccctaatcatatgtatattttattgatttcagtttgcaatttttaatttatgttcttatgatggtttaaacctatagtcaggcttttaagtacaagtttgtttaagtgccagactttgaggatcagttttaatttctccatttgtaatagctgggtatttaaactggaagcaaatagttttctttcttaacaattatgtgcagtgtgtgtcactgttttcttgctttatagatagagctggctttaagtgctaaaggacacagtagatttttgacaaacagtggctgctctgctgactatcttttaggaattcaggaagcaaatcacatagtgacaagtccttacagacaccacttctagtaaatctctgtaaatgtggatagaaagctcagtgtgaggcagtgcgtagacctaacgtctacctttacatctgctgttgaacctgggcactacctgttacagatcctgtcaggctgttgaactggaggtgtacctttatcttcctttctagtgtctgaccctgcaagcctaatgttggtttgaacccttttggtttgttcagttgccagcctccatctctcccactgtatggccgtgcctagaccgatggcagccatcgaatattcctctgggctcacggggtgttttccacccccctgcagcaactaagatggtgggggagagggggttagaataaagcatctgaatacagttttcaggacctcaagcagacttcctagagacttgtttctgagacagttctttgccttcacttccctgctagctgggaaagaagagtggagcagagactctgcctggccactgagaacagccaaattcacaaaccctcagtggggctttgtttttggattttctccggactcatcagtaaacctgtagaagtgtcgctttccagccttttgtttctggatcctcaaaactcagaacgtggccgggcgtggtggctcacgcctgtaatcccagcactttgggaggctgaggcaggcagatcacctgaggctaggagttgcagaccagcctggccaacatggcaaaaccccgtctctactaaaaatacaaaaagccgggcgtggtgggcgcctgtaatcccagctgctcaggaggctgaggcaggagaatcgcttgaacccgggaggcagagattgcagtaagctgagatcgtgccactgcactccagcctggtgacagagtgagactccgtctcaaaaaaaaaaaaaaaaactcagcttcttcagagagataaaattgggggaggagcccagggccacataccaagctttgggacatggtgcctcatgctctctgggattgcagaccatccaggtctgtcttcgcccctgttagtgcacatatatccactcacatgtcttccctcaggctatcgggcagggggacttcaccagggggtttatggataggcttcaagagggtctgtgagcccccagaaattgtgtgtgagactgagtatgtgttcttttttccaggaaaggctccagtggttcttacttgatccaaaaaatgtcaagaattaatctaggaggccgggcctggtggctcacacctgtaatcccagctctttgggaggccgaggcgggtggatcactcaaggtcaggcatttgagaccagcctggccaacatagtgaaaccccgtctctattaaaaatacaaaaattagctgggtgtggtggtatgtgcctgtagtctcagctactcaggaggctgagacaggagaatcacttgaaccctggaggtagaagttgcagtgagccaagatcatactactgcactccagcctgggcgacaagagtgaaactccacctcaaaaaaaaaaaaaaaagagttaatctaggagataatgaatggcctagtactagataatatatggccccacaagctcttgacttctgtccttggggaaagccattttgttaaccacactagtgagatttacatgatgcttaatggagaacagagaagatcttgttgcaaaaggtgtattaaatatttgtgctgtttctgtatgagattgagaagcttttcccacctctcacccctatttcctataaggatatccagagaagccaaactgttctgtgggtttgggaatggtcatttcccgggaaaatgcatctggatcgatgactaaacctggcccttttctctgggctgtagtgaagccgcattttcacgctggctggcagtgtgctgagagcctcgaatgctctgcggcgtagtgcccttctgccctgcctgacgatgtatcgaaaagatgagagtgaaggagactttgtgcagcaggaaacgggtaggtgaggtgttgggcagttgtgggaacttctgagagtattacagagtggtagaatcggtaagaactctgatttggacttcgctttggtggaactgtgtgcctatacctgcctgtgtgtgtgcaagtgtgcaggttcctttgtatgtatgtgtacgtgtgggaacctgtgtttgtcatatttttcttcatttcacaaaggctttttttgaagcagtggcagtatgcctttgtttcaagaacacatgaaattcttttaacaccagattagtgtgttaccccaaatgaacggttctagccctctattaagaaataaagggaccataagcattttggctgcttatggctgtgtgttactacttacaagagtcttgaaaattatacagaactttgccttctttttttaatgtcttccacaatgttgtgactgattataaccctgtttcccctcagagaagagctatggctcagggatctgtgttgactctggcatttagtggctttgtgaaggaaagaaaccattaaatgacctgacaaaaactgactcatgtctttaaagtagttgaagccacttttagaatgttactctcggttgcttttgtctaattctaatggcttaaagccaagaaaaccatagtataaatctttttgtgtacctatgctagtgtttaaatggcagttcgttgtgataaagtatcagtcacttcaagttttctgtgaaagtttttaattaggttaaaaataattttggcatacgtctctactcagtttataaagcagttccacaccatgcaaacaaaactctaacagcaaaggttatcttgacctgatgttacttgaatctgagagaaagtcattacttactactgcactcctgcttttgtgggaaaaattttcttcttccccagaagagttaacagttgagtgttcagctcctgacttacctttaatttagaggcaatattattactgtttaagtgattatttgcttaacacaggttttattttgtctttttgctggtagattatacaagggacaactttagtgatgaggcatgtggatgatttggtgggagtaggtatatacttagtggaatggtttattttatggaagagaattcattggaggtgagattgaagtatattgtgaagtgggatttgaacagcacatatgctctggtttgctcaaataactgcagtttatgcttacatctaaattttgtttctgttacctaaacgggagcttctagaattacgaaggccatacctgccacatttataaaataatggttttatccctgcccccaaatcatcaggttcctcgggtttaagagaagtggtctaatagacaggaatagaagttgtggtggaggtgatttgggatagactaggtttccttatgcaagtggatatgagctcctcatagaaaccagacctactgtattagacagtaacctctaacctcacctccaagcccaagtatatggccctgctgggttacctggtgactacatttcccagattcactctaaattcaaggtagtgacccaaataaattgggaaaggagggggtcaaggaggaaaagctgttgaaaatctttctcctatttaagagaaatatatgccctagagctgctccagcacccttggtttctgatttttttaatattgaatatggattagaagaatgaaatcagatgacacctgactgcaaaaatgtttataagcaaatagccttcttacattttggtataaagctgtgaacttcgtaactttgtaaagcaagatataaagcaaatacaagaggaaaataaagtacttttactaattg

SEQ ID NO: 5603 - DNA, 1559 bp, Homo sapiens
agttctccaggactatggaaaccttacaggatactgacttagaacctctgttggaatgtggctgagtcaaagcctcctgttgttgttaggggtatctacagtaaggagatgatacttcaggagattatatttcactcaatgatcttttctcatttcagggctcttctcaaataagctaaaagaaaaaggatcaggagacaggaaaagtcttccgttttgagtcatgagtagggcaatagacaaggttctcttcaaaaccatcattagtttggctttaagaaaccagtagctagctgctatttatatggtgagggggtgctgcctggtaacagaatagctccacaccacagcttgagattttgtttagtttcactgtgtgagctttcataaagtctgttgccattccatctctgtgttaacacttcatatttttatgaaattcagataatttgtgagaggctggcatggatctaaggatttattatttttattctagtccatcagttcagtcgcagtttttatactaggactttaggatgtacataaatgtgtgactgtttgtcttgattaaaagtgcactttggcctgggcatggtggctcatgcctataatcccagcactttgggaggccaaggcgggtggctcacttgaggctaggagttcaagactagcgtggccaacatgaggaaaccctgtctctactaaaaatacaaaaattagctgggtgtgttggtgcatgcttataatcccagctacttgggaggctgaggcaggagaatcgcttgaacccaggaggtggaggttgcagtgagccgagattatgccactgtactccagcgtgggtgacagagtgagactctgtctcaaattaaaaaaataaaaaataattttttttttttaaagtacgctttgttggctgggcacggcgactcacgcctgtaatcccagcacattgggaggccaaggcaggcagatcacgaggttaggagttcgagaccagcctggccaacatggtgaaaccctgtctctactgaaaatacaaaaattagctgggcgtggtggtgggtacctgtaatcccagctacttgggaggctgaggcaggagaattgcttgaacccaggaggcagaggttgcagtgagccgagatcatgccattgcactccgactctgggcaacagagcaagactctgtctcgggggaaacaaaaaaaaagtgtgctttgtcaagagaagcaccagcagacctctaagaactgctctctaaggctgcggtagcaaattatctactattgcaggtgccttattggtagagggctctgaagagccaaaactgtatatgcaacacttgtaagataaaagggactttaataatcaagattttcttgaagatttgttagaaataatgtcttatttctggtaacctttccctttttgtatttataactctactaaccaaattacctatcaataaaccattactataatattttaaaacaacctatgtttatcaagcttactctctgagtgacagaatatactaaataaagaattttttaatg

SEQ ID NO: 5604 - DNA, 927 bp, Homo sapiens
ggctgagaagtggccctgccttgggcattgcaccagaaccctggacccccgcctcacgaggaggcccaagtgcccaatgcagaccctcactggttggggtgtagctgggtctacagtcagacttcctgctctaagggtgtcactgcctggcatcccaccacgcgaatcctagaggaaggagagttggcctgatttgggattatggcagaaaagtccagagatgccagtcctggagtagaagaggtggtgtttgtttatctcttggatactaaatgaaatgaggtgtgtgggcttgtcaacacagaattcaagcctcatttgctatcccagcatctcttaaaactttgtagtcttggaattcatgacagaggcaaatgactcctgcttaacttatgaagaaagttaaaacatgaatcttgggagtctacattttcttatcaccaggagctggactgccatctccttataaatgcctaacacaggccgggtctggtggctcatgcctgtaatcccagcactttgagaggcctgaggtcggcggactgcctgaggtcaggaattcaagaccagcctggccaacatggcaaaaccccatctctactaaaaataaaaaaattattagctgggcatggtggtgtgtgcctgtaatcccagctactcaggaggatgaggcaggagacctgcttgaacctggaggtggaggttgcagtgagccgaggtcgcaccactgcactccagtctgggtaacagagcgagactttctagaaaaagcctaacaaacagataaggtaggactcaaccaactgaaacctgactttccccctgtaccttcagcccctgtgcaggtagtaacctcttgagacctctccctgaccagggaccaagcacagggcatttagagctttttagaataaactggttttcttt

SEQ ID NO: 5605 - DNA, 1447 bp, Homo sapiens
gagccaggctgcatctctttgaaaggtgtgagatcttcctcctaaacctgatgcatgtgtgtccctgtactttctatgtaaaaaaatcagtgttgatcttctcttgcaaaagaaagtaacatgatcaattatttataagaagacataatacatgataaggaattacctaaggcaggcagcaagtagattaggaatcaatgtctttgtacaagaaggaaaaatagagcaaaaatccaagggggagaaactcattaaaatgagctctcattttttaagctgcctttgaaacaaaagagttgaggataggagatagaatggaattttaggggggttgcctaatttttttaagcctcaattcaaagattatatagcaaaagtgaaacttcttgtttgatattttcattcaaaactttcccaccctgaagagtcattgatcagatattagattatataagaagtctgttgccagggagccagtattcatgtatatttggcttgtgtgtttatttcgtgtattgagaatgaacacctttactttgcctcattcctagtaccctccctggagttcagatttttttttaaaattttgtatgtctcgtctgattcaatctctctgcttttattttatggtcctagttgtactatcaaatccaattacttttttttaggtccccctgattttttttttttagagcaagagttcttaacatattacatttttattatgaaaaataagaaagttaggtaaaggaaagaaaagtctaactagagctattttgcaggctttagtgtttagggagagaaagaaagtgtgggttaatagccttcaagatagaagatgccctttcatctctgttaagtgtcctcctttagaaacttgagtagaaggaaaactgaccagagtagactgcttccttaagtcttctgggttccaactgtttgtaatatcagcatccaagatgatacgagggaagcacaatgctttggactgtgatttgagatttagaaataaattagatatattattgaggcttagaatcctcaaactttgtattttatacatttagccaataaggaattaatatctggggaaataaatttaggcaaatatttcttttttaatgttttattacctgcttctcctgtgttttagttcaacatttgggcttcttggcctgattttcatacaatctcaatttacgaagctgtaaagaggaagatatttgttctaatctcactcttctaataggaatcaggcaaatgaaagtctaccagacttttaaaatgggctgtttttatactctctaggtgttttgtgttgtaaagaccttattaaggtcaggtaaattggtctgcttgctgttgaaatttgccttctagcaaacatatgtgctttctgtttgaccttgtgtttgctgccaaacctaatacagttgaattgggaaac

SEQ ID NO: 5606 - DNA, 2421 bp, Homo sapiens
gctccaactctgcctcaagacaatcacaaatgacgacagtagtaaaggctgattcaaaattatggaaaactttctgagggctgggaaagtattggagggtcttttgctccatgtccaggttcacttacatcaataaaatatttcttaatggagtattgctttcaattagcaaacatatgcttcacaggaaaaaaggacatagatcaatctgttttatgtgctagtatttccaggaatttattccccttcataatttgtctcatttcattttatttcatccacttggtagatgaagtcacgtcaaacagttgtagacattttatatgttggttaactcttctgcaattttgtatttggtgttttccccccaagtttagttcaactgacattggatcactgacaaaattctaataatctgtgatagtcttccttgcagttaaagaagaattgcagaaaccatgcaatatacttgggaaagattccaaaaataaattttttattatttctcttttaaggaaatacccctaatgtgccacctgctgctatcaccacaaattaaactcaatctctatgtggacagaggatgatttctgccaatatggaaaagcttttttctcactgtaggcctcaagaaaagttagggtaatgtatttgttattcattcctgacggtacaaagagcttgcagttctcacctctgactaccagtagctttgttgagttttgaaataatacttgacattttccaaaggcaaatctcattctgcaaggagattgtggcaccatcctgtttgactctcagaaacctcttgtaattctgatgtaaaaactgtagaatgaagatgagaaaattctcgcaatgagtggatcatgacaactgtaaattagaacaatcagatttaaaccaattccgcagtcttctatatctttgtaaaagacaaatccttgatgttgtctgtgtgcaaccttttcataaactctggttttatgactagtacaaaccaccaaaaaagccatgtgatcaatagtctgtgtcctgttataacatgctgtggttgagccatcttgtttataaataatagagctctcctgaatttgtgcatagacttcttggttcctggcttttgttttttgtatcaagagattgtgatataaaacagcagaagataaatggaaaccttccattttaacttacgttgtttctggggtaatgttagaaccttgaaagatgcattcaaagactgtatcttattttgcccttggctattagtgtctcacatatgtgtgtaaatgttttcctaccttctttttgctcagcaaaggcaagcaagtaaaatatatttgctaagtgattagtgatgcacatttggggctagatttttttggtacttttatgtaaagaaaagtggattttgcagtaagggattggcatgagcaggcgtcagaatcacaatcatgattttctacttgaataattacaattcagaaggtatctggataaatagatacatgtctagtgaacaatttgtaacaataacaggtaaggatcaggaaattcagtattcagtttgtcagatttgccagaatgatgaaagtatttgaacatgtgtgtttgtttcttatataattgtattgagtggattgtttgactgggaaatctgggctagaataggaaacagaagatactgacttctaccctaatagatgggccccaatttagcaaagataaactgactttatttttagtcctttttatattaacttaataaattctggagttaggctctcaagaggacagagggactgtctggcaatggccagccagacctttactgccaaagaacccatttcatattgcgttccactgattgagattgattcagatttttgcactgtagatgagcgtatgtctcagtgctgccccaagccccagggatttctcattatgttcaaatgtcctagtgatttaccttaatcattgcaaacaattatgcttatgaagtttacttacaaacaagcaactgagtcactttattttctttagtgtagtatgtgaaggcactggttcaacaggatggctccagaactgtgtttttctaatgtttggtaaggggctagtgagaattttaatgatatggtgaagaaaaatatatctgtataattaatttattatattggtgtatgggctgtgagttcaccttttagtggtcatttgtcatttcataacaactatgcattttggttcactgtgatgatgatctatatttagtgactgcaacatgtttataccactgattcaaattccatccatgatgaagttatacaaataatgcatatattgataacttttattgcaaaaatgtaaatttaaaacttgtataatgttcttgtgctttttaaaataaaatatatgtgtatattt

SEQ ID NO: 5607 - DNA, 72 bp, Homo sapiens
acttccagctctatcaccactctcctgccaacccttgttctacaatctaaaccaaacatgtgctaggaagag

SEQ ID NO: 5608 - DNA, 14 bp, Homo sapiens
attctggaacaacg

SEQ ID NO: 5609 - DNA, 174 bp, Homo sapiens
gacccgccctccagctgccctccctggcacccctgccccacctggctcctttctactcctggctatgtcgtcttggctccacctctgtcctctctctagcctgcctgggaatgaatgaagctctgttagaaacaccgtgtgctttgggaagagacaataaagatgtctttattt

SEQ ID NO: 5610 - DNA, 651 bp, Homo sapiens
ggactggactaatattcaggacccactaaagtagacaataaagttttccacaaataggatgaccctctagctatagatactgccactcctcctttccccatcctttttttcccttagcactattcagtgcaaaaagtgaaaaaggttggtaaaataggtaaaatacctagaaacaatcactacagaaaacagctgaagacagtggccatgcagtccgagaggagtagtggtctgcctctaattttctaatctaagttcgtttattgagttacagtggtctttagtaaagtaaaacaatttcccaatcccaggccttgtgatttgagatggtaccttagaaaaagttacacgcagttccgtggttgaatatatttgagatggtaccttagaaaaagtttcacgcagatccttggttgaatatagttgagggagcgtagtattgacaattcttcatgtaggaaacctgaaatgaacacagtcacagtttgattaaaacattgtcctgtttgttgcaacagaaaactcggatagttttaacaacaggaaacacttgtaggacttcctttaccaacatactttttaaatgttttgctattggttccatatttatttagatttataagtgtcaataaagcaaacttttgatgcctc

SEQ ID NO: 5611 - DNA, 2901 bp, Homo sapiens
gcccctgaggatatataacggaaagaggctcaataaatgtattgtttagaaagtcttccaatagtgagattcatctactattctgtgtccagttagcttaggaaattcactttaggatttatgccactgtttgttccttgtttttcctgatctagactcaaatccccaaggcagtctaaagaatgaaaggaagatttcagtccctctctttgcctgcatctgaattgatggataacatcttttccctctcagtgcctatggtgttcccttaatataagcacagaggacaaggtaatagatcctatgaatttgataagcatccttctttactcattctgtcattcagctgcattttgacaggaaaaacccattacatttcgagaagaagttatgagactttgcccattaggtgggtctagctcttttttttttttttggagacggagttttgctcttgttgcccaggctggagtgcaatggcacgatctcagctcactgcaacctctgcttcccgggttcaagtgattctcctgcctcagcctcccaagtggctggaattacaagcatgcgccaccatgcccagctaattttatatttttagtagagatggggtttctccatgttgggcaggctggtctcaaactcccgacctcaggtgatctgcctgcctcggcctcccaaagtgctgggattacaggcatgagccactgcgccgggcttttttttttcgagatggagtctcactctgtcgtccaggctggagtgcagtggcatgatctcagctcactgcaacctctgccttctgggttcaaacaattttcctgcctcagcctcctgagtagctgggattacagccacctgccaccataccaggctaaattttgcatttttagtagagatggggtttcaccatgttggccaggctggttttgaattgacctcatgatctgcctgcctaggtctcccaaagtgctgggattacaggtgtgagccactgcacccggcccagctcttctttatacaataatggaaatgctaaaatgaatgactcttcctgctcacttaaacctgtgctcaaaatgacatatttgtcaggcaccctcttcatttaccttaaagaaggagagtttaatgtccatcttggttctgccctatgaatcatcttgtcaagaacaggtgttcttatgcagaaacaatgaaaaccttatactgaagtgtgaaccctggatttcttagtttcttctgagtcctagaagaagggttggaatagaataatacatttacaggatttaggttggttttctttctgtccagtctcatctgaatttcgtctgtctcttgtggtccagaagttccacagagcaacgcagctgcatgtggtgacaggtagagcagttaaagctgccaataggaactcgtccatattccacacacctggtatagtgttatgccctccatgggcacttacctgcaataagcagaagccactgccacattcccgtgtattgggaaaatggactactgtgtgcgaacaggccctttaccctaatggcagggaagatggattatctttggccagtggagctgccaatctagacatacacattcaactgaatacaattaaaagcagttctttaaatgcaaatataattactcatctttataatacaatagtattaactgcccatatgctcatagtatgatgagccctgtatagcacaaggtcaacaggtcctctccttgtccttacaatctaaagcagatgacactgacatggacaaacaagtgcacatgcatagttgcggcagttttagagaaatctagaaagctaggtagcaacactatgcataaatgttgtggtccaatgcattagtttgctttaacaaaaatctgggaggtattttttctctttattcaggaaggcttcatgaagcaggaagtggtcaaaggagggaaggttactggttaaattatgataggaagaactttccataactagttgcaaaattgagtgctgggtgggttgaggaatgggaaaaagggggagcaaggtgttttgtgtagatggaacaaagggcaaaggatagactgtaaggaaggccagataaagcttggagtagcatgagaacttgaggaatagtatgatatgggctgtgcagcaggcagagagaatcaccttagctgaaacatgggtgttaggagcagaccatgaggtggtagaaccatcatctatagtaaatcaggtactacgctataactattgataaggaaacagctgactgccactgaaagaataagcagttttaggggactagctcctatgggagataaaggtcagaaatcgtagtatctgatgaagatattttgatgagcaggtgagaagaaagataaacatggccagatggccaaggactgggataagtagccgtttcacattcaattagaattctgtggctggaataagatcagggagagcagtaggaagatatagtattctataattcatagcttgttgtgttagagattaattaggattctgctgttgaatcttagtacaaaaaaatctaatatttattaggaattaagggaagatggtacttctgttatgttgcctaagcagacaggaagctacaagaaacaccagtctgaagcagtgcctcaggatctcagatgatttaggaagtgtgctgtaatgtcaaaaaaaaaaaaaagtattgtctttagtatatctatgtatagtctcgtgggaaaagcattggttgtggtatcaacagatattctggttccagatgtcttgtaagttaacctgcctccatttccctttctgtaaagcaaaataatgtttacacctaatctgtctctcagggataccatattaataaaaatcatgtctataaagtg

SEQ ID NO: 5612 - DNA, 174 bp, Homo sapiens
agatacttggtcttactggttttattccctgctatcgtggagattgtgttttaaccaggttttaaatgtgtcttgtgtgtaactggattccttgcatggatcttgtatatagttttatttgctgaacttttatgataaaataaatgttgaatctctttggttgtagtaactggg

SEQ ID NO: 5613 - DNA, 1211 bp, Homo sapiens
aagtcctgggtggtccctgaagtgattgatcagctgcctggagagggtattcctcaagcccagcatccatctggtgatccaaaccctcagagccagtctctagcccatgaccagcactcaccccttccaccagcaacatgtgattaattttctcattagtggtatcacactataccagccatttgagccagcaaccttttctgttggctaactcactggccagctctcaccagcggtgtctggggaagtagttctctttgtatgaagcatacctgtgccagagctgtggttgaggaggagccagttttaggttcgaagaagccattggctcctcacttagccattagacttgaataggatttccttggggtgggttggtctgtcattacccagccttctctgagcatcctaggaaatcacagattgttaaaggaaatgccgcttcactgctgaagacaccatctggcgacagcaaatgcaaaagaggggactctagggtcttcacttttctggggaaatgttcacgacttctcaaggtacgcttagaccatatgtgcattcaggggactcttgtctttgccagcactcctcaggtgagcccgggatggctatctgaaatgtctggaaaatagagtcccttccccaaacatctgacatggccactaaatctttagacttgccttatagatccttccatatcatccccaagtgccccttctgcctcagtcctgttcctctgggcaatagctctagggaaaagtaggtattagactgctgtgcaaaattcagagcaactacttaaaatgctctagaggattcttagccagtctgtgaaagtgggcctcctctgtggtggggctgtttggcttaggagatgctgtagtagtagagataatcaggttctattttaagcaatcagcagagatcaatattgtacagatacaagcaaaggtttaataaatatatatatatatatttatttctgtagttgtgccagggacagactggccaaagaccaaacactgcagggtccccaagaaatttgtccttatatcattgtgtctgagggccagatatgattatgaagctttttccaaagatccagggatgggaatgggagtgggtaggaggggtaatgcggtcattggagtcgggggctggaacattatgagtgctcaataaatataaactaatgagaatggtggtgatgg

SEQ ID NO: 5614 - DNA, 108 bp, Homo sapiens
gcctgtctctacagtagaaggagattgtggggagagaaatcttaagtcataatgaataaagtgcaaacagaagtgcatcctgattattttcagaagctgatgaggaat

SEQ ID NO: 5615 - DNA, 847 bp, Homo sapiens
agaatgtgcctaggtgaatcgaaagaacaagttaacatgataataggaagaaacaaaaatttacttaacttctttcttttgattttttttccctaaaactaaacatcaatcattgcaggagttgttggtattaggagcaaagtagactaactacaacatcaatgccaacaagagcatctgccggttactgagcacttactaagtgccaagcattattttaagtgttttccttacattatctcatttatgctccacaacaacccaattaaataaccatgaattttatccccctttttatatctgaacaagtttaagtatagtgtttaagcaacttaatatagaaaggctgaatagtaagcacttctcagagaatgctattcaagggataacgcccagggaacaatgaagaggataagatgaagaagctgcaattctgcctgggtgccttggggtgtattttacttataacctgtgtgttttccacagtccctgcttcccgaggttgtggtattggtaggggtaacaggccaatcggtgtggcttcagcttctgaggatctgccgggtgctgaggtctctcaaactccttgcacaattccgtcaaattcaaattattattttggtcctggtcagggccctcaaggtgatttgactgttgcaagctaaagcagggggcaaggtagataaatgtgagggcttaacatagaatatgaaacaaattggccgggtgcggtggctcacgcctgtaatcccagcactttgggaagccgagggggatgggtcatgaggtcaggagttcgagaccagcctgaccaacatggtgaaaccctgtctctactaaaaatacc

SEQ ID NO: 5616 - DNA, 126 bp, Homo sapiens
agcaatggatggcttcaatatccttgggcccagcaaaagataatgaagggaattgttggaaatagagaattgaaaatataaacattcagatagaacaatgtctgttcattaaaattaaaaagtata

SEQ ID NO: 5617 - DNA, 516 bp, Homo sapiens
agttatcaagggaatttttgagcctctgcttagtgaaacacaaaggaacaaagcagctataaactaaatagaatgcaactatctgcttttcttatgctgaccactggagtccatggtggcaagtagagagctgctctaggttcttgaggtttggttttcattattaatttttagggtatgggcactgtgcaaagactccatagctgtgcctaggagtctaggaaaagtgacagaggcttggcttttttacctttagttcagccaagtcattttcaagtcctgagaaatgacatcatcttcaggataaaataatgaggacattagacaaaccaaactaagtgaattttagcctggtagcctctctaaggaaacagtaataataacttctgataagagttaaaagaacttgtagcatacctggatataatgggaaagggcctgggtgttacccatgtactgaaaatgaacttttaccaacatggctaaaaaattaaaactgactgcttctgtgtcctt

SEQ ID NO: 5618 - DNA, 33 bp, Homo sapiens
gtccttttcacaaactggggttcccctgacatt

SEQ ID NO: 5619 - DNA, 557 bp, Homo sapiens
ggtccaactgcttattcttccaactgtggaacacaaggggagtctcagcatctggtccttgatttggttttttcattgtttccttggcccctgtatccagatattggacttactgctatacttgtgatactgggtagcccagactttgaaggtgctttgtgaggtttggactcatgctgagaaacccacaggaaagcactgtccaggtaggattagaggcttcccacttaaaactatttctgagaaatcttaggttttatcactgctatggtttcccatatttacttgggactgttctgactttctttttccagcccttagcttgggttagaaaagtggacatgtaagtgaacaatgcattacttctaccttaggtttaggagtaatatacccggaaatctaagctcatggaaacatgttttccatttttgcttggagtccgtttttctagttgtacatactttttgatccatatatgtgtgcatgtcaagaaataaaagaatcacacaacaaggagatttttagcatgatactggaaataaaatgtccaagctgac

SEQ ID NO: 5620 - DNA, 353 bp, Homo sapiens
gaaggcatgactcctcccaaaaactagccaggtggaccaaggaacccggctacccattcccagcaatgggacccatcgcggaaccatcggcacatataccaagtcctcctctcatgactcaaagtccactgcagcctaggagggtgtttcccagaagaagaaagggataggctcatgccctgtctaaacaaactgggaaaactcattttcttcagaagttatttcaagaaaggctcagcgactctgtttctcatctttccaatttgcaggataatttttggttttgaattttgatttttcatagatgtatattattttgaagtatcaaataaaaataatttattttactatta

SEQ ID NO: 5621 - DNA, 424 bp, Homo sapiens
atgatttcataggtgtctgttttcttgtactgttagcagattctgacagatgtgatgagaagaagaatgcattggagatctttgctaaagttgaacaatcccggtactgtaccatatcagtcctttgtgggtagtaggtagcaagtaagaaacttttcaggaggaaattcctatttaaaatagattgattttagatgattgttcatccacaccattttatatagatactagtattaagatcaaaagcttcctcttcctcaggacagcttctactttagatgatccaataatgattaaagaatacctgtacctgcagattccagtttcaaagaaatttaattattatttacacagttaaggaacaggtgatacattttcatttgttagaaactgatctttctgtaataaaatagattttcaattc

SEQ ID NO: 5622 - DNA, 1496 bp, Homo sapiens
gcctgtcctccctggctgctgcttccagtatcctgccttctcttctgtgcacctaagttgcccagccctgctggcaatctctccatcagaatccaccttaggcctcagctggagggctgcagagcccctcccaatattgggagaatattgacccagacaattatacaaatgagaaaaggcaggagactatgttctacaattgcagtgcatgatgattataagtccacctgtttatcaacggcaccattcctgcagccctccagacttcctgcccttagcaagtgcgcaaccagtcaggatctcccaaagaagataaagaccactcctcaccccagctcaagccatggcaggcgtggcaagcaaagtggggaggagacagtccctgcttgtgacaagtgtggaggtgaaaaggtacaatagtgcttgtctccgatagctccccacatctctaattgacttccacaaaatcgatgcgttgctttggtatttgcttggactgacatttgagggaggaggaggctgggatcctctggctgagaatctcctcagagcccagtgcagaagctgtgatgcttagaacctggacagcccgactgcctcaactctgtctccaggtctattccctccagctccaaaaggagcagccctacttctaccccttcccgtccccaaagtgtcagcaactttgaggagggcaccaggaaacaaagatgcctccccagccctgatattcttgatgtcaccagtgatacccactgccctgacccctgggcaggcccctctctgcatctactggagtggtccctgggctctggggctgaaggattccagcctctctgccagatattcagtactcgatctcaattcccctcttccacaagagttgggtgaccagctgtcctagtttgcccaggactctccctgttttagcactgaaagtctcttgccccaggaaaccccatcagtcccaggcagattgggacagctggtcaccttacgcaagagccaggctgaaacatcccctccatactcagctctttaacttttcttttcctttttcatcgggctctttcctaaaaagctgagctgtaaaatattttacatcgaggtataataaataatcatgtacatgttttaccaccacccaggtcaagacatagaatgtttcaacatttccatcaccccagaaactccccttgtacccccttccacttcgtctcccctagctcctagaagcaaccactgatgtgatttctaccaaatccagttttggtcctactaaatatactcttttgagactggcctcttttactcaccataatgcctttgtaattcatccatgctgttgtgtgtatcagcagtttgttccttttcattgctgagtagtattctattgtagagatgtaccacagtttgtttattcttctgttgatggacgtttgggttgtttctaattttgaatgattataaataaaaattctgtgagtgttcttgta

SEQ ID NO: 5623 - DNA, 26 bp, Homo sapiens
attacatgaaacacggcaagacacca

SEQ ID NO: 5624 - DNA, 731 bp, Homo sapiens
atgtgaagccagggcactgtgatagacctgtacccagccctgtgcccatcacctggctgagggctgtggctcttgccagggacgtgatctttcaaacctttcttctcctgggatccagtagaagctggagattccttaatttattctaaagggaaagggctcctggggccttggagtaaggggttgtctggagctggggaaagaggaatccctggagagaaaggatagcccctggaggaagggggttccagagctactgggatggtagggagtttcagactggcagctccggctcctttccgaccttagggcagaggtggtgacctccaccaccaccaccctctccccactgggtccgtgcgaggtagtgcagaattcggccccttggggcgccttaccacctctctgcctccgtccccgacttccaccccagaccgtcggagggctccgcccagagtctggtaagaggtttggggaagacaggcccctgggaagcagccggctttggggggtggggagagaaggggaggggctcgggcagagggaactgtgcagtccccaggccgccccggctccgggccagaggcaataaataaacccgatcctgccgggcacagccgcgcccgcgcctccggcgccgtccccgggctgacgggggagggagcggagaagcgagcgcagattctgcgtataaatcagctctggagcagacacagcccggctgtgaaaag

SEQ ID NO: 5625 - DNA, 985 bp, Homo sapiens
acaggcctgatggagcttgtggctggcctcagatacacctaagaagcttaggggcaaggttcattctcctgctttaaaaagtgcatgaactgtagtgctttaaacaatcatctccttaacaggggtcgtaagcctggtttgcttctattacttttctttgacataaagaaaataacttctgctaggtattactctctactcctaaagttatttactatttggcttcaagtataaaattttggtgaatgtgtaccaagaaaaaattagtcacctgagtaacttggccactaataattaaccatctacctctgtttttaattttctttccaaaaggcagcttgaaatgttggtcctaatcttaattttttttcctcttctatagacttgagaatgtttttctctaaatgagagaaagacttagaatgtacacagatccaaaatagaatcagattatctctttttttctaaaggagagaaagacttagaacatacacagatcctaagtagaaccaggtaattgtctctttttctaataaggaatttgggtaatttttaattttttgttttttaaaaaataacctagactatgcaaaacatcaaagtgaattttccatgaatgtttttaatattctcatctcaacattgtgatatatgctactaaaaaccttttcatatacatcttacctcatttcaagtgaattattttaatctttttctctctttccaaaaatttaggaatgtttagtgtaattggatttcgctatcagttcccatccttaagttttgatattcaatatctgatagatacactgcatctttggtcatctaagatttgtttacaaatgtgcaaattatttagagcatagactttataagcattaaaaaaaactaatggaggtaaaacctaaatgcgatgtgaaataattttagtgttgataccgtatgtgtatttttattctaataaacttttgtgttccagattgaa

SEQ ID NO: 5626 - DNA, 2683 bp, Homo sapiens
ttttatgtattttgggaactcctgccttatttatcctgcagtcacagacttgagagcaataaatgcaaacctaaatgagaaaatggaatccctgacagctgtgtccgtatcaagcatcagtctctcaaacagttgccccagcctgacagtgctagtctctgtttaatggtaaaaggagactttgccataattttcagatgaagatgtttcccaaacactgtttacagaatgagatgtgactctacagatacctcatagaagacaatccaagatcatacttcattaacttgacagagtacgtgtcttaaaggaagcatcaagaattcaatatttgcatttaaaaatactttttaaggccattttatattaagccagtgctggaaaactgaattttttttattatgtataataatctcgacacccagcttctggaattgctgctttctttttacagaaattactacccaacagatttcaggaagtactagtagttatcccaaaagtggaataagcatgtattcctaagtgtttcagaaatgttttatttcacacataagtcttaatgttattgttatgattatactttataaacaaccttttccagatgctacagggttttgaatctcaaagttaacatttttcattatttgtaatcttagaaccaaatctttatttattgtggtcactgttattaaatgatttaggaaatactttcaatattattctgaatggctgaagttagtcttaaactcaaattactatatgatgatttaaaacaaaataaaagagcgaggatgggggttggagtttcaggtttatgtcttcccgacatcacttttatcattcatgaaattgtcttaaaaaagcaagagactgcaaaatgtaaacagtaatcttctgtccctttaagaactgccaacaatttgtacaaaaaatgtggtacgttggttcctgcctccactccaggtcatctgtgtgtttagcctttcagggtaaactctagagggttcagtttataattcccacctttcacatatagttcaacaacattaatccagagagaattttatgttttatgatatgggttatgttttattatatattttatgttttatgatatgggttagggattctccatggactccagaaaccctaaaatacaattttgaggttttccaataataccatagcagaaatgtccaaggggttgggggaagatattactttgagaaaacagaaatgtaaaggatttttgaccttatatatgtgtgtggttttgtttttgtttttgttcttgagagagtctcactctgtcacccaggctggagtgcagtggcgtgacctctgctcactgtaacctctgcctcctgggttcaagtgattcttctgcctcagcctcccaactagctgggactacaggtacaccacacccagctcatttttttgtatttttagtagagacagggttttgccacattggcctgtctggtcttgaactcctgacctcaggtgatccgcctgccttggccttccagagtgctgggattacagcatgagccaccatgcctggcctgtatgtgtgtgttttaaagcactagatagggatggacattaaatctgtgttgcagggaaactaaacagaggtttccaaactgaaggcaacctaattgtaaatgcctgtgttaaagaggcagcttgactgttcatgtttcattttgcaaccattggttttgagattatcttttatgcacatttggagtcccttttcaacagtgacagtttcttacacgaagaatggatatggttattgggctcctctaagaatcagagtagggtaacaatgtaccaggcaaattgtaagttgaaattctagataagcatgcagatgacttacaatataaatgaagaataggaaacattttatcttcttaccaagtaccttactataagtaaacctaagataagaaaacccagatttacctataagattgttgggagttaatggtgtcaataaaaggattgatggtccctctaatgaaacccagtagatgtttgttgaattgaactgaaaatttatgtggccagacacagtggctcatgcctgtaatctcagcatttggggaggcaaaggtggaagtatccctcgaggccaagagttcatgaccagcctggtcttttgtagagaccctgtctctacaaaaatataaaaatcagccaggcgtcgtgcacacctgtagtatcagctacttgtaaggctgtggcagaagtgctttagcccaggaggttgaggctgcagtgagccatgtccacaccattgcactgcagcctgagtaacaaaatgagaccctatctcaaaaacaaaaaggaaaagaaaatatacatgatgggattcctattgtgaagtcatttaaaataatgacttgaatttctcagaaatttcaggagcatataaactatttaaatcaaaatattcttacatatagaaaccaagtaagaataaatgagagatatttcagtggacatctggacatatttatggactttgagtatctagcaagtagaaaggaaaaaaatattcatcatactctaatcatttttttatatctattgagcttgtttcttgtaaacttttctttatcttataaaggcatatctcgcttttgtatcgacctgttccttaaaa

SEQ ID NO: 5627 - DNA, 3476 bp, Homo sapiens
tttcaagccatggttggaacattcctacatctgttttgctgaatctcctagtaaaagtcatttttttaaagtaatattgtatgcttacaaaagctgtaaaaatgaacttttaaaactcccaccagcttttaacagtataatgttaaaaatatactgtaatttttgttaatctcaagtttgggtttttaaagacagcaagtctggtcattcagtttaaatgaatggttatactgtttttaatgaaataagccattttcttgttgttttcagtactacatagttggatttgtttgttctagtttctccagtttttgtcaacttattgtatggtaaaacatagattttttccccccaaacttctgttttataatatgtaatttttcatgaaaagaaagggctcagaaaaattaggatgtgattttggttggttttaaattactgtaagttttagattctaaggttcaagatttttaaaatttgatttaaatgaagaaatggatttttctctctgcccctccctgccattcatattttctgcataacactattaataatatcaacctccacagccccttattttattatttccaataattccaagttcatatagaactgataatgtagcaagccccaagtatgataataggcagactattcccaactttctgtctagtttccagccattgaagtgaactgctaaaaaaagaaaaataattgaaatgttgagagagatggttatgtaagttagtcctctgctgtttacttctgcaggagctgatccatttataaatgcagttttaataaaccatggaataccaaggcacaacatatcaaacacattggatcccacgatgttagacatagccatatctcctttccctacaaaagaaaagcatactgttaaaatgtgcttaccaatactgtgttttattaataatcttcataagaaaagaaacactggatacttttttgttgttgattcgttttgaaaaattgttgttagagcaaaagtcttactgaatttgtatttttaaatttttcttgggttagtatttaaagtcttaacatttatttaataattatatttattaaaccatttttcaataaggtatatagcttatttgttgcttttcattgtaatttaacatggttaatggttaattactatttaacacacatttcaaatgaatattatttgggggattagattgagtgaaattaacctgctattaaatagtaaacttttcctctggagtcacttttttcccccttcaaagtatgttactgaggaagtaaacttttttttttttttttggtttttgttttttgagacacagtctcgctctgttgcccaggctgctggagtgccgtggcgcaatctcggctcactgcaacctccgcctcctggattcaaacaattctcctgcctcagcctcctgagtagctgggattacaggcacatgccaccacgcccggctaatttttgtatttttagtagagactgggtttcaccatgttggtcaggctggtctcaaactcctgacctcgtgatccacccgcctcggcctcccaaaatcctgggattacaggcgcgagccaccacacccggctggaagtaaacatttttaaagctacttttactcattctagccttgtagaatgaccattgcagcttgagggacctagttcttaccttttcttgcaaccaacacacttgcaattgtgtctggtatgcttgttcctgctgctaataaagtaaggcccattactgtatcgggaatttctagtgtttcccctgtaataaacagatatttcaagttacaaatcttaaagattcactaaccatcctttgcagttattttggatatttccttcgtgaacaaaaataaaataggcacatttagaattcagagccaatatgtgcttgcttattagttttttagctagcaacatatttgaatcaggctggtaattcgggtaacccaggtagcacagatttttaatgacatatctaaagatacgtaacagctaaaattctgccagtgagaaattttcctgtttgatattcttacaaaagatgtttatgtccaccattatctcatcagggctgtgctgaatatttgataatgagactgatcattccgctttttctttcttaaaaatattagtcagagttaagcaaattaattatagctatctttaagctataaatgtgttaacatgtatatataccatttattatgttctactttagtgatataccttaatttagtgggctttggcagggcgggggagggggaacgttcattaatctctgaggaaaacaaaacctgttttctacttgagtctaacatatggtcccaatttattaatacttctgttaaatttgatgtcaggtcaacatttttcagaaatgtatttattctcagaaacagaaccagagagaagttaaacaaaaggttatgtaactgttcctttaatgttgtaattgaaaacttggtttagcgtcttttttttctttctctttttttttcttaaaatgccaactaaaataattagaaagtagcttatttattgcatgcttatacattgatattggaattggaattggttgttaatttctgttactggctttgctagaattcatatgtgcataaataacactaatatttatcatcttgggggctgttctgtgatctattacatgatttttgctctctttttatttttctagtatcaaatgtgttctggctgagtgaatttggatagatataatatgcaagctaattggactttttcatttttctcattaaaaaaaggaagaagtagtccactttttgctagcatactattctgagacttacattaatttgggaaaagtcaagggtcaacaaatttttgtgtctgtgaggggccagatagtaattatttaggctttgcaggctgtgtgatttctgttgcagttattcagctttgccaatgtagtgtgaaaacaatcatagataatatgtaaaaccttactaataaaaacaagctgggttatgttggcacacaggcagtagtttgttcacctctgctgtaagttaatttgggttaacctttgtaggagaaattacagattatttttgtctttgttcatagtttttttgtttagggactgtagtggattatggccaagcagcagtagctagttaagtcttaatcatgaaggtagtagaaacctagaataaaattattatgcccttttcactcatttcataatatgtttgtattgccgtgttgaaaagccaaataaaatacaatccagttaagcagtgagcacccattgttttcccaaaaatagagctccttgctttgtttttgtttttttgttcttttttttttttattatggaatggaattcaatataaagagtttattgtggaccccatggaatgtgattaaattattagcataataaaaagacatcctatgaa

SEQ ID NO: 5628 - DNA, 2682 bp, Homo sapiens
ttcaccatccagagaccaaataattaaaagaaaaacaaatatagataggtagaactatattttcccccaatcagaatcatcatatcataggtacaatctttcaccaagtaaatttgtataaataagcactattctttgtattaccaaagcaaggtacaggtgactaccctagttcaaaacaaccactttctcaggcttctcatgtgtgtagctaagctaccttgtcatatgtgttgattcttgaaaactgggacgtgtatttccattgggggttggccatttatgctgacatgccatccttccagcaaacgtacgggaatgtgctttcaattgatggactactctattttttgcaaatttgtaaactttgcttctccaaatacaagtactaggttgtccatttatggtacctatttggtgctagtaaattttcaaactagatttataaatgcactgtaatatgtacacaacttagaaaccaaattacaagtattcagttccaatacttcattaatttcaatcaaccaaagttagttcagtagcttatctcagttatgagtataatacattacatgtaaattaagtgtgtgtatactgtaatcgtgctattttttatcattgaaacatttataaactagaataataatgcccttaatgtgagggtttgtaatggtgcttattaagaccaaagacttgttaaatgtatacaccaagtggtaatgaaatttcggtgactggcccacacgtgcatagaggtctgggaggaccaggaaacagcctcagtggccagaggatcaccagtgcatccttcatcacagcatgtgcaatatgccaagattaccctcggtcattcctgtcaacaaggggtcaatgtcataaatgtcacaataaaacaatctcttcttttttttagtttaccccttggctttgtgttcttgcatggatttggggttggaggggccattccggaggctaaataaagtctcctggatttaaattatcctgggtctcttacttatggcttatgaaagtaccaaatgtataaccactagaagaaaatttaacatatgagtcgatcccttgttttatccattgaaagtagcagagtctggtgtcattaacctgacttgcttgtgagaaatttagattgtagagtcatttctgaaacatgacctaattcatcttgtgacttttaaatagtcttaaataccaagttcagtcattgtcttagagcacatgaatttcattataatagatttatcatgcccccctctcaaatatacacagttttggcaagccttaggtgttctgttccatttttttttcccctaaacatctttcgttagtcaatgctcatctaattacaaagggataatcccagactgtatccaattgctgtaacttttggtttcttaatgtcataatttttaaagtctgttttattttaagtgcaatattgagtatttagctgttaggctcaatccgtcgatatgaaataattttttaaatccctaagggcaggaaagcatttcgtggtagtgaaaataagaggaaataagatggcatgaaggtggtgggcggagaaactaggtaggacacaggaaagtgctctcaaaaatctttgaagagctcagctgaaaaaaatggagtagatttggctcatactattccggaaggcaaaaccagggtcagctgatgtcagccccagtttaatacacacggtcccaattatagagctactcactgaaagaatgggtttccttgcattgtggtgagctccctgtcacaagatagaagagtttcagtctaggcttaatggcaaccattggacaaagatgctttcttccacctaacaggccattaacatcttaaaggtatttttgtatctctaattttgtttataataggtgctcaacagaatgagctgaatggctgttacaaagggggtttgtaccttgggtaagagattaaaatataactcaaaatttccttctaacgctgcacctatggaaccatgtgatagaggtgtattaaaattgttatcgaagaatatatagcatatggtaaacaacagtttgcatatggaaaatgtctttgataatttaaccagaactgcattatattcaataacggattttctttataacaaacaacaggggaaaatggagttggcacacagtggatcactttgatatttttaatagtccaagtctggattttatttattcctgagccaacaattttgaacagcatattttccatgtttctgactgtaacaaaacattttcctcattgttccattgtaaatattcctcttgttggaactctttttaatcctgagatttaaacctgtacctttcaattgtctgtgacctttcaatttcactttcaatagttgaagaacttggctttgtaaatctctcagaagcttgaaaatatcttgtctctaccccctcagcccatttcatttgccaataattattttgtaagtagggttgaaatgaactcagctggccttgtgaaatgtttaaacttgcacaaacaactacatttttgttcaacaaatagcagtttactcagccaaaatcactttggatattgccattacaaatactgttaaacttcagaaatcatgtctgtaaattagatgagccaaaataaaggacaattgggttgatgctg

SEQ ID NO: 5629 - DNA, 98 bp, Homo sapiens
ttatggtacagtatttaagaagaatcattaatatattaacaaaaatggaagggaagacctcatactgaaaaaaattgtgagccctgcctcttttgaga

SEQ ID NO: 5630 - DNA, 2233 bp, Homo sapiens
cagtattgaagcaccatcacactgatatttcaagaaaccccattttgtattaggacacaaagataatttaaactttgtttgtagataaaatagagcacaaactgtgaagtgcatctttccaagaccatcatggaccaggtcctctataaaatgaagaactaacaaaaattagtcttcagaaatgaaaatcagaaaagaggaagagggttggtcattttaaaagaaattatatgtatgcacggatgtcactttttaaggccatattgcattgataacaagctaaaagcacaactaaaatttcacatgctaacgacaacttgaatgaactgctggggcagtggtatgtgcctttcaacttgataatttgggggacattttcatattgggagattaattctaagtatcttcatgttctatgactatagaaccatttgccaaaaaaaaaagcttttcttgctacaaaaaataagcaattttcttgagccttattgactttattacattttctgtttagcagcatttttcactgcaatgttaaaataaatatgacattgaattcgaactgtgtgtatgtcagtggaatcaaatcaaaagccactaacatggctgtctgtttcattggactgtcccatttgctggttaaaaggattggggcccaaatcctctggcctagcatttctcagtgtttgctattcagactgtctaaatacagcatgtgacaagctgaagaagccaaatctatcagtcatttctgatttcattatattctccccctcttcctgctaaaaagacaaaaaacaaaaaacaaaaaaaacaaaaaaaacctcatgagtgcatggatttaaaagagggcaaacaaaaccagtattcttcatatttactattcaaattggtttcattcttagtaaaagtacagaatctatttgaaattatagtaaaatttcttcttgattggctgacactgaatcatagtttctcacctacatatatccttagcacctcgtatagatatgatcagacaaaatgcagaaggaaaaaaaaacatattgaatgaagcacttggaaagattttccacatgtagaccaactggtaaactaacagagtgattaagcatggtgtacagaaaagcattacgctgagtcttaccagtgtgaccttcagcaagttgctgaatctgtttgggttccagtttccttggcaataaaatgagctaaatgggctaggtgaatttggaggactacttcagtcctaacttatagtatgagtctctaaaaagcaagtttttcatttgttagaggtcgttattgataaccagtctgtatagttaaggtaaaaaattaagcttttcttctatagtctgtgtccatactcacagaatgaatggcacacctgagatcaacattcacatagtttagactccaaaccattcagtctaaaatactgaaactttggaatatagggaatgatgataaaagtggatttggtttgagtagcagaaaactacttatgtccttttcttgcctttccaagaaaaatgttttttgtttttttttttaatcttgagttatctggatattgccttgactccatttcattttggctatgtagatacaacttagtctttgtgattgtgatatatttgctaagttttaaataaaacttcttttggatagaaatcattagaaaccaagcatactgcactctaatattttactgtaaaggcttatgatttttatttctactgccattaattttttagatggatttgtttcctcttacacaactagaattaatgtatttttcaccagttttccatataccttaggtcttgatcgtttgtccttaaaaaggggatcagcatgagtatagacagtagaaatgtatgggtagtctaaccacttttatcagagacagagcagggctgtggtctcactctagctgagcagagtattaacttggtagcaagagttcctgatacaaatagatgcaatgactgtaaatggtgtcagcagtacacatggataatcagtatttgactgtaatagtatagtagttaaatacagcacttaaaaataccacagacacagttaaagcaaaaggaaacaataaaaggaatgtctgcatgctattttaatctcacattctttatctgtcttaaagtggaaatccatttgcctataaatacctgtaaacgactttaaaaaataaatgattattgctttgtgacaattg

SEQ ID NO: 5631 - DNA, 3474 bp, Homo sapiens
ctcaggaaatgtcggctctctatctccagctgtggaagggttgcagccattaccttttatgcttcatctcaacattttgcactgtccagtatttaatatacgtatttaattcccaacaaatatttttgtagcttttacttgttatgatctgtagcttagcttttaattagtatctaagtgtctttctaagaactgtgtggaaaattcagatctgtttcagcttattttgtaatcaaaaacagtgataaaaagaagaccagatcttaaagaaaataaatttcaaatgcttacttaaaagacattttgaaagttaaagaacaaggttctaaggatagaagcagttatcagtgtttgcttcaggactccacctcctctactctaatttgaccaaaaaattgtttgggcttctttaaaaaagaactgggggtggagtcagaaaattaaatgaaaggctgagggtaactaagtccaccagtgttgtatgttaaaaaatcaatgcaacttttatgtggtccacaaatgtttagtcagaagtcactgattattgtaattaattagtgttgggatgggctaaaacagagccttcaaaacttcggctagcagtggagccaccatcttagattatagctagctagcctcatttgtggaaagtgatagatgctgtctataatagtgaacagtcacccatgataggacctccaggttctgtctcatatttgcttcttacttacctcaggaatgctcttgtacatagacttatttacaaaaagctaggcacatgttgacaggtgaataactgtaaccgattgtatgactgctgcacttacatgtaaactcttcagaaacagagtcttatactggtgtgttctcttgcatgcttctggttcaggactcttgatttgagatatggatttgattgagtatccaaacttgtcctgagtgcaaaactgtttcaccttttaaaaaatacctattttgcacctagccttgagcaccttccacatagcaatgaccatagttactgtcaggaggtcaaggaaaggaactttgcacaacttgtgacatgtatcctgataatcaaggcttagaggaggaagttttagaagataagagaaagttgttctaattgtgctgaaactattagatgatttagagtatacagatatgtaggtattaattctctattcactattatttatctctgcccttctctaggagtttgtatacctgcttaggagacaataaatgagctaaatgttttatttgctagtcagtcaccacctggacttcagtgactttacaagtttatgtaatggtggaagaatgacaaactatgtaatttttttgtcttccatccaactccccaccacccccaactgtcccccccacccccctcacacacatgcacacatccgtacgtgtgtgtgttttccacttacaagcttccataagcaggcacaaaactgagaaggaaggggtattatccctgccctgattatctggggcagggctttgcctcacagaggcaggagagaagaattgggcagattctttactgaactcattgggactactgtgctagttttgatgttttataatgctggcatttaattactggagagattggattcttggttgatgatttagtatttgtgaattgtgaaagttcaggagctgtgtagaaaatgttagtcaatcaactttattattgtgctaaaaggggacattcttatactgtcctgtctaaactgttctccagtatagacttcctaggcactaaatatccaatatttaaaggaacacagcaggtaaggaatgaagcctctgaaatagtactcatggatttatacatggcagatcttactgtctctacacatttggaagtgttcgttggtttaaagaaatgatagaggttttgaactactgacagtcttaaaagtgaatttaaaaactgttcatactttttatggtgtaaatttcctttgctcgatgtcagtgattcagataactcttgaccttgagatgatggcttttcacaggtttcttatattttatatctcttctgaacatgaattgtcattttagatttttgacatttgtatcaaaagagaagttgaggaaatcttcagaacactggtaacttttagttttgctatagacttcagaagtgtttatttatatgttcggtaaatgctctcgcatatgcagtacctcttctgccagcaaatccaagggaccatagcctttttatgagacaggtcacctctagaggacaacccaagaattattaaaggaaatgttaccattttgagagcatgcttaaataaatattaataatgtctttataacttgtttcctttaaattttggaatattgaattacaggctttggaggagttgtgaaaattaggaaagtttttatatattttttgaagtgggcatggttggctctttgaagacctataaagagatccagtgggaagagtaagggttggttcatcatcacaagaaataaaaaacatagtgattttttctcttaatgtgtagaggtggttttactggcaataattaataatagatttctatttcagtatgtaagcatattaactaaaatatgaattacacttccaaagttagatttctgcttcagtaggtttgtttgctgtgaagattacttctcaaaagacagatgttcatattagcttaattttcggtttaaatatgtttgtaaatgatgtaatatatttcttttgactaaatgtggaaaagtaatgtgtgttatacattgagaagtttttactggctttgactggaggttgtttttgcagagatggtattttatatgattccagtatttggaaaagaattagtcaaaaggaattcacatagtttaaatactgagaaattaatatccaaatatgtacttgtctgatttctaaataagctgggggaggagggaggggtgggaattgaaatgtgcaaatgagtagtgaatgctacactcattttcaactctttaacatgaaactgttcaatcttaacacattgttactttaatatatgtataaagaagtattactgtttgtaaagctgctgtttgcttaaaaaaaaaaaacacccttgtcatgtattttctgtatgttgggccaacaggttagaacatcaactcatttaaaaatttttatctttttttgatttaaaaaaattctgtgaaataatttatttacagacatcttcctcctccctcatcccttccaacctttacatacatcacagaatcaaccaaactgtttgcctaatctgaaatctgaatcctaatgagaaaaatttaaattttgttggcacatcacaccttgaaagtatttgtattattttataatttaatttctaaatataccacataagtttataatttaatgtcttaattgtaatgctctaataaaaaactagcaaaattagtgtgagttataacatg

SEQ ID NO: 5632 - DNA, 605 bp, Homo sapiens
cagagaacaagcttttacagacgtccttaaggcaacagtgcagagatgtaatccttaaaagaactgggaatggcaaaactactgtcggttgatgtgtcctgaaaattattggagttatggcagaagtgcttttttgatcaactggtttgtgttttgctgctgcatttatcccaagaaaaacagctttaatctccagaagaaaaccaaaataccatgggatttatgctgtattgacatcttgccctaaacgtacaacatcatagtaatttgtcatgggcaacatgaccagagagaagatttttgtcatgattttaaatacactgacacgctactgttggttaaatttaaacatgttttacctgcagaaattctctcacaaataacctgcaataacttgaaatgcatacccttttgaacacttccttttctcatgtataaattaaaatgtttgctgcattttgcaaaatgtcaattctctaaaaatgtgtccgtatatttctgtacctgcagtgtagtaaaggtttagacgaaaccccataattatagtggcatactgtcacttaggtttcaagcagcaaaataaacagtgcagctcagaaattgta

SEQ ID NO: 5633 - DNA, 173 bp, Homo sapiens
gagaaaccagaaatgaactctattcaagaataatgcatacaattcagtggtatcagtttaattgtaacaatatatttaattcaagtccaatccatgtaatcagtattaagagtgtgttttaccattcatctttaaaatcttcaaatcaataaatctcagtaagttattcttaa

SEQ ID NO: 5634 - DNA, 1955 bp, Homo sapiens
gtcaatatgaatttaaaccacgtagttatcttttcacttcaggtggagctgaaattctgctggctccagagtttgagatttgaggcaagaggtggggcaggcagattgcctcacttaacttaaatctgcggcagacaactgccagtgcccatcaaacaggagtgtgcgctatggaaaaccaggccagagggtcactgtctggtttgtgatttggtggacaaaacactcgctgttacaagtacagattttttttttttttaaatcaacctagataccaattgacctgaactttagaatcttatttatggagaaaaacttgtaaagctgcatattcactgaatggatcctcaggcggataaaagggtgcattttaaaggtatatatccaagctgaaaagcatgcctattgacagataaacatgtatctgtaagatcagcctttcccaaggtatacttttaaaatttaaagcgtgtactgtgttgctttcagactgagttgcatgtcactctttagtcttgatatctacctgtctgttcagccaggacaacaaatggcttccaagcctgaagaatacaaaagtgtgcttgtgtttctcatttttataccagtctagggacaaaggagactgaacatctttgcagcaggataggctggtaatttgatcaaatttattcaaaaagctctcagtctgtgtcatgtaaggacatgcttatgaaatgtgagagaggctcgccactaagtattctaaatacttttcaatggcttttctaacaacctcagtagtaatttgctgagcatcatccagaccattaatagaatcagcaaagcactggaatttcacactttaatgataatattccacatagtctatgggcaaatattttcaacatttccaatttttaaagcttcagaattgaagccaaacaaattaataaataattgttttaattactatttaaaaactcaggtttagattgtttaaaattagttgcttttgatactcagctgtcatgtttataattcaaacatgtagtaaacatatgtaggtaaggttgtttttttggagatgttgcagctcaaatttcagtccacatatgaatcatcagtgtattttccataaagtgattcgggcatatttgtgtgaaaacctcagttctgtcacttcttacctctataaacttggacgataatgtgccttctctgagactcagtttcttcctctgtaaaatgaggacatactacctacctcatgtggttggttgatgattgtctgtcaaagcacaaactctgaaattattaaaaacataattatttcataaacagatgagttaagttccagttaactcaacatcagtataacagagcaattggaagagaatatgaaaaaactggaatctaaatagtcagtgaggaaggctttgataaaatgaaattgccagaaagatataaaactggttagggtcctacagggaaataaaattataaccgtggaggtacatttctctaccagaaagcaaaaataaagcatcatgtcttaatggttttctacaaatcaacttctaattctacagagtccttaatctggtccctattaaattcttggtcagacaaagttacatttcccaagagagtcaggtgacacttgagtgagtttgatggataatgagctaatgtgatatctataggtcacaattttttaaaaccaaaattttcaagtctgggataatctttcctaaatgggatcaaatgaaataatatgtgtaaaagagtcaaatgcagtcctttaccatagtaactgcctatggacgttgtctttcccttacatgcctgcctacacttaaccagatgttggttttcaatgtctaatttgtcattagtttcaccacatttgctcactttttgtaacatttttgcaagatttgaaaactttcagtaaatgttttggcactattggt

SEQ ID NO: 5635 - DNA, 310 bp, Homo sapiens
acacagggccttcagccagagtctgaggatatacttcagggactctgtgaacccctcacaattgtatgccaactttgtgtgcttatgtgtacatgcatttttcttggggcgagttcataattttaatcaaattctcataggggttcatgacccacaataggatacaaacgaagagtttaagccagcatgatccagatgggttcagcagtctggtcagtgagaaagggccgagggtagacaggcagcttctgtggttcagcttgtgacatgatatataacacagaaataaattatgcttgtccctgaaaca

SEQ ID NO: 5636 - DNA, 1439 bp, Homo sapiens
ttgaaatgaacatgtagtttgattttacttttggtcaagaaagaatacaatcttgaactgtacacaacaaaggtacagccatgggaatacagaatgatagaagagactacagatggataattggacttaagccatgagctctgagttcttgtaacataaaactttactttagaagttgtgaaatgtatttaaaactgaattctgtaaatagtttttttttttttacagttccaaatgagttgataaagattgttgaagagatccaaaaccagaataagccactgtttttgtgaattctttttgattttagtacaaaccttaatttctcagaaacggaacagttttaagggtgatcgttgttggttaggccaaatgttgtgtaataattatggtggactgatgctggaattactcctgtaggtataaacctctgtatgaagagaagatttctcccaggaaatctttgtacagctttaagttgtgtcagattctctgaaaacattttttagaaagcaaaatttttatatttgttcaatttcagctatacccaagtagatttacatgtatatgaagcaaatatttttaaaaatttctgtttgtacatattctgcatgttttataatttcaaaatgcatcacttacataggtatttctcccacagaaatgatgaaagtgaccagaaaaaaacaaaaacaaaacccctttactctgtaggtcattgaaacgaagtaagctggcagctggttttattggaatgacagtgttctcggaaggagcagcctacaagataacttgaatttgccaattctgcaaaatctgtgcttttttgaaaatttaagagtggggacgtgaaactgtattctgtgccttccatcatgatttccacatgaaagcactttaaggcactgattttaagataatgtttttggaaaacccaatgcatatgggtttctgaaatattttatggacttatttctccccaggaaatgattcttacggaaaaaaattgcttttgtatgtagaacaggaactttttgtattacagtgatgcaatagacatgtctaatgtaacttctacttttccttttgaaagctcagtgtctgtgctatgacttgctctcatcacaatattgttgaattccacaatgtatggacattaaacactggcagactgttcactttttcttttttttttttggtaaaatattacttcaaacccctttttcttgctttatttttcagtgttttattgctttatgaactgtttaaccctgaaatccctctaggttatctatactgtataaaaaagcaattacccttaaaactgtactctggcctacttttctattttgcaattaaatatctttttcacatatgttcattgtagacttatgtttttatcacatcttattaacacattaaaaatgttatcctactgc

SEQ ID NO: 5637 - DNA, 138 bp, Homo sapiens
attcaattttttttgtcttttatatttattactgacagtattgttttgatacagaatgaaagtgcgtagtattttcattttgtttatttttgccttatacatatagcaagccctcaataaataaatattgaatgaatg

SEQ ID NO: 5638 - DNA, 207 bp, Homo sapiens
tatagctttgataacacacgagtcagtgagattccagatacttctgttcaaaatgctatggatctcctgttctatagctgccagcccttttccataccaatacaaaagcgttaagagccaggaaaatggtgtttcctgaacactgcaaaacaagcagtcagcatctggtggtagagttttgcttggtcattaaactcttagaactta

SEQ ID NO: 5639 - DNA, 1385 bp, Homo sapiens
tattaatattactgaatcattggttttgcctgcacctcacagaaatgttactgtgtcacttttccctcgggaggaaattgtttggtaatatagaaaggtgtatgcaagttgaatttgctgactccagcacagttaaaaggtcaatattcttttgacctgattaatcagtcagaaagtccctataggatagagctggcagctgagaaattttaaaggtaattgataattagtatttataactttttaaagggctctttgtatagcagaggatctcatttgactttgttttgatgagggtgatgctctctcttatgtggtacaataccattaaccaaaggtaggtgtccatgcagattttattggcagctgttttattgccattcaactagggaaatgaagaaatcacgcagccttttggttaaatggcagtcaaaattttcctcagtgtatttagtgtgttcagtgatgatatcactggttcccaactagatgcttgttggccacgggaagggaaatgacttgttctaattctaggttcacagaggtatgagaagcctgaactgaagaccattttcaagagggacggtatttatgaatcagggttaggctccatatttaaagatagagccagtttttttttttaaatagaacccaaattgtgtaaaaatgttaattgggttttttaaacattgttttatcaagtcactgttaagtagaagaaagccatggtaaactgatacataacctaaattataaaagcagaaacctaactcactcgtcaagggaagttaccttttgaggaaagttaaagtacttttttccctatctgtatctatagcaacaacccagaacttacaaacttctccaaagattttattgattgttatatcaaatcagaatgtaaacatgaactcttgcatatatttaaaattgtgttggaacatttgaacatgaatgctgtttgtggtacttaagaaattaattcagttggattatcattatgtgatactggcagattgcagtgcaaccttatgccaataaaatgtaatttaacagccccagatattgttgaatattcaacaataacaagaaaagcttttcatctaagttttatgctttaattttttttctttttttttctttttcttttgtttccttggtactaattttaatttttatttggaagggagcagtataaagcttatttgtatttagtagtgtatctcatagatacagacaaggcaagagatgataagctgtttaaatagtgtttaatattgattgggggtggggagaaagaaaaagtgtattacttaaagatactatatacgttttgtatatcattaaatctttaaaagaaatgaaataaatttattgtttacaga

SEQ ID NO: 5640 - DNA, 258 bp, Homo sapiens
tattatgtggaactgctataatgtgtcattgattttctacaaatagacttcgactttttaaattgacttttgaattgacaatctgaaagagtcttcaatgatatgcttgcaaaaatatatttttatgagctggtactgacagttacatcataaataactaaaacgctttgcttttaatgttaaagttgtgccttcacattaaataaaacatatggtctgtgtagtttccgagatgtactatatacagtatatttttct

SEQ ID NO: 5641 - DNA, 1277 bp, Homo sapiens
atgccttccctcctactggactttgctgctttaaagttacagcactcaaccatgatctgggtgagaatcaagaacataagcagaaacccttgtcaaagatgtccatgttctttcctgttcatccctctgatgctgattctgatgctgaactgagctcaggtgtgtttttcttccaagctttctagcaaggtttctacttaaaatcacctgtgtgcaagcccaaaggacatttcatctattctaagcagaaaggctgttttgttcattacagtgagtgctgttcatctcatggagtgggaggagcactaaaccaggagacagaggacatggatttggtttccagcttaaccagttaggactctgtcctctgcattctggaaccatgatgcctgcctgcctgcctcacagggctgttgtgaggaccagatgagatgatgtatgttcatacttttggaatctctaatttaaagtcttaatattttgtcttctgagtgtgaggggataaacctggatgtagactattaagcagcataggagaaaagaacaatagaatctaatggactgggtttgcaatctctctctaaatgcactgcttcagacaaagtgaaatccaaaggtgtgaaaaagtatagctgcaaattggaaaaatgtgtttcaagagtcgtctttttggccaggcatggtggctcacacctgtaatcccagcactttgggaggccgaggtgggcagattgcctgaggtccggagttcaagatcagcctggccaacatgatgaaaccctatctctactaaaattacaaaaattagccaggcgtggtggtacacgcctgtaatcccagctactcaggaggctgaggcaggagaattgtttgaacctgggagatggaggctgcagtgagctgagatcacgccactgtactccagcctgggcaacagagcaagactctgtctctaaaaaataataataataataataatttttttaaaaagaggtgtttttgaggtcttagatgttcaggttgatgatcctgcagagggaaactttccatgggggggtggggagagagagttttccatccacaatatagaaacagagaagcactgtgctccctctgcaggaccagccttcccttatctaaggggcatggagctcagggaggctttattccatatgcacgggagaatcaggcagaatgaacccctacccatctttcttggcttttcagtcattttgtgctgttttctctggttcattaataaattgaaactgccctcc

SEQ ID NO: 5642 - DNA, 1333 bp, Homo sapiens
agaaggctggtcagtacccactctggagcatttctcatcagtagttcacatacaaatcatccatccttgccaatagtgtcatcctcacagtgaacactcagtggcccatggcattttataggcatacctcctatgggttgtcaccaagctaggtgctatttgtcatctgctcctgttcacaccagagaaccaggctacaagagaaaaagcagaggccaagagtttgagggagaaatagtcggtgaagaaaccgtatccataaagacccgattccaccaaatgtgctttgagaaggataggccttcattaacaaaatgtatgtctggttccccagtagagctctactgcctcaacccaaggggatttttatgtctggggcagaaacactcaagttgattagaaagaccaggccaatgtcagggtacctggggccaaacccacctgctagtgtgaattaaagtactttaattttgttttctgtggaggtggaaaagcaacattcatagtctttggagaaatgcttagaaattcagcatttgacccttgctgtgaattaagcccaattaattcctgtttgtctacatatgatctgtctgtggcaaaagtttaatcagaggaaattctttcccagtctgtcgatttatgcctcagccacttgcctgtgctacaattcattgtgttacctgtagattcaggtaatacaaactatatataatcatcaagtaatacaaactaatttagtaatagcctgggttaagtattattagggccctgtgtctgctgtagaaaaaaaaattcacatgatgcacttcaaattcaaataaaaatccttttggcatgttcccatttttgcttagctcaattagtgtggctaaccaagagataactgtaaatgtgacattgatttgctcttactacagcttcagtgattgggggaggaaaagtcccaacccaatgggctcaaacttctaaggggtactcctctcatccccttatccttctccctcgacattttctccctctttcttcccatgaccccaaagccaagggcaacagatcagtaaagaacgtggtcagagtagaacccctgaagtattttttaatcctacctcaaaatttaacagttacctgagagatttaacattatctagttcattgaatcattgtatgtggtcatggataaattgcacaccttggaattcgctttctaaaggaaatcaaatgaatggaggaactttccaaacaccactttacttgtgttatatagccaatataactatctctactgaatgtcattgaaaaactaaaaaattaaacttatttacaaataggt

SEQ ID NO: 5643 - DNA, 1240 bp, Homo sapiens
agattggggttttatttttatatacatttcagttaaaaggcacactacagtcatcactaggcaattctgctttctaagcagttgtattgaaaacagagaatctctgtgtagaatttgaatatgacccaagctgagtattatctaaacaggttggtggaatgaatgcgcatgtaccttattatgctgacatactaaaaaaaataaaacctagtattgtatgaaggatagctattctttacagcatttagcaaacctgattcagaaaacatttgagattagcaaattagtaacttgaaataatgaaaaggacgtttataccaaattaaggaagaaaatgttgctgatttgggtttttcttcctgttcttaccactgactgaagcatgcctgcagtctcctcctctgttgaatgaaggataatcataaggtgtttgttaggagcgctagaccacctggaaaactttcttagctgtggagcagtgcgcagtgaccagttctctgctgtgagaggccgtttccattctttcctgctgaatatttttcctgttagtgtttatactgagctagtactgtaacttgcaaatgagtgcaaatttaaatgcaatgttttactcacaatttgcacattcacattttttggactgctagtttttctatttaaatatttgccttcatgttaggaatgtactatgtgaacatgacatatttgtagttaaccaaacacaccttcttagtccagtttagtactttttcttttcgtgtattcaaggttaaacacccaaacatttaaggatatgttgaaactacaccaatagagcatttcatatcataattaaaatgaatgttaggcttcttgtggccagttaatagttgatgagattggtgacattatttattgccacagcctattgtataaactatgcagagttaaatatttgcttgtaaaatattagccaatgttgtcattattttgatgtatttccttggttatgaccaaaaatatgttgagatactgaaactaatgtctgtgtgtttaaatgtttaccagcaaattgtcttatcatgttaatgagaatgttcaatgcctgtgtggtaaatagtaaatacaatggcataaaagtaactttctctgaagatgtgatgttcaggctgtgaaatatatatgtaaaagaaaaataaatgttatttgttagagtttttagtttgatactgtttttgaccattgagatttttaatttgat

SEQ ID NO: 5644 - DNA, 542 bp, Homo sapiens
gtgatttgggggcataactctaaccaaaattaagatatgtttggaccataaagaatccaacaactgaagattcaaaaacatcccttctggattcctatagtgtccatcttaaaatcataactaggtagttctacctgctgcagttgcactgaagtgattagttccctctggctttctataattttaagtctttattatggcatgatggcaaggttgtagcctaaagctcatcacttttgtaggtggtgttagtttttagactagcttttataaatactaattgacataaagcatcaaagattatttatatatttaggctaaaaataatgtttatctccttatgcaatcctgattatgtgaaaatatggttgctgtttaagtgatgctgaatttgctgtgtgtttataacttaagtgctatatatatatttcgatatgtcttacatattctctattaatataaagaaccaaattttgtctgctattttgtaaaaataaactacaaaagcctgaatgagaaaataaactatgttttcaaacttg

SEQ ID NO: 5645 - DNA, 128 bp, Homo sapiens
agtatgaaatatgaaaacattttatatattttattgtacagttataaatatgtaaacatgagttattttgattgaaatgaatcgatttgcttttgtgtaattttaattgtaataaaacaatttaaaag

SEQ ID NO: 5646 - DNA, 6414 bp, Homo sapiens
aagtgatgtccaggcaaaaattgacaatacatttcttgcccgaaataagaacccattatttccagtgagttactgaaaatacatttttaaagagaaagtactgattatctcccaaatgagaagtcattaactggaaatctccctagaatactttcatcactttggaaacaaagataggctctttcgtgctgtgttatctttatagcaacactcatccttaaccaactaggtaccgtgagtttacatacaggagaatgatggaaggaagggaggaaggaaaggaggagaaaaatgtgtcttcagctggcagcatttattttaaatccttagcactgagtttgaatggtataaaaagtataacttccatagatgagctgttgttaggaaggcaccaaagaacctcctctgcactaaacaggagaatggaaagaaaagtctccattgagtacatatcatgtcagtttagtaatcaattatgttgatattgttaaactggttcaaagaaataaactggcaatatgtaaagtaattcctcatttgtgtcactatgatatagagatattaaaggaatgttggtttgctaaatagtatagatgtccatttgtactatagtttactgagcattttaaattgctgctacatactgtcttcttaaaatgtaagtgatattaggcactacaataagtttctcttgtcaattctgtttacaattcaatcagatcacagttttaactggattatatgcaaatacctacagattcacctgcacaagtagcagacactggaaagtcatgtagtaatatgacaaaatgcttgacatttaggggtaggattagacaaagtggctattgttgatgtcattatttattcaggatgtattacattgatgtgctcattaattttccctgggtggatattgcgtcagggtacagtgttctgtgaagtgacttatttttaactaccagatctgattccttcagtgcatattttcaaccttgacaggttttctctcttcttaatttattaagaattaatctcggctgggcgcggtggctcacgcctgtaatcccagcactttgggaagccaaggtgggcggatcacttcaggttaggagttggagaccagcctggccaacatggcgaaaccctgtctctactaaaaatacaaaaattagccgggcgtggtggcacttgcctgtaatcccagctactcgggaggctgaggcacgagaatcgattaaacctgggaggcggagattgcaatgagatcgaaccactgcactccagcctgggtgacagagagagacactgccttggaaaaaaaaagaatctcactcactatctagagaggattgtcagaatattcacgattcaggtcttgaaactttgattatgcaaaagaaggtatataataaatatttcattatgattcagtttttaaggctttgcagcttctataagtgttctcagatgccactagataattttaaaagcatcatattagaaatactttaagaagacttatataagaaatagaagattgttgaattttacagaggatttggttcattaagacccagattctgtaagttttcattctgaaattctagttaaacatattcaccatttttcttaggaatcttatacaataaatccttcaggttgcacaaaagcaaattattagttttcattagaaactctggttctgaattacaatcataggttatataaatttaactgttagatggtctataaatcttattaaaatatgtgcaatatttatggaagtcaaacagcttcatatcagtgataaagattgttattaaaagataaatactgtctgttaatttacatgggcctcaagttcctcgtttataaaataagagagttggacactgattcttaacatctcctccacatttaaaattctctcttctcagcccttagattctagagagaaaaagctgcagttactcagtaagtccattctctgatggaaagaccagtgtgtagtgcctgtcaattccttaggattaatcaaatgtaaaatcacaagtttgtgtagctgtaacctttcttaaatgtacatgatttatgtacatgcttttagaaggtcctactatatttgtattataattagtttaagtaatttttattacatcatgtattgctttattcagtttgaatacatttatttatttatttgcagtatcaaccagaaacactaccaattgcatcaaattctcccagtttttcctggttgtcaatgcggttttcaatgcacaattaagtcatagccatttggttcgtaccaaatgtgtcagaatctaacagcatccgataggctgtaagttggggagttgctaagaaaatgcaacgtggtacaggctgtccgcctcagccctggaaatctcccagacctcccccagcttcatcctgtgtagcacgactcaacgtgcaccctgaatcttctcaggtcttccaggtcatgctgtagctgtcactgccatgcagcccttttttttactccggacagctcatgtactgaagcgtcatgaaagaaaggctgtggtctgagcccttctctcccatctcctgtctttgtcctgtcaagtgctggagccagagctcctacagctgcccttggtggtttctcctgttcagcgatggtggcacaaaggttctgctattccagggctccagcttcctcccaggtctacccagagctccagatgggggtctgaattaacctctcttggtggcctggagatttttagtcattgacaagaataccttgtaaccagggaaccccaaggcccagtaaatgattctgtataccattttcttgaaggtacaagaagattctgccgactatggggatctttgggccagtttgaggattgctttccctctgaggttctttctctctgtcagccacactttctcacccaacttcagacacaccctgccagcctttcccctactcattcactcttccccttccctcaacttaatcgtctatcccgttgcctgctgtttgactgtgcactgaaggcaggtggatggagtcagtcctcagttgcccctgctggccttcctggtgcttaccatcagcccaatctttgcacagtccttgttgttcttacttctctgcatgcattccttcagaagatcagtcatcaactttttcttaattcctctgtgacacacaatgggaattcaaaggaagagatcttaaaagtcacaacagttctttatcttaataatcccctccccattcaccttactacatgcagactcacctcacacccttacaacttgaagctgaaaatttaaaagtaatttccctttttgcagcttttcctcaggttaaggctttgatctgcctgagagtaactctaaaaggagggaagataaatatgggataaaatccacaaagtgtagcttctaattcctttggaagtttaaaaaatttccacatatctgatgcttcttttgtcaggtgcagaagcacaaaaacatattccgaagccaactgatagggaatttggggattattgtcagtttggagaatttgctgtgttatttcttcatttccatggatagctcatagttggctctttctgggtgagtaattatgtgtaatatagatcaaatcttttactaaggttacagctacatgttaggggaggctatgaaaatactatattattataatttcagtgcagtgattgttgtgagaaataactttcatggtaaccctaggaaaatgggcacctgccaccatcctgagaagtcctcacacaatgccctttctctcttacacacacacacacacacatacacacacacacacccccgtcactaattcatagagttccttagcaggcatagtcaaggatcctctgggtaatgtcagctgcttagtgataaaacagagccaaaactagtgcatcctgttgaaagtaatgcagaaacagtacctgggtccagatatgctttcctgcggcgctttcctctgttacctcgtttcatcctcacagcagcatggacggtaggtggggtcgcttctacaatcatttctgatgatagcttgggaatagagataggggcagtgacttgcctgatgtcgcacagccctctggctgtcctgctttcccatatggagcagtggtggtgtgggcacctgtgatgcaggagactttaaaaatgtcgtgaggtcacgtgctgcccctcctggtacgtgtggaatgcccctggccagcaaggggtgcttttttatcagagttggcagctggcatgtgggaaccgagcaagtgctgcgtaccaagttacttgttttaaggagaccaagtgctcagcgccaggtggttttcttttttgtcatagttacttgctataactcagcttgacttctgtcatgaatcagtgctctctgggaggatgcaatactctgtttgggcattaattggtagcaggttgtctcaaccaaaaagacaggaaacagcaaaagcctctctgaaattaagaggaaagttactctccccacacccatcagagtctttattggagccaccaggtgagctgtgcagcctggacaggcctgcagctataggccaccttcccagtttaggtcctcagcacaggggagcccaagtcactgggtgccttccgagggctgtcactgggcaggccatatacaagtcagtgtgtgcgtgggcactgcagtgtgtgcatgccgtaggtgttgatgggtgctaggaggggtgtcgtgtgcatgcgcgttgaagaggatctgtattgccgtgacctctgttcatggatgagtgcattgtaatttgttctcaggctgtgctgtgagggccgccttaacccttgctcccttcccttctagagctgccttaagttctccagaacttttcttctgtaaaggatatcttgcctggaagggatatcttgccctgtttctcaaggttttgtgagagttttgactggatgtggccctgcatgaccctccttctcctgtacttcctctttcctttccaaatgggaattagaactgtggggcagcaacagtctcagagccagtgagaggccagcttagagaatgcttctgagttagtgggactctgtgtcacaagtaagcaaatgaatatatgaaagaaattatggagataagttagattcttggtaatacttaaatgtcttgctttctactaaccttttgttactaaaggtaaagggtataactcaaactttttgtggacattcttttcaaaattttttaagaaccctgtactataaaaggttgagtaaaaacaggaaagcgtgctataagttcaaatctgttgtattaccctaaattagataaaccaacctgaattatagtagatttctcaatagatgaggaactgaaaaatactatgtaaaatatcttccaaaatgctttttatactttttttatttgtaatttggtctatctaaaatgttcgttagcttaacttaatgggcgttattggattcatatgactaacgtttcctcagtattgtaatgcttgaaatatttgaaagaaaaaatgttgttttttagttgaaactggtatatataattcagtgcttggcaggttagtatatttttatgcatttttcagagtcagcagtttcaaatcttattgttatcatgttataaaattttagcccacatttcaggctccgtaaatcatttgagccattattttttcccaacaaatggtgaattttttctttaaatgtggatatatatgttgtaatttatgattcctggttatgtatttttgtgggatcctgcagtaaaattgacttttttgtgtctttgggagatttaaattgcgctaacagtgttgcgcaaaaatgagttcatgccatttaacatattgtattttaattattaactgtattaatttactatgaaatggacatccttttaactaaaatggaattgaacattgcagttttcaaatatttttccttgttgggtctggaaaaggaattctactttgatctgcatagaaaattttgatacaattttttgaaagttcttaggtgaaacatttacccattaaaaaggaagcagaaatactgagacatgaaaggcattatcaactaactctagactctagaacccattctagcatatctcacgtgcaatttttaaaaataagttaataattcatctcatatcaacaaaagcctttgaaacatgggttttcactagatatcacctagtgctaagataaaaaccaaaacaatatcagaattacatttatgctctaaatttgtagttgtccattgttgtgcttagtaaatgtgtgtcattaatgctgtattctcctagctattatggaaacttgtttaaataaagatatggatataaag

SEQ ID NO: 5647 - DNA, 221 bp, Homo sapiens
gttttaaaacttttaacccgcttctacctgcccaactgtgaccaactaaatgacagatgtgtgagaacaagaactgagggaaagcaccttcccccaccccagacgtttttatctgaatgcatacaaggagtcctgaggtggtgatttggccagtgttttaacttgtgacaagtactcaggtgtgaggacaagaatgcaaatggctcttccttgagtgaaag

SEQ ID NO: 5648 - DNA, 1831 bp, Homo sapiens
tcatcttctgacagtgcactcatgtatacctgagaatttgaaatcttcacatgtaaatagatattacttctagaggagcttagagtttattgcagtgtagcttaggggagcaacccatggctcacaggtcactaagcgtctccaatatgactattaaaactgtcacctctggaaatacactagtgtgagccttcagcactgcgagaataccttcaagtacagtatttttcttttggaacactttttaaaatgtatctgtttttaaggttattctaaattatagtagcctcaactcattctgtcaccagtagaattcagcagttaatatattccatattatttctttgaatcaattcattttcagagcactttaaagtctgatatttctcgatgtgcactgtgatgcctggaaccttcctctggaagtgctgattttatggactgaggactggtgactggtctgtgatagaagcaaattccaattccaaatgtaattagacaaaaatcatttttttagaatgtgtttttattgtaaaagtatctttttcagcttcctgttctattgtcttttttcagatacaacatttttgtctatggtgaactgctgtaaatgacgcagagaaatgcctaaaaaggacaggtggtttgactcatggatgatgatgatgtcactgtgccacttggacagggcgttttctctgaattgaagggaaagccaatggtgtttgtaaacaaatgcttctgagagcaaagaaaagtcttctgtgtgggaacacaagatagtaaacttatttaaaaacctattagtagaattagtggaaacacttaggttaaagtgaatcttgtccatataaattatattcatggccgggcgcggtggctcacgcttgtaatcccagcactttgggaggccgaggcgggcggatcacgaggtcaggagttcgagaccacggtgaaaccctgtctctactaaaaaatacaaaaaattagccgggcgtggtggcgggcgcctgtagtcccagctactcggagaggctgaggcaggagaatggcgtgaacccgggaggtggagcttgcagtgagccgaggtcgagccactgcagcctgggtgacaaagcgagactccgtctcaaaaaaaaaaaaaaattatattcatatgtattgcattgcaattataattacatatgcagattgattgatagtcatgaataataacgtctgctcctcttacatagaaaaacgatattaaaagaagatcttctctttatttgagactcagaattccttctagaagaaggaagtgctttttgttataggatcccttcttttcctttttttgtttttttgtaagatgtagatgcttattctttgctttagaaaacttctcacttaaaaagatggcatgcacctaggggaataaaaggtcacctcagacaccaggtgtcattcctggtgaggcctgcctcgtcggtggcctggggtctgccggcaggttctggctgcacctgaaggctgcgtgcaccttgtcccctggacaggtctcctttcctggccctgctccagcccagcccttcttctagtggtagctctggctttgcaggcccagctccaggccctgctcctcagagagactcttccagagctggagctgggcacagccataagacaggactggaccagatgctcctgtaaacatccaggggtgtgccaggcccaccctcacaactgcttgttcaggtatcgtgatgggccactcggtccaaaatcagccaggccatcttttccatcatctcacttcaaataaacataataattatatttgatcatttgc

SEQ ID NO: 5649 - DNA, 1579 bp, Homo sapiens
caggagaaaaagtcaatgcactttttcttcaaaagctaagtgaaggttcaatatgagggatgtgttttattaattggcagtggaaattggaatgtgatttaaggaagaaaacagacttttctcaaatggaccacatcatctctcactcacagtgacaatgctgctcctgtaattttgtaagaattcacacacaccagctgtatttggaaaagccatgtctcactctcgaatctcagctggttttcactgaaattcctggagggctcatattttcttccacgtgcctcttgatctgttctgtcttgtggcagggctctaccaggagggagtgagatctggggacacagtggcttccaagttttctaaggttcatgtgaaacctgagtacatttacaaagctgcaagtggattctagtgctgagtcttccaggaaaaaatcccgtttggccaccgtgacctgccaaaagttctcttgccccatgcctgctggggacagaaggttttcatgaactctttttactgaaaatgccctgcatttaaaaatgtttattttagacccttctaaatttttttttttttttttttttgagactccggagtctcgctctatcgccaggctggagtgtagtggcatgatctcggcttattgcaacctccgcttcctgggttcaaacaattctcctgcctcagcctcctgagtagctgggactacaggcacctgccaccacgcccagctaatttttgtatttttagtggagacaggtttcaccatgttggccaggatggcctcgatctcttgacctcgtgatccgcccacctcagcctcccaaagtgctaggattacaggcgtgtgccaccgcgcccggctgacccttttaatttttaagagtgttcaatccgagatgaatcatttgaagtatttttatatgtatatctatttaaaactaatatattattaaagcttaattgccatgccgtttatcttctctgaaagaacttcaaatcttacctgccaacatattcaccataatttttttattttttaatacctttcatacaataacttttttaaaacaacctcagattgaaaaagcaacctaaattactttcgctctctaatcagcatttcaatgtatttatttttaaattttctcaaaaagtaactaaaaaattgtgtcggaccctacttttgagaaatctacgtttcccaagttttatgggaactggctattccttgtcccggcacaccttctcattccttcctttcagagcctaaaacctcatttgataagcactcctagtctctggcctgtggatccagtgctattctgtcaccaacctaagaatcccaattgcaccttctgtttctgacagtcacaggtgacagctgtgattctataatacagactggtgtcttagaggtaggaataatacatgattatgaagcatcaccctgctaatacataataatgtctttttatattataagtgattgagtttagttcatttcaatacattgtacatgaaaaaatgaaaagtagaactttgtaatactttaatcaataaaattaattaccaa

SEQ ID NO: 5650 - DNA, 4699 bp, Homo sapiens
ttaagaggctgaactgcatgaatctgctaaatctcattatttctccttaatatgttacttatctactttttatttcctttcattcactagtcatttgagactgacagctttgcaggtagcagtagtgtgtgctgctattgtggaatatacgtgtgtagagtttttgattagtttaacagtgcactggtgaagaggacatgttagagcaacataagtaaactacttgaaaatagttgtatatattacctaacttctagtgtagtactggttctaacaagtaacaagcaagttttaaaattttaatgttttggctttcattacttcatcttaattatagctttgtatgttactcttatttaatataatctctattgtattgatttcttctgtatttaccttttggattttgtaaaacagaagtttaagaccacaagttagaagaaaggtcacatatttcaaacacaactagatggggctctgaaagatttgtatctctgtgcttgaacttgaatggccttaaacctgtttcagctttaacagtagaattttacttgggcaatatttgcccattctggtgtaacttatgtgactctagtgcttaacagctgccgttgaagctaatattcagttctgtagagttagaataccttttgttgttgaagatgtgaatgaagtatgcatgtgcattaactgttgaattcacttttgtgccatttttgtaaatacagtagttttgcacaacctctcacaaatgtctgtattaatttcacatacttaaaaagtagataatgtgccaaccagaagcacaagagttcctacacaaaactctgtaaatcattatagcttttgtataataagagtagtttacaatctcgggcttatagaataccaaactgaaatcttagttcaatctgccatagacttaagcttttcatttgttactaatatccatgacattcagtggccttgtgcaaatacgatatgttgcttaggcatatcttttgtcctatgcagaacctttcattttgatttttatgaaagttgcaattcatgtaatttatataaactttttaaatgtagaaactttttacttccacactcagttttggagaccctagaataaaaggcttcaatactctgcattccatgccctctgccacctgcttttttttcccctttgttctttgactcaaatggtattgagctgtttgttgtatatggaagcataggtgtctatatccttactcttttatataacacaataatggcgttttccttctaatttctcagttgttaacttctttctcttttttttttaggatagggccttgctctgtcacctgagctctagtgcagtagtgcaatcacagctcactgcaaccttactcctaggctcaagttaactattcttgatcctttattattactaatattctacaattgtttaaataaaaggaactttataatgaaacggttcggaatactggctcaagaacctatgtcaagatgagctgaattttggtaaattattttaggaattatgacaagctaattgaattaggcttgtgacaattagagtaatttacatgacaggtaaaactcctattaaaaatgtttagatgtttgcttctgtagatgtcactttagtaaaataccaatttagttttacttgtggcttatctagttagaacttagcagactttactgggacaagtttactgctcttgtaggagctcctctcacaagtagttgtaatgctgtagcatgatactcaggatcagtagcttgagatgctactatttttctcttcatctttgacttgcagagagcctcccgtttttggatccaggcatcttttctgaatcctggttccatcagtatacctgctctcctatgaccccaaatcatagtcaatggtgcctcaaacatagcaccttaagttaaaggctgcctagtgctctgaggaaagcttgctgattatcttcctgatctactcaccccaaaaggcagaaaagcaacacagtcactgctgtggtcatttgtaatgtaaagatcagttatatatatatatttgtaatgagagcaagtatatactcattatagaatcaatttaagaagtttaaaataacccagagtagaatttctatatctagtcttggtttttttcatgaatatttgcaagtaattaccattaaattcacacatgaaagattaatctgaaagatcagagaccatgttattcctgaccacgatagaactgctcctgtggtttgggacaagtaataaaacaactgcttgagttttgtttgtaaaatacataattaatatttgacctacctcaaaatgtattgaggatctgtgaaatgctaagtgcccaaaataaaatattgctgattgtctttttattaaaagtaaatttcctcattaagccaacctgccttctgtaagtcacagtgcttaaatctcaggatttttcattaggagagacctgtcgttaaggatttgtaggtataattgcttagcctccattattggtgcttgggatagagaggttttagatttttgttttttttttgttctgcctcaaagctcagtttattgaagacatttgtaagctattggatcatcacttgaatcaagattttgactagtgagcttaattgtccatttcttacaatttcaaagttacagtctcagaaatggttaattttaataactgtcctatcataaattaatgttggaataaattgaagttgttgataaatacttcatgaaaactaaagtctgaaataaattacttgttttatgtccaatagctactacatttgatagaacagttttgaggaacatttcattcttgaacgcagcatctgacatggttctcagcaagttggaatagtaaggattattggcttgtttcgatgagtggaagcggcatgtttgtagcatacaagttattcaataatcttgtgctgatgacctaaaaatatgtcttaactattcatcaaggaaagcctggtgaagcctttacttgttactacttcaacagttggaattagttgctctttttacttgatgaaacaaaactatacctctgaatatttatggatactttttactaaatcaggcttgtgttcttaatccaaattagtaaagttttatggaagctgaaatgtaatacagtagtctccccttatctgtaagagatacattccaagacccctagtggatgcctgaaacctcagatagtactgaaccctttatcaactatgttttttcagtctgacaaccaaggcggctactaagtgactaaggggcaggtagtatacagtgtggataagcaggacaaaggggtgattcacatcccaggcaggacagagcaggagatcatgagatttcatcactcaggatggcttgtgatttattttattttattcttttttttttttgagatggagtctcactcttgcccaggctggagtgcagtggtgcgatcttggctcactgcaacctctgcctcctgggttcaagcagttctcctgcctcagcctcccaagtagctgggattacaggcgtccgccaccatgcccagccaatttttgtacttttagtagagatggggtttcaccatgttggccaggctggtctcgaactcctgacctcaggtgatccactcgcctcggcctcccaaagtgctgggattataggcatgtgccaccatgcccggccggcttatgatttaaaacatgaattgtttatttctggaattttccacataatatttttggaccaaggttgcctcaggtaacaaactacagaaagtgaaattgcagataaaggggattactgctcctctgctctaaaattggtgtttgggtgatcagaagcaggtagccaatgggaagagcacttctgagtgataactaaagcagtttggtggccttttcacattctccaatgttcaaacatattttccactttccattttctctttcacctcattttgcctctctatcccccatccctgcttatttcttaagcccattgatggcactcattaaattgtatttagggctaatgagtcattgttccttaatatcgttttcaatatgccacaatttaggacacatttaaaattttctaaaacaatatcctaatcaatattgactaatttgagccacattcccaactctaactcagcacacactgccagtcttccccaatatctgtctcctctcaattccccaccacaccttataaaattgtaatcaaagatatctcactctgtcattgttaatctaagaataaaaacactgactttaatacggttttactaagtttcaaccttctaattaggtaggcctctaggtattctgcagatcactgctggtcttgatagccattaatatatgtttgtattatgttatttttcaactaaatcgcagttggaaaaaaacatatttaatattatgcccttggatctgttactgcatcactagcacttgtgatgcaatagaacacttcgcctgtactgaaagggccaagagtaaatgccttgttttgtttttttgttttgttttgttttgctttttgttaaaacatgtctatagagttggcagttaatgctgaatttgtcaaataccccttccaaaattatacttgtatttaaaaaataaatggatctacctaatttctattg

SEQ ID NO: 5651 - DNA, 833 bp, Homo sapiens
taaggagtgatgatttaaagtatttactcagtacccaagtttgcaagtaaaaattagcatagaatggagtgtaccaaattaacaatcaggagagtggattctctcctgttatcctggaccagtttttatgaaaggattcctgaaatgaaatccatatattccatgtagactggaaaaactcatgtcctaatcctttttgtactgttgaaaccacttcattggacatgttgcaatagcaaaacccccagttagattagtgtttacacattttctcagttatttaatatttaatgttttccttaatactcaagtgatgtttgtctctagtgttctaatgtagcacaaatcctatgtaaaatcatactatgtatttttgacattaatgttgaaatcaaatatatgcacaagtctttaattttgtgtaatgtgttaagtgctgttcatttaagttattgaaaatgagaataaaatgttgagcttctttaaaagtaacacactatgcaagcatgtgtactttttatatctctcatgtttagtttttataacaccatatccaggttgctatctcacatagtagtcctttaacatattgtattagcagtgcaatgtggactaagctgcttcactttccctttgcaagttcagatcatcatgcccattcatagccaggattccttatccccaaaacagttctatttttccttaatcactactatagagtctttacattaaattactgtcgtatgctagataattttctcaaattgttaaaagaatatgtactttggaaacaaattagtatttatattgtaaatatattcaaaaaaaactaa

SEQ ID NO: 5652 - DNA, 399 bp, Homo sapiens
aggaagaaccacaaactaaaacctcggtggaaaagctttaaattaaaaaaaatttttaaaagaccaggacctcaagatagcaggtttatacttagaaatatttgaagaaaaaaaagcgttatttatagtccaaagaaaccaaagacttagctcacctgcattctgactttgtttggagacacacacttcagcagggcggcgacttggcaagacaaatgatgagcaggaaaacaccactggatctcacaccttcaatccatgaccatcctcgctgtgcttggctgtttagtggtttggagcatagtgattttgagccattgagcggacatcttttaagatcgaactttctcatctgttctaccatgccacgaaggtgtatggtgtctcagtactaccacc

SEQ ID NO: 5653 - DNA, 2531 bp, Homo sapiens
atggaatctcatcagtaggagctgaatttggacaaattaagaaatccaaaagatgccatttgtttattactgtataaaagcattgttgttattggtcaagttattaggctgtagtggatttgctaatactttagccaacatgtattaaagtgattttaatacatgctgattacaatgcaatacatactgattgaaaatattcatattcatctaattttagaaaaatattgcctagatcattctctattcctgtttcttactttttctgttaatatttccaacagggaatgccagtccacagacacaaatttaatactgctttaaattttctcctatccttttagtccctgaattatataataaacaatgttaaaaccaatgtagtacacaatacttacttacaaatttaatactgcttcaaggtatttaatctaaaattttaccaactttgatttgtctggttaggatattttgttttagtggatatgctttaattcggatcaattactgcagtaaatctcatccctaagcatgaaatgttgtcaacaaatacccagttccatttagttatcaattagcccaaataagagatacaaagtataacagtgaccaaccttgtactgttgagttaatttgaacttctaatgacattgaggctaatgtctttagctcaaggttgatcttgttggccatatagatgtgaactagggaaggggaatcaacttacagcatatcacaattgatccttattaagtataaactcttgtaggtcttttcccagaaagaagcttgactagcaggaattctaaaactgaaatatatcaaacagcataaataggaatagacataaagtgctcttctattaaagcctttggtgatctatttactatgatttatattgtacagttcctcgatttacagaaaatcatcaaaattattaatctacatatcttatgtatataaatattgcctaatccatagaaaaaaggatataaagtattaaatatgtgatatatagctatatctatctatctatgtatctaatagggaagtccaagtcacttcaattgaagaaacatatctctgagcataggagcagcctcaggtcctatggtgggatgcagtggacaggagagggggaaattagaaaagagaactatataattgaaaaagggatataaagcattaaatatatgatatatagctatatctatgtatgtatctaacagagaagttcaagtcacttcaattaaagaaacatttttgagcatgggaccagcctcaggtcttatgctgggatgcagtagacaggagatggggaaattagaaaagagaactgtgtaattgaaatgacgtgggctgcacccttaaggaacttataattaatgatgatctgaataaacataccaggataaagatgtcaaatgagtgtgactcccttaaagtagattaaagtgtgcattctttgtttcctaaaatatgattttactgcttgaaattacatttgagttgaagtttagaaactaacatagcattaatatgaataatcatggaaaattattatcctttgaaaactgattgataaatatattccccctcctttagaaacagtcaaaagccacttcaaacaagtttcaaaataaaggaaggtagcaagttaggcgatggattatattttcttgcttgttgtataccagttgtcaaggacattataaggactcccaaaagcattttgaaggatggcaatatcaaataagtgtatgtcctctcaaatgaggcatttttaattgttaaaatctatttggacgctcaggttatgatatgtttatgaaaaataagcttcattatttttatagctacatcctattattcccttttagaaacaagaataacaataggttttaatagttgccatacttagcatttatcagttctaatgaaaccaatattgaatctctgataaatattttctgatgttactagctatgggaaattagaactggcacaaccctgacattactaagtggaaatgttaggatttttcggcatcgcatgttagaatctctaaaatttaaacattcctgttaaatgactaaggtttgcttttatcaatatgaattctgaaggccaatatcataccattaactatgaaagcttttaattcctaaaaatagttttagagatattcaagcaatgctctcctaatatccatacgcaagtgtgtttatgacacaaattcactagtctgtttaaaaatgaattctttatattgactggtgttccacatatttcagtaatttctgttatgagaggacttgaaatagcaaattgccacacagttaactggatagaccacgtacgtggtgatcataaccacttggtactacacccagaaactcaaaattgtctttctcctgatgagatatgggtgtccttttgtacgtctaggcctaggtaaccagtggagtgattatattagcaaatgtgtttgtatccggagtcttcctgtcattgtaataaaaaatttattt

SEQ ID NO: 5654 - DNA, 829 bp, Homo sapiens
aaatctctgtaaccatttcttttatgtacatttgaaaatgccctttggatacttggaactgctaaattattttattttttacataaggtcacttaaatgaaaagcgattaaaagacatctttcctgcattgccatctacataatatcagatattacggatgttagattgcatctcagtgttaaatctttactgatagatgtacttaagtaaatcatgaaaattctacttgtaactatagaagtgaattgtggacgtaaaatggttgtgctatttggataatggcactaggcagcatttgtatagtaactaatggcaaaaattcatggctagtgatgtataaaataaaatattctttgcagtaaaatattccctttgttaatgttatagaaggggggatacaaaaaggaactaacaatttgtatggcagtgtcagatatttttattttagtatttcctgttttggtttatttgcatcttagaagagcataatgacattgtttgatgaagcctaattatgctggactgttttgacctggtttaacccttctgataggtagttgtggatgctggggatgagaactgaataatctttgcctggagtgacactacactctagaatttccactttggagaatactcagttccaacttgtgattcctgatagaacagactttacttttctagcccagcattgatctagaagcagaggaatcccagcgccttttaaaagttgttatgtggttttcttttaaaaagctcctgtttttggaaagtagaatttatgggtacaacgtatgttcattatttgtacataaaataaaaccattt

SEQ ID NO: 5655 - DNA, 1903 bp, Homo sapiens
gaagtcaagtaagcgacatagtagttcaggtggcccatgcctgggatcttctctatgattgatacatggcacagtgagagattaatgggcattgtgtacaaattgcttctcaccatccccattagacctacgaataaagcatccggttctaaaattaatttgttgcagctttgtaaatatttctttaagattcagcctgagagttaggagaaatatttcagagccaaaagtgccttatacaaccttagcctattatagtaaatcattcaaggattcagaattttgcagtcacagaagagtgtatttattatgtagaatgaatgagggtactgtcacctgccttaatgtaggtaggcccagagtcttacatttaagatcttacatgcagttataaaaccgccacagtcttcaatccagatttgaagactcatgccataggtgacattctaaaataccattaaagccacttaaatgttaaataagaatatacatgcacatcagctcaatgtctttgagtattaattttatgtaagcattctatttaacatgaatataggacaaatcatggctatatctatagaccttggataaactggattgaccaattatacactcacggtgacttttttattggtgggaaggggattggggtggggcaggctggcttaatgtaatatgagcaaccaaagtgggacttctgtctccccgctatattcccattgctctgaatggttgattgaagggtcagggaactagattttatggctttagttcactgtgattgtacatttatacttggcctatgtgctggccgcacctgaacatagctggtgcttatgccgagttatttgcgatgagtaaatatttagtttctttttcttcatatttataatgttgatctggcatcctcaggctgcagctttattagcttataacttactcatctctatctttaccagcaggctctgtattgttgatatttgcaacttgttttgcttttccattggtggaattgaaataattagtttttaattacataagatgcctgtttgctatttggtggaagatagatgttcatattgaagcagtcacatttgtactgtagttcaataaaagaaaaatgaagtattctgtagcctatatttttcatagagctcatgagcatttactgtacttgctgggtcttgccaagatcatttattccgctgcattgccaaagtgtcttcataccaaattaaaggtggttttaatatatgtttcatggaagttgtttataaaattcaaaggtatttcatttaggtgaaaagtcttatttattaaagtggtttgaataaagtagatcaaaacttccagagatcttaatggctatataggaagaaatatcactcaccataatttaaataaagaataaaaatacttgtattttgtggtggcaaatgtttggtagaactgtaattagaaaaatacaagtatatttgcgtgatggttacactagaagcccagactttacgactacacaatatattcatgtatctaaactgtacttgtaccccctaaatttatttttaaaaaaggaaaaataaaagtatcatgaaaaaacctatttttttttccactgtccttccactactcccataacaaacttatccatggttggtaaaattttacatatttctatccttgaaatgaaggcttcttttaaattccaaagaagtcatggaggcctgtgcatttgaattgtatatgctagtgaggaaaagatttagacatttcaagagcagggttggccaggcgcggtggctcacacctgtaatcccagcactttgggaggccgaggagggcggatcacgaggtcaggagatcgagaccatcctggctaacacagtgaaaccccatctctact

SEQ ID NO: 5656 - DNA, 4259 bp, Homo sapiens
catttgtagattggatagcatttttatgatttgatgagtttcttgtaaggttaccgtttctaagagttgtgctttatggccactgagagaattcagaataaattgaaagatggagtctaaaaattattagctgttacaaatggaacatttcattataacgtgatcactttgacttgagcaaatggtttaatttttatcttaaaaatcagttaagaatatataaaatcctactttggccaagtttgtttcttttcattatagtttatatgaaaagatcaccttaagtgaaattattttcctttaatcttttatgtatttattcacttttggaagctaggaatgagcaacacaaattttactctgaagtcagaagagctcatatataataattctaatgtcccacctattttcacttgtccattccatgtaccagcttagttatgatacttagtcacataattatctttgataaaggtagaggcacaaagaggcaaactaagcaagtcaaattctaatgtgtgtacttcataataattttttatccattttcatctttatattctgtaacatgaaacttacctaatcttcaaatgttagcttcattttttacctttgaaatacttaatctttctgaataaatataatgtgtctataaaataatgagactgattctggtgtctttagtcattaagctggtatctagtcctataatgaacaaaggtgaagctgccttgaggagacaagtgaaaaatttttgcttcaaaggagctcacaagctaagtaaataaatgaaattaaggtatggggcatggtggcctcaggctgtctggaggtgtttggaaaggcttcttgagtgaggtggcctttgaactgaacttagtttttaaagtagcttttggaagagaaatgaggatttgctatgcagacagggaagggaatttcacttaaaaggaaggtcatttggagatgtgaagatacactgctttaaggaagcagggtagagctggaggataagagatgcagaccatgaagggccccattttatgctaaaggttttgtcctgtaggacatggagaacttctgaagaattttcaaggcgggtgggataagattatattgtattttagattacagtagtccccccttatcttcaggatatatgttccaagacccccagtggatgctggaaaccagggatagaacataattctatatatactatgcatgaatttctttttccttctttacaatctcacacataggtttgttcttactatagatcttaccaatctcagcatacttttatttctcttgagaaccttcaccctttcacttaaaggaggcgctttatagcttctctttggcatatccaaatgccagcatcactgttgtattttggggtcattattaagttacttaatcatccttaatccttatcttagggatacttgaacacaaacactgtggtaggataacagtatatctgattaacagactgctactaggtgattaatgggtgggtagtgtaaatacacaagaaaaggatgattcacatcccatgtgggatggagcagaactgcattatttcattacattactcagaacaggcatataattgaaaacttatgaattatttttttttaattatttgagatggaatcttgctttgtcagccaggctggagtgcagtgacacgatctcagctcactgcaacctctgtctcctgggttcaggtgattctcctccctagtctcccaagtagctgggactataggcacgtgccaccacacccggctaattttcatatttttagtagagatggggtttcaccatgttggccaggctgttcttgaaatcctgacctcaagtgatccacacatgtctacctcccaaagtgctgggattacagtcgtgagccactgtaccccgcctaaaactgatgaattatttctgaaattttctatttaacattttcagaccacagttgaccacaggtaacggaaacctcaatcacagaaagtaaagccgtggatacggtgggactaatgtattggtagcagcctagaggattgatgggaaaggtatgaagctagaaggtggtcaatataatacagacatgagctgatgaacatctaaactgggactatactagtaggagaggaaaggaaaaaacatttggaaaatagtaacattgatatttcttgtgaaggagaagtagaaagtaacagtgacttctagatttctgggttgggtcatcttgttggatagtagtaccactgagatagggaattcaaggtttggggcaagggtaattggagatgagaattgtgtttggaggtaactactgacattcaagtggagagggttagttggcagttagttctatggtcatctcttttgccgagactgtatatttatcagactcctgggagaacaccaacatccatggggttgtagggaaggctaaggacaggagtggggagtggtaccttgaaaatccaaaagccatctcaagtaaaaggaataaatgtgtcatgctttttaaaaagttgatgtgcggaaaatgttttcttggcttggaaactgggcggccaggggatgacagtatggacttccagtgaagtagtgacggaagcctgatcatagacattaaggaaagcggtgtaggtgttgtgagcttttgctgtaagaaaaagttgagacttttgttttgctttgtttgtgagagatgtgtatgtatttctgctgagtgataaagccagcggggagggactgatttttataggaaaggaggaaaaataatggaaacacatctcattattttattgtcacatttcttttctttgttatcttttgagtgtttcccttttttgccagtagagttattgtctattttttctttctataggacaaaaaaactaatacagactcctttatttttatatggatatactaggattgtaattcagatatttaatatcttttatcagtgttcagatcatagattaatggagaaaacatttaaaattgttttaaatttaaatacattgaactctaacatagatgaaaaatgtgtttactgctttcagtcgacctgataaaaagcaacgtatggtaaatattgaaaactccaggcatcgaaaacaagagcagaagcaccttcagccacagccttataaaagggaaggtaaatggcataaatatggtcgcactaatggaagacaaatggcaaatcttgaaatagaattggggcaattaccttttgatcctcaatactgattcacaattgagttaaattagacaactgtaagagaaaaatttatgctttgtataatgtttggtattgaaactaatgaaattaccaagatgacaatgtcttttcttttgtttctaagtatcagtttgataactttatattattcctcagaagcattagttaaaagtctactaacctgcattttcctgtagtttagcttcgttgaattttttttgacactggaaatgttcaactgtagttttattaaggaagccaggcatgcaacagattttgtgcatgaaatgagacttcctttcagtgtaagagcttaaagcaagctcagtcatacatgacaaagtgtaattaacactgatgtttgtgttaaatttgcagcagagcttgagaaaagtacattgttctggaatttcatcattaacattttataatcttacactcacttcttgtctttttgtgggttcaagagccctctgacttgtgaagaatttgctgccctcttaagagcttgctgacttgttttcttgtgaaattttttgcacatctgaatatcgtggaagaaacaataaaactacaccatgaggaaaactaaaggtctttatttaaaatctggcattgtattaacatgtaattttatactatgtggtattttatacatttcctcagtagtgatatttggtaaagcagttcatacagcttttttctaagttccatgaatcttacccagtgtttaccgaagtatttaagcagcatctgaatatttccacccagcaatgttaatttatctaggaaagttcagaatttcatcttcatgttgaatttcccttttaacttccgttcatagacatatatgtgacttccaattcgaccctctggcaagtgagtgtggaagaaaacagcagttcttttataattgcttgaaattaggaaagcgcttatttcctagaagcaaataaatgtttaagtaaataaaggctacattttgctg

SEQ ID NO: 5657 - DNA, 386 bp, Homo sapiens
ttcaaggaacagaactaaaatcttaatgactattagaagtaactaagtattgttataagttttttaaaaacaactggaggcatctttgtacatattatggccagttgtacagaatcgctttctgtttagtactttagttctgttgagggcaaaatattataaatctatagaaaataaactgtttgacttgaatcatttctgaataagtaaatctaaataagaatctattttaattccttatttcttcatattaatacatatgtatacttttttgtgttactgaattaagcttgcccttgtaacaaaatatgttttggtatagttaccaggacacttactgattaatttttaacaaggtagaattttaaaataaaagatttataaat

SEQ ID NO: 5658 - DNA, 278 bp, Homo sapiens
agcaagtgaagaatcacaaaagaagtgaaaatggccggttcctgccttaactgatgacattaccttgtgaaattccttctcctggctcagaacctcccccactgagcaccttgtgacccctgcccctgcccgccacagaataaccccctttgactgtaattttccattacctacccaaatcctataaaacggccccacccctatctcccttcgctgactgtcttttcggactcagcccgcctccacccaggtgattaaaaagctttattgctcacaca

SEQ ID NO: 5659 - DNA, 607 bp, Homo sapiens
ttctttcactggcagtgattcaggtggagattccgcattgaggaagtgtgaagaccctgctgtgtcatctgttagtgagcagacttcctccttagttctgcagccgccatctgccatgctatgctttgataaaaatgattttccaatctagacggccatgctcaggtattctcaccattaaatctgttcgaaggacaatgaacagggaaccaaagccttttgtgaaaatcttaatatctttatggggtattttagctttttttgaatgtgttttgttttttatttttaaacttgtgtaatttgaatgtttcattgtcagcaatgtgaaagaacggtcgagatgtttgactggattataaaatatatcactggagcaaagggaagacttttgaaagcccctttgctgactatctacctcagtttgcctcccggcaaactctgaagacaactttgttacctcatttgttgttatagtttatctcagctacataaccaatgatacttcctagtagtattgtgttttcattgctgtacgtgtaatgtgtgtgatcaaaggagtcatataggtagatgagtaagaatgtttatctgaagctctgattttttt

SEQ ID NO: 5660 - DNA, 2964 bp, Homo sapiens
attacaaataacaatctgtagtgtttttactgccatagttttataaccaaaatcttgacttaaaattttccggggaactactaaaatgtggccactgagtcttcccagatcttgaagaaaatcatataaaaagcatttgaagaaatagtacgacaacttatttttaatcacttttaaataatgtgttgcatttacacagttgtttcatgctgtctttagagttaggtgcctgcctaaagccaggcaccaccacacctggctttagagttcacacaataggatataagtcctgtatgacttaaatagtgaattttgtccttaacatttacctcttgtatagtatctgccaggcagttttttcttaaactactgagatgataactgtgaaatatttgtgatacgtgtcatgtgtgaaaagtttgatgcattttgagatggaaaactgaaatttggaaaaagaaatactttactattgagtaaactacaatatatttagtgctactcgcagctatttattattttgtagacctgccttatgcaccttactgcctagatttttgggaaaaaactttggaaagtgtgttacctatatttctagccaactaactcacagaaaaactgtttacttcttcactttcgaagtatttggcttttgttaatatgcagttttactaaacagatggttcataagacatgtgaagcaaattcatatttgcaatgggtaaaaagtattaaagcctttctcttgcctgcatatcctattgaccattggtatagtcatcactttttcatattttagtgtagttagaagaattccttcttcaaacattaaagatccacaaagcagtatttctaaatatgccttgaagaactaaatgaagtgtatagcacttgcctttactagatattctttacacttgtacaattatgtagtaaatgtatgtttacagggtttatcatgtttacagattaagctaatttctgtagtcgcatttttatatttttagtatcactctagtaaaaaaaccaaataatttgtttaaaataaccaaagagttgttataatgcataatttgtattaaatttattactatttcttatgccttttaaaatactgtttactatgaagacaatgtttttaattacaaatccagaattctgtaggcaaaatgctacagttcatatcttcctttaaccaaactgaagtacataaagaccatgtacatgtattcatcaaacgtttattgaatgctgcgtgcctagcgctgtgctatgctctggggtaagagttgtcagcttcagagaagctgagtcctgatcctcaaggaacttgcaaatgtgtctatgaatttgtaaaacaatcaaaagtaggcgtaagcagaataaggcaaaagggaaagtgttctaggttccagcacacctgcaaagataaagtgtgccaagactgtatttatatttcatacttatattgtttcatccttatattggaatgattatatagaaaatgctcttaaaaagattaaacctatttctcagtatggtatcttggtgatttaggaataattgtaaatatatgttacgaatcttcttaaatatatatatatacacaccctgtgagaactgtaaaaagtacctctggttcttggtttaagtttgttggggtataacatgatgagtactcattagcacctgatagaaatctgaaatgtgacagtagcaaaaccactttctactttccaaacaccacagcatcagcatggtttaggggaagcaattcacagattaatgtaccctgcgttttgtcttcaccattgtcaaccagcagtcaaggatgagcaccaggtatagtcctggtttgatatctcaccagccatgtgaactgaagcagcttacttaacctctctggattcatatttcttcatctgtcaaatgagagtaatcatgcccaccctcattgtcatgccagattgtcagaagttccagacagatgagaaagcaaaaagtactttgtaaagtgttatacaatcagaaggtgctttgtgctgaccgtcagattgtgtcaagtcaggtgtgcaaattgaccacactcccaaagaatcatttaaaagtaaagtgacttctaagagacaaggaagtaggaacatttctgatattaaatatataaataatatggatacacatgtgtatatctgtatatggatcttaccatcataattcattttcttcatatcagcaaagtaatagtaatgtgggccaatgcattttggaaatgtcctcattatgtagaatggaatgtgaaaattatttttgttaaaacaggattttgccacaattatttaaatattatgtttgtgaactatctaagcatgagaaaatacaaagctttctttgtatctggctgatactcatttggatgattctgtgactcatagaacatgatgttaaatgagaccagactcaactgccaccagtccccagctgcagaccttcatccccttcatctcccactaggggctcgtggtctggaagaaacatctatcaagcaacacagccccttatcccagatagaaaagtgtctcaaatgcattctactgcgggacagtcagtaggatcattttcataaagcaaggacatcatatgtttctagaaattacaagcatataactttagcctacaatctcttattaaaaatttttaacaaaattgtattacaaatgcatttcatcagaactcaaatttaaatggtgtttgttttgggtttttatttataatgctgaagttattccatataagtatcaagttaaacacaattcattttgattataaactatttgactttttaaaatcttctgacacagtaaatatatatatcaagattgatgtatcaaaatttattgcacactttaaagtgtaaaatcattttttaaaatcttgaatccacaaataaagttctattctgatttt

SEQ ID NO: 5661 - DNA, 2812 bp, Homo sapiens
attgtgttttataacatgtagcacactgtatctaaagacatatgtattgtatttgtcttaatggaagtgcctcccgcagcagaaatactattaattgtgacattttaaaagcgtttgctgcagaagtggtttcttcagtaggaaatggttagacttgcctcagttcttaacaagtgtctaaagacagtaggctgtagaagaacaagtattaggttttaaattttataatgtgccccatttattcacattgattgactatccagctgttacaagagcagtcgatctttattttgtgtaagttagtttcatttcatcagatgatctgcacagaactcagaataaaccatcaattttaggtataggctgttttgttgttggcattatcttttagatataaaatcatagctagggtgaactgtagacaagaaagtcttccttgaaacagggataatattcaggttattataaatatttaggcttgaagcatagagctactgtagggtgaaaaatctctgtaggactttctggggcttcagtaccatttacacccacgatgaagggcttaaatagaaaataatggaaaattaaatattactttaaggaaagcaaagctgcactaaaatttttaagggaaaaaaaacaagtagccatttatatttgtgaccttgcattaatatttaaatgttgattttaatatggagctagcacacatagatgcgcaggcacgcacacacaaaacaagcaaatgtaactccaggcatttgtaatttaatataataaatacaagcatgttagaaaaatgctttatgtcttattatttgttaagttaggggaatgagaaggaaaacaaaagcattctcttagtttcatcacaatggctgcatgtacatattgagattctaactgagatttactttgaaatttttcattaaaatattccacaataatcagtttttttcctcttcaattgagtgactgactccctcactcctcctgaatatagtaatgtagtttgatcataggatccctttgaaaaacaggaaggaggataacataaaaaacaacaaaaaacatttcaccacctaaggtctgaagccacaaatctttatatctctgatgaaacaaaggggatatcaatagtacttgaagaagaagagcattttattacttgcttaatttatttattgtgataaccacaattgcaaaagaagaactcaggatttgttttaaaatgtttctctctatggctcccattttgttttgtgaataattatttatgagttgcatgttgacacaaacctactcactggttgaaagctccatttaagtgagtttcaagatcactttcaaagagatttttaaattgccattgtttttaaagctaacataaaaccatttgctatgctaccttgaacctagctaagctttcctttaccttagtaagccaatcagaagactacaatcaatgaatatttagcaaatgtgctgaagggtttaataaggttttgttgttcaataaatttgcaaggtagggtattaacatattttgataaataaatggtgctagagttggcgcagaggtttatatattgatatgtcttagttattggcatttgtgtgtgtttgctgttatcttgatttcatgatttgttaggtatttttttcttgatgctagttatttcttcactgtacattgagacacagcactactgcacaccaaagtatgcaatacccaaaggaaactgtgtgatttctcctgacaaatgatgggagcctttctttatgagatactctgaaaaggagattttgaggccattctaatcccttgtttacattattagcttcctactaatataaaaataatggaaatcttttttgataaaaatattaagactggaggatttttaaccccttgtacagtattgcagcaaactctttaaatttggttgaattcgtccagcaaactttctggggttcatatattgcactaaatttgttgaacctgtggtaggcacatctcttaggataaatgcaaccaatacagtccacagattaaactttttaaatgtgtttcattatgaaaagacaaaatgtcatcaaagtgacagataaaattgtcttatgtagcaatgtgcattgatctcaatgagatatttctattattctcttacatgagaatattacagcaggaagaattaagtttagtttgcttcaccatgttaatacatgatcacaaaatgtgcatgagtgttattgacttatcttgtacagtactaggattcctgtaaccactcttttttttcttcgctgtattgaaactggttcagtgttaaccaggcaagcatagttattcacaggttatttactttatgtttactaattctgcttagttattgttgaatatgttctgttccagattatttttattgttttgatgtttaaaacattttgcatactgtttatcataaaacttcatgaagtaaataattttgcatataattgcaataagcactgacttttgaactgaaaagaaggaaagtgtttttttgtgcagtgcttctgaggttcatataatagtcttgtactataatgtgctttactacacgataaatgacaaaaacaagccctgtttcatgtttcatttagtgcaaaaagtcagatttccccagtgttttgttgtctgttgtacctgctgaaactacagtagttgaatattgcggtagcatttcagttctctttttttattaaagtgctcaaaaattgttttttaaatgttttcaaaaacaattaaaaacattttatattaaactga

SEQ ID NO: 5662 - DNA, 292 bp, Homo sapiens
tatcatcaaaattgggtaaagcatagattttttgcatgttaccactagatgtcagcataacttttgttttacagttcagtggcattaggtatccattgtctgtttggattttgtaaatcatcactgaatttcataacttgtaaacaattatcagatacaaattaattttaatcaagctgttatttttgtactgataatttcaaaatccgatttctacaacactacagagcactgtttgcatccccatcctcaagacagtatatttaccttgactaatacagaactctacccc

SEQ ID NO: 5663 - DNA, 1475 bp, Homo sapiens
gtagtcatccagtagaagcatagttagcatcagaaaatgtcaccatattttcgctagctcaagcagtaccccaagtaataactgaaggagctaactacccaacctgttaataacaggcagtatgcctaaataggtacagtaatgaaaactatactatcaaaatgtgaataaaattatagtcagccataaatattgcataatgacaaatatttaagattgcagacgggaccaggtattcttaattgggaaaacagtcaagtgaccatcatagctttttattctgaaaacattccttcatagttcagttagttaaaaaaaaacaaacattttttcctattacaaaaaactcccactttttttgttacaaaaagtaatagaaaatggtaatagttaacattcattgagctgttaatatgtataagtgtttgtgctaaatgctataggtaaattcatttcatttagttcttaaacatccccatgaagtaaacactattattatcctcattttttagttgaggaaactgaggctcatagaggttgaaagatttattcaagatcccaaagctggcagttgatggatctgggatttcaatccagcctaacccatagtttatatgtatatgcacacatacatacatatatgttgtgtataaatgtacacttttttagacatgaaagaattgccttagttgaacagttctcagattgtagtttgcaatcccctggggttccccaagaccctttcagaggtttgagggtcaacagtgttgtcattataatcaaagactgttttccttttccactgtgttggcatttgcactggtgatgctaaagtaatggtggataagctgctggtgccttagtgtgaatcaaggtagtgccaccaaagtgtacttgtagtttctgtattagtcacctgccgtgcactcacagtaaactacattactcaactgagtattacccagttatacccaatccctgatgaagtattaaaatgttattagttttattaactctctacacttgaatgtgtgttttttaaaatattctgtgtgatgacatgggtagtgtgcataaagtacctctgtgtctgaagtatgatagttgtcttgaggaaaagcacttgtgtgattgaattgtgaggtaaactacctgatttttttttgttgttacatgaaagaatgagtgacaaatctttaaagtatttacaatatcactccagaaaagaaaacaaatcaaataaatattgactcaaaactctccaagtacatatcaaaatctcaggaagggaaaaaagagtctaaagaacaaaatataacactattttatttcagtcatgttagttcagtttccacagtttgaactgggtatagattaatatctaaaaccaaaaaatgaacatgtgtatagtgatgctgaaaaatgtgcattattttttatttatattttaggaataataaagttagttattaaag

SEQ ID NO: 5664 - DNA, 1321 bp, Homo sapiens
aattagtcattttaagtttcagtgtaccaacgataagggcatttggaacagtgctatcaggtgagctcagtggtgctgttgtaggttcagaaatggaaatatgtaagggaggtcacacatacactttacctgtatgttcaacctatgttatcaaacaaatcaattcaccaataatagcatgattagtagggattcccaaaaagtttttaaaaacacgaacaggattttaatgataattaaatttgcagtggaaaggtctcatttaatggttttcaaggaaatgggatttggttgctgacatgaattgatgatattagtaatatttataaagcctttcaaacttccatcaatcctaagctaaaaatctttattacctgtatatccttttcagttaactgagaggaagggatttggaaaccatgtacttttggggagtaattgattaaaaacaatggctgattggcattgttaatgaaggctttatttgtgaggatgatgctggtaaatggagcatgcttagagtactaaattgatctaatgagaatttggatgaacataaacttaattttggatttaatataacattccagtcagacgcatgtaaacagaatatttgaatctttgtacctccatacaagtgttagcctgccaggctgtaagcttaccttaattaaactttcagtgaaagtggaattattaagatataaatttatatttgtgctttttgtcagtgtgtaagctgtgtagaaattctttgatgtattagttgtattaatgtaaagtagaaacccattgttgaaactcctgtagctattatgcttttaatattgttttaatgatcttccttagaaataggcccataaaaatggtctggaagccaaaccaaagtatggtataatgtagatattgtaaagcagtaaactgaaaacatgtcctggcatgtattcagccatgtttaagtgacttttctgtaattgtaaaataaaaacttcaaatgggacctaaaacagtgatgtaaaagaactggttttggaaatttagcctaatttatctataagatggctgctaaattgatttttcagttctttttatcatctagaatataatagatatagaaatgaataatatgaagaacagtagtttgctttgaaatactaataaacttttatttaaaatgcttcatttttacttcttaaaatgtgctttggattcttaaattttgtttcactgaatgttcaatgttttaaatggcgattaaaatactctgctgtatatagtagtttttgagtaaatatttgcaataaaaatctgcccccgaata

SEQ ID NO: 5665 - DNA, 1767 bp, Homo sapiens
gaaggccaagaaggaggatgaagcccagcctgcacgtctgtccctctctgctttctctgtagggcccagctctcaggaatacaaagttgagccacggtccttacttaaagattgaaaagataacatgtaggccaggcaggtcactgcacaactaaagcaaaccagctgggtacagtttcttggcactctgtaaggggccaccttaatcataccaaatattggggaaagtgggataaagggaggaggaggagctagcagacacatccagtatctccttctggagcacaggatgaaataagggagctgtattatttcatgtctttgtcacaaagaactttcctctcaaggaaaggtgacctttctcctgtcttcattttcctccttccaggccctcctcgctcacccacccctccctctcttccaaggagatgtcagctgagctcattctggggcagatgtttgggccgggaacaatttttcaaggttgtaaagccaaattatcatttcatgttatccatttcttcaaagcaaaacatgaaatggttttagctagagtcagaccagaatgaaaatgccaggagctggtacactacagatgtagtaagaacctgggatattcctgacccaatctggttttcttttacccataaataacatgaatgaaaaaagattgggacaatagagactggaagtcatcatgtgcagttcaccgcttctgagcttgctgcagttttggggtgtgtgtgtattagattccttctcagttattctggaataaggcaaggagtgggttgtttttcatagctagataagatcttttccaaagtttttcttagaaccaaccaaaaaacaatccgagtaggcccaagaatttgataatgctggatgccttgcagacatcattcagtttctaatattgggcaacaattattattaaatgaattatttctgtagttggaatctgtaccttctgaacctctacaccaataactgctgcaggtgtgattttggtctgtcacactgtacatctatcataatgtgccctgtatctattggcagtgaccttggaaaatctggccaagcctaggggtttccttttccatttgccaagttccattgtgccaggactgccgtgctccactgagctcctctgtcacaccccattcttgcccctcactgggcaggccatggcctacagcttgcagggagtaaagcaggcccgcctccctttcttcccatccacatactcctcttctgctttccagtgactccaccagtttgatgtgggaagtgttagcttcctttccttcttccatcccttcttccatctttccagctgtcaaatccaatccagtctctaacctaaatgcagatcatttatttaaaagtaccaaacataacccagagtatgtggaatatgggcaacatatatatagccttctgtatttaacgatcttctgcttcttaaccgtaccagttttctatttataactcttatctatccatgatgttttaaagtctccacttgctgttatttacaaacgacagtgcattcagcagcccagtgccgtgagccctgacagatgccgtatttctgagtgcttccatgtgaatgctgccctcctgtagcatgtgtccaagtggacatagccactaaccaactagttacctttggactgcaacaaaaaatgtgaaaatgaagatttatttcttttaatttacttaaaaagaaacctctgtgctagcaataaagcatttatattgtgt

SEQ ID NO: 5666 - DNA, 1236 bp, Homo sapiens
ctgcagcttttgccttggttcttcctagtgcctacaatgggaaaacttcactccaaagagaaacctattaagtcatcatctccaaactaaaccctcacaagtaacagttgaagaaaaaatggcaagagatcatatcctcagaccaggtggaattacttaaattttaaagcctgaaaattccaatttgggggtgggaggtggaaaaggaacccaattttcttatgaacagatatttttaacttaatggcacaaagtcttagaatattattatgtgccccgtgttccctgttcttcgttgctgcattttcttcacttgcaggcaaacttggctctcaataaacttttaccacaaattgaaataaatatatttttttcaactgccaatcaaggctaggaggctcgaccacctcaacattggagacatcacttgccaatgtacataccttgttatatgcagacatgtatttcttacgtacactgtacttctgtgtgcaattgtaaacagaaattgcaatatggatgtttctttgtattataaaatttttccgctcttaattaaaaattactgtttaattgacatactcaggataacagagaatggtggtattcagtggtccaggattctgtaatgctttacacaggcagttttgaaatgaaaatcaatttacctttctgttacgatggagttggttttgatactcattttttctttatcacatggctgctacgggcacaagtgactatactgaagaacacagttaagtgttgtgcaaactggacatagcagcacatactacttcagagttcatgatgtagatgtctggtttctgcttacgtcttttaaactttctaattcaattccatttttcaattaataggtgaaattttattcatgctttgatagaaattatgtcaatgaaatgattctttttatttgtagcctacttatttgtgtttttcatatatctgaaatatgctaattatgttttctgtctgatatggaaaagaaaagctgtgtctttatcaaaatatttaaacggttttttcagcatatcatcactgatcattggtaaccactaaagatgagtaatttgcttaagtagtagttaaaattgtagataggccttctgacattttttttcctaaaatttttaacagcattgaaggtgaaacagcacaatgtcccattccaaatttatttttgaaacagatgtaaataattggcattttaaagag

SEQ ID NO: 5667 - DNA, 953 bp, Homo sapiens
aaatgagctctctgccaaggttttaagataatttattgaaatctcctgtaaactttacttgactacttatgaagaggacctctgacttgcttgagagttctgtcagacttttctttttaaaaatttaacatgattgcttttctcaattttggagaagatgtttaaatagttctgttgtaacttttaatagttttgtgtatcattcaactttttttcttgcagcaccgaggcacatttgaaaagatggaattgaagtcgttttgtttaacgctgtgtgaatataaagagtagtttgcagctgtgtggtagtggtttaatttgcagccttagctctgtggtgtctggctctagagttacttctttttaccaagcattttcagcctccattttgaaggctgtctacacttaagaagtcttagctgtctaatttttagagaataagattgttcattgcatttctgagtattatgtaacctatttttgcagaaggtactgttacattaagtgcatctgtgtatcctggtttaaaaaaatgtaatcttttttgaaataaaccttcatattctgtatagttgctaaagtgttgagaacctttttaattgtaaaatgagaaccgattttcagtttagtgtagcagcacacttgttcaggtttgcatggtatgaaaccaaatagattcatgaaaccttggccatgaggtttgtttcacaaggttcttagaccgagttgtgcaggtaagtgcacttttaggtaatctgcactgtttgtttgatggataaattccatctctgggaattgtgtgggtattaatgtttccatgttcccaactatgttgagaagtggaaaaaaacccaggttctagatgggtgaatcagttgggttttgtaaatacttgtatgtggggaagacattgttgtctttttgtgaaaataaaaatccacacctggaagtgt

SEQ ID NO: 5668 - DNA, 1015 bp, Homo sapiens
ggtgcccgtgactctgacacatggggcagaggagctccaggcacagaccaggggaggggatatttaggggctccccttacaatccacaatgagcaattgcttctccaaggcctggagctattctggtaccttccccatggaggacactgaaaaggctgggttggggacagggagtatcactccataagtgatcctaaaaggtagcctcttcataggaacccaggaggacaaaaccaccatgcattaagatttatttattgtatttaaacctggtgagaggacaagtgaggtctgctcagaccttgtaggcttctatcaaaacagcaccctgcttgctcaccaggcctagagaatggctgtaggtggccgctgacaagtgcctttagttgaagagcacatttctttcatctctcttgtccatacctgatagacacattcctctctgccaccttccttcagggaggacccgccctctgcagactgggcttagcgtgagcaggcacttcccatgtacgtgccaagggtaagctggcctgctgagcccagggcgacagaggggcactggtttacactttgccgggaccatcagggccgccaagcaggtcaggggctgggggctgggggctgggctgctggctttgctttctctgggtcttcaattagaatgtggctggcccatattggtttgtgtttaaatgctgtacttactacaagaaggatcttttttcaagctgtacatttataaaaacagatcatatactgtatatataaaaatcttgagatggtagaaacatgtatgaatgtactaagtagtattccactgtactcattcataaggtaggttttcttacaaaactcacaccaggtacttaaagatgtgctctgcttttttccaactacggagtgtcactgctttctaggtcagtccctgcagactcttctcaactctttccctataggaaacttactccgcgtcctgcccccacctcctaaataaataaaggaatcggcgaac

SEQ ID NO: 5669 - DNA, 265 bp, Homo sapiens
atagaaaaaatatgacttttttacaccatcttctgttattcattgcttttgaagagaagcatagaagagactttttatttattctagaattgcagaaatgactacactgtgctataccagagaattccagtagaaagaaacttgtaactctgtagcctcttacatcacctttattatacagcatgaaaaaccataacttttttttaaggacaaaagttgttgccttcctaagaaccttctttaataaactcattttaaaactctg

SEQ ID NO: 5670 - DNA, 1204 bp, Homo sapiens
gtttggcatctagtccaaacaagactgaagaatgtgctgatggagcagtgctgtttctgcattcataatgcatttattggcccatatttttatgtaacctgttacaaaatagacttgactttttcataatggacttttgtattatacaagggactgttcactgctgtactggtttgcaaatttcttgaatttagctctttaatagctaactgtattattatcgttttatattttatattgctaaatagagaaccacactttatataaagtagtttttgcatttgtttattgaatgatgcatcttcttcggtgaaatatttatatgcataaatggcaaaggaaagaaataatatatatttttatgtcattgagcaatattttttaatgtgtacctgtcttatggaagaaatatgcaggtatataagaccacgattttctaaagtgcatattagaatttttgtttttgtaaatggttaaatacatttcctgggtaacttaggaaattaagtttttcataaggcaacagatggttaaactgattgtcatgaatacccaaagatcatgtatataatcgaagtgtattagtaccatcccaaggtttttttctcatttaacatatttgtttcataattcagcaagtacagatgcaagcgcattgcacactttttcctttctaaacttaaagacaagtcaaaaagccattcttagaactagaggatttaagagggtaggaattagggtttgtatatatgtatatatgggacattttatcttctggcccaaagtcagaactttataaaaatcttgagtttgttcactaatgtgaaataagctatgtgtccagggtattgctcccctgagtgtatatgagtgctgagtagtattgcagagaatgtgatgagttattcactgtcacaactttttctatagaaaacaggggctgctttttaaactctcactatgggcactttaccaaaatacttccatatcaattatttgaactcggtagttgtttgacctagttagatgtggtgtttattcaagtttgtatgaaatcatgtttgacaatactgtaaattaggttaattttgtaagtcttagcatcatcatattgtgctgttttggataacacgtttgttacaagcatttaaactgtttcatttggtagtacctttacattgaaataaattgtgtttgtgcctcc

SEQ ID NO: 5671 - DNA, 477 bp, Homo sapiens
agcccgacacggcctgagcgtccagaaatggtgctcaccatgcttccagctaacaggtctagaaaaccagcttgcgaataacagtccccgtggccatccctgtgagggtgacgttagcattacccccaacctcattttagttgcctaagcattgcctggccttcctgtctagtctctcctgtaagccaaagaaatgaacattccaaggagttggaagtgaagtctatgatgtgaaacactttgcctcctgtgtactgtgtcataaacagatgaataaactgaatttgtactttagaaacacgtactttgtggccctgctttcaactgaattgtttgaaaattaaacgtgcttggggttcagctggtgaggctgtccctgtaggaagaaagctctgggactgagctgtacagtatggttgcccctatccaagtgtcgctatttaagttaaatttaaatgaaataaaataaaataaaat

SEQ ID NO: 5672 - DNA, 4024 bp, Homo sapiens
ggactgtaccatggaaaactaaatttaaaaaaacagttataacagtgtttaatttagataagtttgagggaaaataatcagtaggcaagaggaacatttttcctgtagtagctagagtgccttgaaaaaatgtgttggctatgtgaaggaatatttcaactaaaatggaatggtatgcttttcacccttgaagtttgaggaggatcttgatatgttttaacattatcatggcagggaaatatataaagaagaaaaatatttttacattaaaccttttctaaaaattgtaaatagaaaaataatttggttttttatcaagaacaacacttatcgttatgtattgtgttagttatattgccagtctgttgcgactgactcaaaaagttaaatgttgccactgctgaagatgattatgagcatcgcaaactttgtttctgacccattttgacagtttttatatactcctttaaaatgatgaatgttacaggttaataaagttaatacctttaaaaacttggtgaaattccattacagaagccaaaaataaaaactccctgcctctgaaaagtcagattactgacttcttgtttggcaaccatcagtttgtttaataaaagaaaaaatttggtggtataacatgtttgatgacagatgcctctatctctagattcaagctgagtgttgaaatacactgctgaaagcaaagagataggtatgttttccagaaaaaaagtcagtgtcattgctccagatgacaaggttaatgtggtaaagcataagcttttttttttttttgagatggagtctcgctctgttgcccaggctggagtgcagtggcatgatctcagctcaccacaacatccacctcctggattaaagcgattctcctgcctcatcctcccgagtagctgggactacaggcacctaccaccaggcttggctaatttttttttgtatttttagtagagacagggtgttaccatgttggccgggctggtctcaaactcctgaccttgtgatccgcctgccttggcctcccaaagtgctgggattacaggggtaagccaccgtgcctggccagcataagctatttttatcctcatctatactgattgatttaaattttccgggcctgcagatgaatttggaaaagggcataatcaactgatgttgctgtagcaaatttggacttaagaaactacagacagggccgggcgtggtggctcacacctgtaattccagcacttcgcaaggccgaggcgggagaatcacttgagtccaggggttggagaccagtctgggcaacacagacctcatctctacaaataaaaaagttagccgggtgtggtggggtgtgcctgtagtcccagctactcaaaaggctgaggcagaagaattgcttgagcccaagaagtcaaggctacagtgagttgtgatcgcaccacagaactcagcttgagtatcagagtgtgaccctgtctcaaagaaaaaaaaaaacaggacaggcttgtttaatctttagaacccttacactaaaattttcagaaattatgtatgtcatttgtaaaatataagttttgtaatcctagataattgcttcacattgaaattttttagctattctgtgtaaagaatagctattcttttggcctaatttctgagaaattagaccgaaaaatctcctcaagtattgtaacagttgaaaatacttatattcaactaccaagttttgtttcattttgattttttgttataaaacatttttaagttatttgagaagtaattattagtaaaattgtatcttgataaatcatttcctcatcctgccattcccttttataaaacactgagtttttttattccttaagtcacatatcccagaaatgttttggttgtgaatcatttgccagcgagccaagggagaggcagggattcccttgaaatgtactcttacacttttttattttatttttaatgtacatttgtgtgcaccagaatggaatgtgctctttttaaagagctggacagtggttgcttcagacttctgaataccagaaagacttgccttttaatttttaaatattactttttacatcataaaatgtgttatcttatccatgtatttgaataacatcatatataaaggtagttttttgcttgtgcttagtgaagcctccttttttaacatacatttgatatgctttatgttctttttcttgatttttagtactgagaatttataagccaagaagtaactgacaatatgtttagcaggatgtaatcccagctacttgggaagctgaggtgggaggatcgcttgagtctaggagtttgaggctgcagtgagctatgatggtgccactgcactccatcctgggtgagagatcaagaccctatctcaaaaaatgagcaagttttttttttttttttaaatcagacttagggctagcaaggatgtgatcaccctggcccatttatacctcagcagtgaaggtgtaatttatacacacctctttgaaaacagtttaattcagtaagtgagtgcaactatgtgccatgcactccaaagtaggtccccacagttattctctcatagccttgttttttcagatctcaccatatttatttgtttctttgattttcttttcttatagattacaagctctgcaaggacaggggcatatttgttttgttcaccattaagtaataaacacctaatacagtgcctgtcatgtagttgcttagcagatattagttagatgcatgaatgtgtaggtatcaaagattttttttttcaggagatcacattctagtggaagacactatactgctttatgtgataagtgctttgataaagtaagcaagtcatctaaccagatcttggtagttaaggttttctgagatagaacttgagctgagtcttttaaaaatagtaggatttataagggaaaattaaaggtcttccacaaagaaactaagtgaaactaagcagcctatgaaaaggtgaaagttggagagattataggctatgaacatgggagatgagagagaaaactgcaggatagggacagaaacactgtgctaagacatttgaactttgtcctgtgcaatgtgggaaccagtagtgaaggttaattaactgacatgatcagatatgtatttgaaaagggctcttgttggcattagtctagagaatgcgatggagctgggaagcgaaagaagaaatgttgggagcctgtgttgtagtaactgaaaaatggcaatggcccagaattaaagcagcaagaataggagtgggctcaagtgatgtataaggaaaaaaaaaaaaatgacaactcagttttgttgttggtaaggagagtaaagtatggcttctgggtttctcatttgagatactgagtaaatgatggtgttaacccattgagaaaatagtgtggttagagtgggaagaaagttaatttaaaatgttcatttttttttttagtcatttctacttttggattctaggtttgtgtgctatattggttataaccaatttgctgaataataaattatcccaaaacttagctacttaaaacaacaaacattatctcacagtttctgtaagtcaaaagtccaggtctctcatgaagttgcagtcaggctcttggctagggctgcagtcatctgaaggattagtaagtcgctaagcccacacttaagctccacccttgaagggagaagtttggaaagaatttgtgaacatatttttaaatcacatatgctatgaacaggtttaggggagggagaggaaagaaaactttaacttttcattagcatactgcatctgtagttcctaatgggcatgttgtaaagatgttaagacgttttctatgcattataggtatatagtagtattttgttttgttctgtttttttgtttggtatgtagtagtttttaatcaaaccttaacgtatttgatattaagatttattgagtttcttgttgagatgtagaaataaaggggatccatttcatttatcc

SEQ ID NO: 5673 - DNA, 190 bp, Homo sapiens
atgttatcacctaagcacttctagaatgtctgaagtacaaacatgaaaaacaaacaaaaaaattaaccgagacactttatatggccctgcacagacctggagcgccacacactgcacatcttttggtgatcggggtcaggcaaaggaggggaaacaatgaaaacaaataaaagttgaacttgtttttctc

SEQ ID NO: 5674 - DNA, 2064 bp, Homo sapiens
tcacagacctcaggggctccaacagggagaaaaaacaatcactggtcttgtctataagtcactctgctttatcttgctaaagacaatttttcaagcaatcctttagttttagttttctggaatagctagtattgggttttctagttttttcaccttttagtttttactctaattttgtaaccatgtatatgctagcagtccacttctacgccaccacccaaatgggtcagacccttgaagaaacgtcacttcaaactcagaatgaaattttcattaatattaaaattgtgaagcaaaggtcaataggcttatatttaattaaagccttactgaagaataagaaatgagcttagaatgactagtgttctttgaaaggtttttttatttttgtttttttggggttttttttttttttgagaccgagtcttgctctgtcgcccaggctggaatgcagtggtgcgatcttggctcactgcaatctctgcctctcgggttcaagctgttctactgcctcagcctcctgagtagctgggattacaggtgtgtgccaccacgcctgggtaattttttttttttttgtatttttagtagagatgagtttcaccatgttggtcagtctagtctcgaactcctgaccttgtgatccgcatgcctcagcctcccaaagtgctgggattacaggcatgagccaccacggcccgccaaaaggctttaacccatgaacaaatgttggatcctgacattttgtttaagagtgatttgttcaataattgaactgagttaacattcttggtaaaccaggtaattgaatgaagaaaggtcactaaagggagaaatgacatgttttctattttcttttcatgaaaacactgtttttccccctaataaagcatattttactttggtgcttatttttcctccttgcagtctaataaaaaaatctggacaatcaaaccttaaaatagctacactctgccctctgtaatgtagcattcataaaaatttggaagtatttacatcctctttcaagatgagcttatatgacacaattattatttgctgatacatgaaaatactgcactttaagtttctcaagactctgaaatatgtaaaattcaatatttttatattcccagaaattgtttcttacaggttgaaagtcttttaagggcatcacaaattaacatttactcctaatgcacgcctagaatgtattttaaatacttactaagaagaatgaaaattctttggttgttttatatataaataaggcatatataatgacactgtgttctgtgagggagcaggccctgtgagaatcaattcaggacagtatttttttttgtcctttctccatccttgatcagagataaactattaaaactttaaaaaatactcaaaaatatgtaagttttttggttgaacctttagatttgctcataatgtttaacataacaacatttatttcaaatcactgaattcatggagatgtggacacgcttggtttgctctatttttgtttatgtgtgatagtggttctgtcatcatcattcatgttttttaaggcctggtcataaaactttaaattttactagtgttacttaatgtatattctaaaaagagaatgcagtaactaatgccctaaatgtttgatctctgtttgtcattactttttcaaaattatttttttctgtaaagtataatatataaaacttcttgcttaaattgaatttctatattagtggttaattgcagtttattaaagggatcattatcagtaatttcatagcaactgttctagtgttttgtgtttttaaaacagaattaggaatttgagatatctgattatatttttcatatgaatcacagctgttgacaatgtcccatatatttaagaaattatatcatactgatactatttgtaacattttgatttgatttaatctccagggacagaaataattcattggtaaagtgtaataatgcgttttttaaaaatgctttgagaggtaattacttgcatatgagagaaataaaacatttggcacattgtttacaggtgtg

SEQ ID NO: 5675 - DNA, 180 bp, Homo sapiens
atgtttcctaaactactacttgatttcatccttaaaaatcaaaacaaactgtggtgttaattgactgtgtgtgaattccattgtcaattttaatgaaattttctttaaaactctcacctccatctgaacttttcatagtagtgggattgactacaaataaaaacttgtggtattcctggt

SEQ ID NO: 5676 - DNA, 87 bp, Homo sapiens
gggcccagccctccccggggcgctctgccctggagactccggacactgacagccgcgtggtacagaataaacgttatttattttttt

SEQ ID NO: 5677 - DNA, 691 bp, Homo sapiens
tgattcaaacagcttcctgaattttaattttgtgttgtctcacagaaagccttatcataaattccataattctaattaatttaccaagataatgtaattacatttggttttgtaaggtatacagcagtaatctcctattttggtgtcagtttttcaataaagttttgattatgggcaaatcccctctttttctttttttaaaatatatttgagtatgccatacatttatatatatggtgtatatgaatttggtttaaacattttaaaatttattctgattagtttgtgtctttttttttttttttgagagagagagtcctgctctgtcactcaagctggagtgcagtggtgcgatctcggctcactgcaacctccgcctcccaggtccaagcaattctcttgccttgtcctcccaagtagctgggattataggcacacaccaccatgcctggctaatttgtgtctcattttcaagagtagaaaccctaaatattttattttcattccttttccaaattgctatgaatgggattaaaggattacagatgtaaagtctattatttgtgaattctaaatgtagttctgctgttgtacctgtggaaacatcttaaagaagtacatattttgcacgtcctgcacgtgtaccccagaacttaaactataattaaaaagaatagtttcaaaaaaatac

SEQ ID NO: 5678 - DNA, 2753 bp, Homo sapiens
ggtccccggagctcccgggcacatccaggaaggaccttgctttggaccctacacacttcggctctctggacacttgcgacacctcaaggtgttctctgtagctcaatctgcaaacatgccaggcctcagggatcctctgctgggtgcctccttgccttgggaccatggccaccccagagccatccgatcgatggatgggatgcactctcagaccaagcagcaggaattcaaagctgcttgctgtaactgtgtgagattgtgaagtggtctgaattctggaatcacaaaccaagccatgctggtgggccattaatggttggaaaacactttcatccggggctttgccagagcgtgctttcaagtgtcctggaaattctgctgcttctccaagctttcagacaagaatgtgcactctctgcttaggttttgcttgggaaactcaacttctttcctctggagacggggcatctccctctgatttccttctgctatgacaaaacctttaatctgcaccttacaactcggggacaaatggggacaggaaggatcaagttgtagagagaaaaagaaaacaagagatatacattgtgatatattagggacactttcacagtcctgtcctctggatcacagacactgcacagaccttagggaatggcaggttcaagttccacttcttggtggggatgagaagggagagagagctagagggacaaagagaatgagaagacatggatgatctgggagagtctcactttggaatcagaattggaatcacattctgtttatcaagccataatgtaaggacagaataatacaatattaagtccaaatccaacctcctgtcagtggagcagttatgttttatactctacagattttacaaataatgaggctgttccttgaaaatgtgttgttgctgtgtcctggaggagacatgagttccgagatgacccaatctgcctttgaatctggaggaaataggcagaaacaaaatgactgtagaacttattctctgtaggccaaatttcatttcagccacttctgcaggatccctactgccaacctggaatggagacttttatctacttctctctctctgaagatgtcaaatcgtggtttagatcaaatatatttcaagctataaaagcaggaggttatctgtgcagggggctggcatcatgtatttaggggcaagtaataatggaatgctactaagatactccatattcttccccgaatcacacagacagtttctgacaggcgcaactcctccattttcctcccgcaggtgagaaccctgtggagatgagtcagtgccatgactgagaaggaaccgacccctagttgagagcaccttgcagttccccgagaactttctgattcacagtctcattttgacagcatgaaatgtcctcttgaagcatagctttttaaatatctttttccttctactcctccctctgactctaagaattctctcttctggaatcgcttgaacccaggaggcggaggttgcagtaagccaaggtcatgccactgcactctagcctgggtgacagagcgagactccatctcaaaaaaaaaaaaaaaaaaattattctgtaccatcacaacttttcacaacgatggcaagccttatgtcttgggagcctgttttgctaggcaaagttacaagtgacctaatgggagctcaaatgtgtgtgtgtctctctgtgtgtttgtgtgtgtgtgtgcactcaagacctctaacagcctcgaagcctggggtggcatcccggccttgccattagcatgcctcatgcatcatcagatgacaaggacaaccctcatgacgaagcaacatgaattagggggcctcttggccttggtccaaaattgtcaatcagaaatgaacataaaggactccagagcagtgggactgtctgtcaaaagactctgtatatcttttgtggatgagttttgtgagagaacagagagaccattgtacctggcacaagggctgttcatgaaaagggagacttactgggaggtgcaagacagtggcatttctcctctcctcttgctgctcagcacagccctggattgcagccccgaggctgagaccagacaaagcccgggaggcagaaagatgctccaagaaccaacactatcaatgtctttgcaaatcctcacaggattcctgtgggtccagctttggaactgggaaacctttcttcggatccgcactcattccactgatgccagctgcccctgaaggatgccagtactgtggtgtgtgagtctcagcagccgcccacacgctcctaactctgctgcatggcagatgcctaggtggaaatagcaaaaacaaggcccaggctggggccagggccagaggggaaggccctggattctcactcatgtgagatcttgaatctctttctttgttctgtttgtttagttagtatcatctggtaaaatagttaaaaaacaacaaaaaactctgtatctgtttctagcatgtgctgcattgactctattaatcacatttcaaattcaccctacattcctctcctcttcactagcctctctgaaggtgtcctggccagccctggagaagcactggtgtctgcagcacccctcagttcctgtgcctcagcccacaggccactgtgataatggtctgtttagcacttctgtatttattgtaagaatgattataatgaagatacacactgtaactacaagaaattataaatgtttttcacatc

SEQ ID NO: 5679 - DNA, 463 bp, Homo sapiens
ccgtgcgggtgctctcaccctcccttctctccctcaataatgctcacttctgatttgatgttgatatacttttatggtaactacatagatgttataagaacataaaccaacattataaacaatggccacatttagttactctaaatgtaacaaagaaattagatgtttttatttttctgtgattgtacaaaaacaacaaaaacgaagtgctctcagtcaggtttttccctccatatttttggtcacttttgataagtttgcatgaaaccattttggtgcatttttagttgggaatggtacatttttgtaaatccacccagtgaacatgaaattgtacattgtgtataattgttcattagaaaggacagttttacatgaatattcatatatttattttgttttaatttgaattgcctgttcagggttccttatgcagagaaataaagcagattcaggaattgga

SEQ ID NO: 5680 - DNA, 1484 bp, Homo sapiens
ctggcctgacctgcagtggccgccagggaggtctgggcccagcggggctcccttctgtgcagacttttggacccagctcagcaccagcacccgggcgtcctgagcactttgcaagagagatgggcccaaggaattcagaagagcttgcaggcaagccaggagaccctgggagctgtggctgtcttctgtggaggaggctccagcattcccaaagctcttaattctccataaaatgggctttcctctgtctgccatcctcagagtctggggtgggagtgtggacttaggaaaacaatataaaggacatcctcatcatcacggggtgaaggtcagactaaggcagccttcttcacaggctgagggggttcagaaccagcctggccaaaaattacaccagagagacagagtcctccccattgggaacagggtgattgaggaaagtgaaccttgggtgtgagggaccaatcctgtgacctcccagaaccatggaagccaggacgtcaggctgaccaacacctcagaccttctgaagcagcccattgctggcccgccatgttgtaattttgctcatttttattaaacttctggtttacctgatgcttggcttcttttagggctacccccatctcatttcctttagcccgtgtgcctgtaactctgagggggggcacccagtggggtgctgagtgggcagaatctcagaaggtcctcctgaaccgtccgcgcaggcctgcagtgggcctgcctcctccttgcttccctaacaggaaggtgtccagttcaagagaacccacccagagactgggagtggtggctcacgcctataatccctgcgctttggcagtccgaggcaggggaattgcttgaactcaggagttggagaccagcctgggcaacatggcaaaacgcagtctgtacaaaaaatacaaaaaattagccaggtgtaggggtaggcacctggcatcccagctactccaggggctgaggtgacagcattgcttaagcccagaaggtcgaggctgcagtgagctgagatcacgccactgcactccagtctgggtgacagagagagaccatatccaaaaaaaaaaaaagttgccagagacgagtatgcccatgctccctctacctcactgccaccactcctgctgttaggagctgagtgtgtctccctaaaatttctatgttgaagtcttaacccttggtaccacagaatatcactgtatttggagatggggtctttagaaaggcacttaaattaaaatgagctcactgatatgggccccgatgcaatataattggtgtccttataagaaggggaggttaggacacgcaggaaagaccacatgaaggcccaggagtgggagggggaatagccatcgacaaactaagggggcctcagaggaaaccaaccctgctgacacctcaatcttagactctggcctcaaaaattgtaagaaaataaacttctgtcttttaagcca

SEQ ID NO: 5681 - DNA, 465 bp, Homo sapiens
tcaataagcagataaatgacaaagagcgagtggcagctgcaatggaaaaccccaacttacgggaaattgtggaacagtgtgtccttgaacctgactgatagctgttttaagagccactggcctgtaattgtttgatatatttgtttaaactctttgtataatgtcagagactcatgtttaatacataggtgatttgtacctcagagtattttttaaaggattctttccaagcgagatttaattataaggtagtacctaatttgttcaatgtataacattctcaggatttgtaacacttaaatgatcagacagaataatattttctagttattatgtgcaagatgagttgctatttttctgatgctcattctgatacaactatttttcgtgtcaaatatctactgtgcccaaatgtactcaatttaaatcattactctgtaaaataaataagcagatgattcttat

SEQ ID NO: 5682 - DNA, 207 bp, Homo sapiens
ggcacagggacatctttctttgagtgaccgtctgtgcaggccctgtagtccgccacagggctctgagctgcactggccccggtgctggcatctggtggagcggacccactcccctcacattccacaggcccatggactcacttttgtaacaaactcctaccaacactgaccaataaaaaaaaatgtgggtttttttttttttaatat

SEQ ID NO: 5683 - DNA, 6412 bp, Homo sapiens
ccagtgcctcccaggagtcctcaggccctggggactctgactcaattgtacctgcagctcctgccatttctcattggaagggactcctctttgggggagggtggatatccaaaccaaaaagaagaaaacagatgcccccagaaggggccagtgcgggcagccagggcctagtgggtcattggccatctccgcctgcctaaggctctgagcaggtcccagagctgctgttcctccactgcttgcccatagggctgcctggttgactctccttcccattgtttacagtgaaggtgtcattcacaaaaactcaaggactgctattctccttcttccccttagtttactcctggtttttaccccaccctcaaccctctccagcataaaacctagtgagctaaaggctttgtctgcagaaggagatcaagaggctgggggtaaggccaagaaggtaggaggaaaatggcagacctgggctggagaagaaccttctccgtatcccaggtgtgcctggcagtatggtttcctcttcctctgtgcctgtgcagcattcatcccagctggccttggggttcaggttccttcttccctccctcctgtgaagttacactgtaggacacaagctgtgagcaatctgcagtctactgtccctgtgtgttggcgttcttagcttttttgacaaactcttttctccaggtagtaggacaatgaaaattgttctaagcaaaggaaagaaaactgactttgttgcacttttagtttttttaaaaaaaacaaaaacaaaaacatggcagatgcatattgtgtctggttatattgggggttttacttttacctgttttgagggggatggggccggccaagccattcagagagaacatgggtccagaggacattctcagtggaaagagtttgatctgcagcacccagaagagaagccaaactcggtgtcattctgagtgaacactcaggttggcaagaaaacatacttgaattttcattcatcttctcagcagctgaagaatgtccctaccagagcatcttgacctaatcagcttacagtttgaaaacctagctctccagaacatgagatgagccagccgagccagactgtgaccaggaaacagctcatcccagagaaggagatgcttaacaaaaaaaaattgaaattgtttcccatgctgccagggacttccaactagatagccatgtgacgtcctggtgacttgggggaaaaattagtgatgaaacagccaccaccatattgccattagtggaaaaaaagaggacagtgaacctgccttccacctgccagagggacctcagggtgtggcattatagggccaggaaaagaaaatcggtgtatcctatctgccccaatagctgagctgtagcatttgggctggcctgccttatcagaaaccaagcttatgaagatcttctcccagcaggtccatagcagtaggcttaggatgcagtatatggggccgcatttaaaaggagggaaagattgtttggtgctggaacattccagggaaaaggagactggaatgaaaggtctgaaattatcttctcaattggactccttccagaaaggtggccgtgcctctaagcatgtttttcccagtatgccctaggcctccccccatggtgttttcatatgaggtactactgtgaaggatctggttcctcattcactgtttgacaagtctttcatgtgtggagttactcttctcatgcccaattttcatttgagtttagtggcttaaccaaacaatgactcctcattccagcggtgacagaagagaaagggtcatttacatcaggaaagaggtcttgtatctgggagtagagagctaaccatggagcacagtggctggtgggtgacttagtctgatggtttgtggaccatagaagtcttcacctctggtttgaggtgcagggctgtcttttgtactggagggtgtggggatattttctgatagttgccatttcttgaaaaattcccttgatgtaccttacacagagcagaaataacattaacatggatcagaggtactgggcttcatctgttccattggaccttggctagggaatatcatttcactggcatcaaacctgcttagcttatgaaaagatggtaatatgtcatttctataaatgtttctatatatgaaacataaagtggcagggagatacaatatcacaccccttccccacaaggactgtgaatattgggatttatgtccttgccattacctagtggttacagccctatcactaaaatttacatcgtttctcagttgggatttgggcattgctaacttactgtatagaaagtttaacttttcctcacccctgtatagaaaatgccttgcctctcaagagagggcagagggggggccaggtgcagtggctcacgcctgtaatcccagcagtttgggaggccaaggcaagtggatcatgtgaggtcaagagttcgagaccagcctggccaacatggtgaaaccccgtctctacaaaaaatacaaaaattagctgggcatggtggcatgctcccgtagtcccagctactcgggaggctgaggcaggagaatcacttgagcctgggaggcagaagttgcagtgagccgagatcgcaccactgcactccagcctgggcaacagagtgagactctgtctaaaaagaaaaaaaaaaaagggcagagggaaatggtgggaatgcctggagcatcctggcactctatactctactgagtgcctctcttcagcccctcaccctgcttccacacacacacacacaaaagcaaaggcactgaccagcttggctgcagggcaagctgccttgcagctggatttgcgactttttttttgtcttaaaatttttactggatcagttgtaggggactgtacttcctaagacactgttctcaccttccaacctcacaaatctcttactagatatttggtttttataacaagggtaaagaatcccaggtccctttagcatgcagagtaatggtgatccctccagagccattggcacttcaaagtggtcccagacctgggagattctggtgggatcttccttaaaaataagcaaaaaacctgagtaccctagatgcaattggccatttgtttcaggcccatcagcgaatcagggctccctcctcaaccctactgctacagttccttagctgtatgcctcagccagatccttggggttagggcatgcactcgctgactgtccccacccatccacttgctctgtagtttctgagctttctccatttcacaagtatggtgcctaacgatctttttctttaggattgatgcagttgtttttcctgaaagctaactcagcatctattcataaaaacccttaatagtatacattaggagttttcccaagctctacagtccctcagacattgcatcctaaacagatttgaggcacacaggccaagactccaccaaggcataaatggtcccccctactcccttttgaccagggtatcacttgtgtctctgcagtaagagttggtcaagttgctctacgcaccttggtgctttccagagatctcactccagactgcccccaagggtggatagagtatcctgacagccagtgtgcactcatgactgccttaattaacattcttctgctattatggagcctgtccagcaataaacagggtctaggaaggtacaagattagcttccagttaaaatcccattttatattggaatgcatgagctacagatgacagcagagatcctgaggtttctagacatgttgattgtctcttttttctaaatgaactccaagtacttagaaaacagtccctgtccatcagccagaaaaggtgaccatcacccctaaagtaatttccaaacttagttcagtgggaagatatgctggtagtgcatattcagtgttgattttcagtgctagtaaccacttttaatgccagaaatatgtaacaatgataatgtaacgtcaaagtggttactaaagattatagccttaacttttttatgtaaaagataaaatccattcctcctcccagtgagcaagcatggcttgcatttctcaaaaatgagaacttccatggcagccaagaaaacgtcttctcagaggaactttcgtttgatgcatctcccaagcccacatgcctcctgtgttccagccacctcttccatttcacatttaaaccagctctccattcccattgagttgccctaacaacattgtctccagtgtcagaaccatattaaggttcgtttctcagattgggagcctgcaacaccatacagccaacattgcctttgccacgccactgccaccatccccaccattgccctatggtgggcagatgaattccagaaaccctcagggagccaggataattaggcaacccatctgaattggccacgtaagtgacaggcacttatctctcgggttcttgcttttgcagactccagggaagtcctgtctagaggtcgatggcagagactcctagtctttcccatgaggggttgataggaatcaaattgggattcctttggctttgggttttgtttttttgttgttgtttttggttttcagtttgttttttggtgtatggggggtgattttgtttctgaataagaaaaagaagaggcaaccatggcccttatgtgggtttatcctttttgagcaatgttttagccacaagtaaggaatcttgaaagtcttttgtccagcaagcagtcttaaaaatgtttttcctaactccttttgcaggtgactaagtacaaaaaaatagttttctcattgtattcaaaatagtgagtaggttccctggataatacacagtggtagttgacatattttctcaaaacacaaccagaaaacccacttccggtatttgtaaatcacctttcaagggaaaaagtgaacacgtattccttgtatttctagtttgattaccaaacctgatgttacaaagaaacctccgttctgtagacagaatttcttttatttttcttcttttactcctcacaatcactttcccagtgccatcaccatctataaggtctcagagcagaggattattcatggtaataagtgggggtgtggtgcagccattccagtaacacccacaagaggacagctgttctgaatgtccccacccacccctctttcagtacaggtgagacattttcagttcatgagctccagaccaaatcccaggccagcccttgcaccaaaagccttttttagaaggcttatcagtctattaggaatgtctcaggaaagatgagccatttctttggggagaaatatatttacagatggaagtgtgtgactgcgtgtctgtgtgtgtgtgtggtgtgtgtgcgcacgtgagtgcgtgtgttcatctatgtgcatttcacttccataaagacccagcccaagctgctgggaaccatgtgttcctgagtattctcagaggttaaacaagtgacaagtgagcttctgaaattagtgtctcagcaagctggctttaggaatgagccccattttatcaagcagagaaaaaaaataacagcagaaaagataaagataaaccaaaaatatataccccccaatggaaaataatgttgattcagcaattcccataggatgtattacatgctctaatttattatattattatttatctgtctttgatctttgcccattgtactcttaaaaagatgttgggatgttgattgcgatttttaaacaactagataatgtataaatcagcagtggaaatcagttttaatgtgtggatgtgtctgattattgttaaatgcctctttttttactttttttttttttagatgtataatgtttcataaaccctggcactggtcacaaagctcagctgtgaaaatgaaatttgtagtatttttaaacatgaatgtcaatttcaagtgtatttgaaatggttcctccaggagagatatttgtgcaccattaggaaaatcttctctgcagaggaagtagccttctttggagaaaatggaaaatgggttctgatatgtgatctcagagtagcccatttcctagggcaccatggaaaacacaaatgtgatctttaagtatacctcttccccagtttggggaggaaaggactcagtttgcaccctttttgtatgtaaaataaaatgtcttacctttcttggctacttctgcttgtttggttggttgattggtttgtctgtttttaatctccctcggctcatttgtaattaacaatctagctaggactaactttgatgcgattcaagactcctgtgaacaaaaataatttggcattcttgtttcattccttggattaaatattgtcttctcctgtgagtcacttcaaaaataaatactgctgtctctcttcgagtgctg

SEQ ID NO: 5684 - DNA, 1016 bp, Homo sapiens
aactttctcattcatctttgaataacgtctccttgtttaccctggtattctagaatgtaaatttacataaatgtgtttgttccaattagctttgttgaacaggcatttaattaaaaaatttaggtttaaatttagatgttcaaaagtagttgtgaaatttgagaatttgtaagactaattatggtaacttagcttagtattcaatataatgcattgtttggtttcttttaccaaattaagtgtctagttcttgctaaaatcaagtcattgcattgtgttctaattacaagtatgttgtatttgagatttgcttagattgttgtactgctgccatttttattggtgtttgattattggaatggtgccatattgtcactccttctacttgctttaaaaagcagagttagatttttgcacattaaaaaattcagtattaattaaacattacttattctaccctcttttttggcaaggaggacaaatacgcaatgttggaaaaccttggatggatatcttctctttaaaaaaatgtaaagataatttggtcttgagggtttaaacggttgataatgcctctacaacaacaagaaaaaagataaaatactaggatagaatcatggtgggcacagtggcttctcaggaggctgaggagggaggtttgcttgagtccaggagttggagaccagcccaggcaacatagcgtaaaccctatctctaaaacaatttttagccgggtgcggtggctcacgcctgtaatcccagcactctgggaggccgaggcgggtggatcatgaggtcaggagatcgagaccatcctgcctaacaaggtgaaaccccgtctctactaaaaatacaaaaaattagccgggcgcggtggcgggcgcctgtagtcccagctactcgggaggctgaggcaggagaatggcgtgaacccgggaagtggagcttgcagtgagccgagattgcgccactgcagtcggcagtccggcttgggcgacagagcgagactccgtctc

SEQ ID NO: 5685 - DNA, 1127 bp, Homo sapiens
tagtcatagaggatgctttacccaagagccacagtgggggaagaggggaagttaggcagccctgggacagacgagagggctcctcgctgtctagggaaggacactgaggggctcagggtgagggttgcctattgtgttctcggagttgactcgttgaaattgttttccataaagaacagtataaacatattattcacatgtaatcaccaatagtaaatgaagatgtttatgaactggcattagaagctttctaaactgcgctgtgtgatgtgttctatctagcctaggggaggacattgcctagagggggagggactgtctgggttcaggggcatggcctggagggctggtgggcagcactgtcaggctcaggtttccctgctgttggctttctgttttggttattaagacttgtgtattttctttctttgcttcctgtcaccccaggggctcctgagtataggcttttcagtccctgggcagtgtccttgagttgttttttgacactcttacctgggcttctctgtgtgcatttgcgtctggcctggagtaagcaggtccgacccctccttctttacagcttagtgttattctggcatttggttaagctggcttaatctgtttaatgttatcagtacattttaaataggggcattgaaatttactcccaccaccagggcttttttgggggatgcctgggcctttaaaacactagccaaactctaattaattctcaaatcactgccaggagttcttgctcctggctgcaggcccaggccccaaggtctccttcttggggtcacaaacagcagtaaggaagaggaatatatagcaactcagggcctgggaattgtggggcaatccgttcttagggactggatacttctggctggctgagtatagtactagctgcctccccaccaggttccgagtagtgtctgagactctgctctgcagggcctagggtagcgctgggagtgtagaagtggcctgcccttaactgttttcactaaacagctttttctaaggggagagcaagggggagagatctagattgggtgagggggacggggatgtcagggaggcaagtgtgttgtgttactgtgtcaataaactgatttaaagtt

SEQ ID NO: 5686 - DNA, 1102 bp, Homo sapiens
gtctggtcaccggggaggtggttctggtaatctgtggtggtgccgggacaggcgccccgagttcccactgcccccgggcggcctgcacagagctgctgccctccagagactgtgaatcccaagcctgactcagtggactgcttcctgttcccctccctcctcttcctcaccttgttctgcaccctcaagcctttctccaatgcctcccaggaggatttggggactttctccctggggcgcccagatccagctcggaggcctcactgggacctggcaaggcctgacctcccgcccaaacttgcttctgtagctccccctcgaggaagtgaggtgtttaattttgcatgttttctggcatgaattaagacacttatacttgtatatatgagtgtacagtttgttctcacactgtcaccatagcgacaggtcctggctcccagtggttcatcctgcctgcccctctctcctcgccccgcccctgcacccaccccgcttcagggaggcccaagttccgtggccccacacgcttccaggctcagctcccacctccacccaacagatagatggggtttgctttttcatttcacatggggctcctccgctcctgccttctcggatgggccaacagtcgtaagaaagccctctctgcccgttctgttcacctctccacagcgcaccccgcccgccgctgctcctcattctttccaaacctcgaaaccaaccaaaacgtgagaagtatttttgtaccctgtgtaacaaaatatttatgcatcataaaggatttttcatgtgcgtaccattaattattaaagcgacctcgttcgccctgtcagataagtttaatgtttagtttgaggcatgaagaagaaaagggtttccattcttcagcagtacgcctttgtgtctggcatttgtttaagaaaatgaaatgaaggaaacactgtgcaatgttttttgttttgagcatatcagtgctttactgtcagccgcagctgtgaccgtctggccatttcagacttgggagatgaggcggctgttgtcattgctgatcctgtgagaatgtgaaactggataatatatgaaatgcaaaataaaacaaaac

SEQ ID NO: 5687 - DNA, 662 bp, Homo sapiens
gcctcacccacaaagagaagacaaagggtggcctgtggcctccccgtcctcctgctccctagtggcccagggccccagggaataactggagtaggcaggcagtgtccccttctgtattttttagggactctcagcctcctggcagggttaaagggagagtactttaaacccatataccagctgtgcttcagtttctctcactttgccctgggtaagctgctgtagggtcagaagtaaccctttctgtgccagttgagaatgagcctgtgtggtagctgatgtcagaggacaaagctctctgcaagggctggacacagagctgcagagtcctgaacatccctcctttcaggctgcagaagggagaggcaatgaagacaggtgctccggaagcagcatcagggctcttggaggggactggtggggactcaggctgggtgcagcctccaaacagagaacggaacttaggtgtgtctctacagctaggcccagcctagcccagcccagaacaaacacccttcagagcctaaccaaagaacataagctgcaaaatgtgcacccatattttaagctgctttttcaggggataaatagtgtttggggacattgaaatggatgttctcaggttgtatttatttcggacaaataaactagagaattgtgta

SEQ ID NO: 5688 - DNA, 597 bp, Homo sapiens
tgtgtctctcgctgtcaatgatgagttgacccggtgtgttcttgtatagtcagtggcatcagcacccgtcagccggccttttccttcaggttcgtcaggctcaccggttctcactgtgtctgggaagtaggactgatggtcatcttcatgacaggcggcatctccactaagcctgtgtaactgttccctctttggttttcttagcttttgaatttgaagaagtacttttgaagactcccattttaagaaccgtgcagattttgctaccaaaagtcttcaccactgtgttcttaagtgaatgttaatttctgaggtttgggactttgtggtggtttttttcttcttttcttttccattcttctttctttctttttatgttgtttgctgtaaatgctgcacatccagattgcatatcaggacattggttattttatgctttcttggatataaccatgatcagagtgccatggccactaccccactgtttgctctcctgcaaatcaactgcttttaatttacacttaaacaaattgttttgagtgttagctactgcctttctagatattagtcatttggaataaaaattcaatttcactg

SEQ ID NO: 5689 - DNA, 549 bp, Homo sapiens
ttaggaagaagatggataaaaacctattacatatttgtaatttattaaaaaccttatttacaaggaattatctggacttttttttttttttttttttttgagacagagtctcactctgtcacccaggctggaatccagtggcactatctcagctcactgcaacctccgcctcccaggttcaagcaattctcctgcctcagcctcctgagtagctgggattacaggcacacgccaccacacgcagctaatttttgtatttttagtagagatggggtttcaccatgttggtcaggctggtctcgaactcctgaccttgtgatctgcccacctcagcctcccaaagtgctatgattacagacgtgagccaccgtgcctggcctggaattatctggactttcaaagaagatggcattattataagaagagaagattattgccgaaaagatggattgcctcactttccactttttatgtaacagtagttaaaaaacagctttttttttacttgaattacaaaaaagtttaaataaaacttgtatttatgatacg

SEQ ID NO: 5690 - DNA, 1560 bp, Homo sapiens
ggccccctccccaggaagcctaggctcggtggctggacaggactgcagcaggacagggactggcttctcaccaccagcctttccgtctgatggacagcagaccccgcctccagcaccaagcagtgtccctacactcaattcactgtgtgagctggagtggcaggcagggatgctgcttctgttccctccaggccttggtcttcatggtaaccaccgcgtctgtggccgtagagggaaacagccactgtgacaacccagagacctggggtcagccttaagtaggaagaaattgcagtgtctatcctgctgccatcagcccttcctgctccagctacagttgggccagctgtggccttagtggatggtctgggtggatggctctgtcaatgtcaggcccgagaacagcctgcggaatgacagcctggggtccttgtgccacctggtggacgggaaaggcagggcggctgcagtttcagaggccagagcctggccctcctgtcatctgctgacttcacagaaggcccaggctacaaaccccacagtttatccaaggaaaatctagttaaaataatccaatggacagaagccccaggaaggggtatttccaacacttggcgtctcaatgaggataaaagggagggactgtaggttgtccagcataaggagccccagagttctttcaccagcagacagattctccatgtgttttcccactgttaaggactctgtccaaagaacctcagcatcagctccctcaagcttaatgatccaggctgcagaagaaagttgtcactccagtgagttacccagggctccagggagcccacagcagcatcagacccatccaggggctacagggcctgcccccctgcaggtagaaacacagtatacccgtttgtcatctggtttggcaggacccaggaccctcagcaatgagtctgagtgttcaaagcccactttagaacctaaagcattttgggttaataaagcaaaattttgcttatgttatttggtggtgtcaccgcagcttataccaagacaccatggctcagacatgggatcaggacacacctttgagatcccactgttagcaagaaaaggctgtccaaggcaggcagtgtggtagttgtctgattttgtttaccacacgccaggtcccagggaagtcttgcacagactcttagcagacaagcagggaaaagagagggtcctggtgggtggaaggattgggaaggggattctgggcctggaagcctgctccttcccctctcagccgtctcaggactactgttggattgcaaacagcatctctgacccagtcttcggactcattctgtaaatggaggagctgaggtcagaggggggctgtgaactactcaagaccacatgcttgcagtcctacaggcttcccgacccacaggccagctacggattttgcacttttgctccaggccacttgtgtgtgtatgtgtgtgtgtaccactgccatctgaacaaactatgcaataccacctgctcccttccaggagcattttaataaaagattttttttaataacag

SEQ ID NO: 5691 - DNA, 1337 bp, Homo sapiens
taaagatgctccaggagtgtggtccagccagcgctctttccagctgtaaatattagcgatggtgccatcttttgctgtagactaaactgcaacttctaaattccatgtggcattcccctaccctgaagttatgctttccttctgtgctctgtgctggccagaggtgcctcttgaatcagattaatgtggtttttcaggaaaggacttaggtgaactgaggtttttaccacaggcagtgaatgaccttggttcaccaaatttgcctctgttttgaggggcttggtccagagtgacttgttaatttactctaacttccttgtgtgttgatgggtaagtacactcaaacactgaatacaggtgtgtgatgggtagatttcacagcccttctactaatagtgagtgtgaaggcaagcttgatgcaaaacctcctgacctttcctacctgaagagccctttgacttctaggaagaaaggtcaaaaatgttatcttcagttgtgttaatcccagttttagtgcagcttaggaggctgctagttaggaagatggcagtggctgtaggctgggttgccagaaaagatggtggcctagtcttattattcagatggagaacttagaaaacctgaagagtacccaaattggattgtattttaatggacaatggctgtattttttccatgttagaaggatcctaatgaaagcacctgttatttttaagtttctaagggtctagttgttcagaatccccaaggatatttccctaacctcactcagtcacattgtaggagccagtgtagctatggaattatcttaggaactcaagcttctaaaactatccatgtagtcaaatctaggggaaaaagcaaataaaaatagtaaaatttggccgggcacagtggctcacgcctgtaatcccaacactttgggaggccgaggcgggccgatcacgaggtcaggagatcaaggccatcctggctaacacggtgaaaccctgtctctactaaaaatacaaaaaaatattagctgggcgtaggtggtgcacacctgtagtcccagctactggggaggctgaggcaggagaatggtgtaaaacccaggaggcagagcttgcagtgagccgagatcgcgccacggcactccagcctgggagacagagcaagactccgtctcaaaaaaaaaaaaagtaaaatttattttttatattcattaataaatgctgttgtgcttggagatgatcactcatataacatgtcatttttttggttctgttttggtttggtttttgccaattattttgttatatttccaaaaaactaaataaaaatcatttttatttttt

SEQ ID NO: 5692 - DNA, 376 bp, Homo sapiens
actgtcatattgctgtcttgtatatacagcttttccttcttttgtttaggatcataattgtctctacagtctgatattaaaggcattggatctatcttggatatcatacatggtcagagaagcctttaggagaagaatcagatcatgtatataattgtaacatcacattgattttacggaagatgttatatggactttaatgacacaatgtttagagataaaatgtacattattttggttcagttttttaaaaaaaatatgctttaacaaaattcttaggaattcttttaagcaatgcaggtattgcgataactgtagattttacaataatgttactctacaaatgggaaaataaattctttaaaattgaatattg

SEQ ID NO: 5693 - DNA, 724 bp, Homo sapiens
gttttgtggtacttcaccctcttctgccctcatttcatgtgacagccattgtgagactgatgcacaaactgtcacttggttaatttaagcacttctgttttcgtgaatttgcttgtttgtttcttcatgcctttacttactttgtcccatgctactgattggcacgtggcccccacaatggcacaataaagcccctttgtgaaactgttctttaaatgaaacacaagaaattggccactggtaaaactctgcagcttcaactgtacttcatttaatgccattaatgcaaatatacttcctcttctttttgcatggttttgcccacctctgcaatagtgataatctgatgctgaagatcaaataaccaatataaagcatatttcttggccttgctccacaggacataggcaagccttgatcatagttcatacatataaatggtggtgaaataaagaaataaaacacaatacttttacttgaaatgtaaataacttatttatttctttgctaaatttggaattctagtgcacattcaaagttaagctattaaatatagggtgatcatagttcctctaccaagtctggaaagaacatctcctggtatccacaattacaccaggttgctaactgtatttgtacatttccctttgcattcgcttctgttcttgctagaaacccagtgtagcccagggcagatgtcaataaatgcatactctgtatttcg

SEQ ID NO: 5694 - DNA, 1307 bp, Homo sapiens
tctttctgggcctggtgtgggggctacctcaactatgtgccttatggtaacttgttctgtacctcctatgcctcatgtccagccaggttgagcctaggggccagttgggggaccacaggacaattttcatatggcctaaatgtatccattgcctttgatgatgttcccagccatactccagtcaacggggactactagtccctcactcttaggttttaggggagtccttccatctgctccttcttaaactgtcctagggagttggcttttcagccagggccaaaggaaaaagccctgctgcatttaaaaacaaagtgtccaagctgtcagtggtgtgtttacaatctctcctggcagaggttggccctttctctaatgccttctggaaggcggaaaatgtgggaactataaatcactaggcggttgccttgttttgacttgagacacccaagaggaacagtcatgtttctcataaaaatcagtgggatcatttttgaattccatcagcctttgtatgtgagtgcaaaacattttaacagttttctcaaatcaacaaacagccttctcctatagctgtacttgcccccctccccaaaaaaccatggatgagaaagaaaggagtcaggggcctgataaaaaatacagacttaatgagcaactcaagatgagaaaactgctctttttccaaaaattaccaactgctgattacagctgaaatggaaccaaatgtttgttttctgatttttttttaatagctgtttaacaaattagtctttgctgagtaaaaggggaaatttctaaacctagtgcactgtttggccagtgtccacagcctcttttctggctgtgttttagagaaagggatttgagctataggctcgcctcctgttctcattctcacaaagctgccttgactgtggcctgcaaccacgagtgccatgctttcaggtcttctgtggcctactggccttcaagacagaggcctgccccagtgtgccacagatccatgtggatggagcctccttcagaggggtcacaggtctttgagactcagcctgggctttaatgtgtaggaaaagccttctggccacccagagagccggagccctgcttgctgtattctctgctcccttcttcctgctgggttttagccataatagggcccggtacgatttgggagtgacatttctgtaaagaagaggaaaaatcatttttctataatttgtaaagttgtgaaagagccactaccacagtttttacattgattattggaacatttcagaataaataaagatattttcttaatg

SEQ ID NO: 5695 - DNA, 1782 bp, Homo sapiens
ccagtgtctggcaggctccagagggtggacggagcggggcccattctcaggtcaaaagcaagatttctactgtcatgtgggatttggatggtcctgggggctccccagcatttctatcctgactgcctcttgggttgtcaaaacccaaggcagccttgacagggaccccccggccctaacacccatcaggagttggagcagttcctgcaggagcctgttccttccctgggctgacgcccccttgcctctgcctggtacccacatgacttggaactgaactaacatttttctttaaaaagcaaaacttaaaaaaaaaaaaaaagaggagagagatagaggaaggtgaattagactccaaaagatgaccctgctgtagctgggccctgacactgtcaccctccaccgactttgttttctcaggatggatttttgctgttttggctctcagcacctacctcagccggaatgaatgtcctggggggcagtggggcggtggcctcagcccccttaccccacagagcccgaatgcactcctacctcaagtccccttgctggggaccccctctcccttcccacactgttgtccagagtaaaaaaaaaaaaaaaaaaaaaagcacttccccgtttccaggtgtgaaagaaaaaaaaaagcacttccccatttccagatgtgaaagaaaatgtctacctcaaggctcgctggctctgtgggctgtgttgtcactggacctgcctccccgcccctcctgcccacagcccacctacctctcctgcagaggagaggccagaggttgggccaccaaggggaactcttgtggcctacagaaatagaaatggattgggcagagaaaaaatgtgaaagcagccaaaaatgagaggaaatttgttccttgaagtataaattgtccaaacgagccacctcccagcacaccgcctgtccccgtcttgtctgtccactcccattttgagccagcccatccttgatggggatgcccatgaggaacctgggcttgggagggtggcatcagctggccgcctgcctcctgtcctgcaggcccggcccctggaatgtaccatgtgtgggatgggtgtgtgggagggtgagggggtgtgggtgtcccctgcagaggcgccccagcctcaggcacccagccagcctgatccacccctcgacaggggagcatccactgtcagcagccatggccggaagctatttttatacaaggtgtgttaagggttatgttcttgtgactttttgttactcttttctgttgtgttgttctttgaactacttagttaaagaagaagaaaagaaaaccaaggaaacaaatacctatttttggttatactcagaaacatttttttaaatagcagaagaaaaactttttttaaagaaaaaagataagtgtattccttaagaatgagaccataaatatccctgacccccaatcctctagggacacctccaccctgaactttagttaattagctgaagaagatagaatttgtggtgttttcctagaaaactagagctgtgtccgcgtggacttggggaagggtagtcccttcccttctcccaaatgatgtgtggatgcccagggctccacaaagctccaaggcagtgccccctctgttcccaaagcagcttctctcgggagcctccctctcccttgggaagggtgcggctggggcaggagggggctggggggccacctggccttacttgggttttgtcacactctgctcattttgactgaataaaagtcctgttgccaaagtgaa

SEQ ID NO: 5696 - DNA, 2522 bp, Homo sapiens
ctcttcccagaggatgtggtttggggcaggcaggtatggatcacataggatgcgatacctgtggccgtgtatgtccacatgtgtgcctgtagatacatcatcaagccctttggagcttcctaagttgctttggctgaggggagaggaaaacatggattattcactccccccatactctttgtgatacacatgtgacatgtgaaagacatacgagacatagctacatgtgatgtgcacatgtgtgaagtgcatgtatgcgtactggttgttgagctgggaaaccgtggcccaggcagtggtcactacagcctgattggtcctccaggtcagaacggtgccccacagtggtcagtccccagccctgtgggcccccacctccatcgcccagccttttattacacactctgagagtgtctccaatgcctgtctgacaaagacagtcccagcccattctcctgtctggctgggttgggtgcaagcaggctctgaatgcctggcatttcagctgcatcacctcccagctccttattgcccaaatagagagggtggccctggctcccctccgagcaactctgcatttaattttgtaatctgggaagtgcctggttttgaaaatccgctttctctcactcttcccctccttccttgcccctggctgctctagtgttctgtctcccagtcacctcgctctcccagcaccagtgcccttctcctgctcccagatactctttcctttcctctctcctgttttccttcctctgctatctctcacacctctcccagactatgtcatcttgttctcctgcctgggttcaaactctgcatccttctctaacaacgtgactacctcatgtctgcttcaaggcccccgtgcccttcctgtatccgcggctgccgcgcactcgcctgccatcctcctgcctcctcttcactcagtgcttctgcttgccctgccccaggcagcccacccacgcccagtgcgggtgtggagaagatcttctggcttccctgcatcttgcctttgggattgggatccaagggttctccatggatggatccaagtcatagaggggaatgtttgagacagggaagggggctgtgatccagaggctcagaataaaaagatgccctcccttctatgcaggggggcaagtttactggatggagatgatttgggcctctcttccagaagaagctaaaggaagagaaggggagtgagagttcagggaggcccttcccaccctgtgaggcttgacttgatctggattggggatgacaggaatctcaccctctggggtgctggcaaggaggtctttgcacaggaaaaggggtagctcatttcagtttgttttttctttaaattgaatcctcaagtcattttctgttcacctgccgcacagggacaagcttgacttctattttctgtgtagtgaaaacaatgtcatttatttggtttttcacctcagccctctcataggagcatagaatgttagggtctttactccctaatgatgtctgattggcacatcaagagttaactctgccttctgggccaaattcgaaataaccagtccatttttccttttttttttttttttttttaaatggtggaatgtctctcagcacagttgcggcttcctcaaaccctgaaagcatctgtgtttattatactcgggtgtcactcactgttgatgtctgcacctacgtttccacctcctccccctccttcagccagcctatgataacactaaagattattaatgttggttttgtatctcgttaaagacagaattgtcacttgtagtatttctgtagcattcagcgctgctgtggctaacaccactgtgtatgtttcatcattgctctgaaggtcaaaagcctcattttattttgctggtttgattttttttttttaaagaagaaaaaaaaactgccctgaattaaatggctgttttaacagtaggctcttagcattataccacatagtcatttttcatgttcttgtttaacaggcactgaggttctggtttaaattaaatagctgcaaatgagacaatttataacccattaggttgggtggaaaattgtttctcaaaagcaaataagtaataaatctggtatctgcctataactcacagttgataagaaagtggccatttctcactagcactatatatgatttgggctctgggtaatttggaagtgttaggtttgtgtctttgtagcagtatttttattagaaaagaatctattggccttttacagggtattaatccctttgtcacctaccattgatgccttaagttttctgagtctcaattaaaaatcttccttttcttgatgcatgacaagtgtaatcagtacttgctcatttatttgtctgtatttagtttatgctgtactatttaattatccttccagcgttttttttttctccttacaaatatgatactctttagtgttaagctaaggcattgattcatgtatctgtccttataatgaattaataaactattttccag

SEQ ID NO: 5697 - DNA, 1223 bp, Homo sapiens
ttttgacctgtgtagaactctctggtatacactggctatttaaccaaatgaggaggtttaatcaacagaaaacacagaattgatcatcacattttgatacctgccatgtaacatctactcctgaaaataaatgtggtgccatgcaggggtctacggtttgtggtagtaatctaataccttaaccccacatgctcaaaatcaaatgatacatattcctgagagacccagcaataccataagaattactaaaaaaaaaaaaaaaaaaaagacattagcaccatgtattcatactaccctattttcacttttaatagtattataaacttcatgaacttaattagtgtatttttacagtatacttttgagtttgttaaaatatgatgatattagtgattggtttggttcagttccagaatctttgactagttacagatttgatagcacttaaatgtaattgaatagcttatgcttcattgcttgggcatatccagcatgttatgaactaataactattaaacttgacttaaccagtcattcattaataatttttcaaggataacttagtggcctcctaaagacacttgttttggcactgaccagtttttagccaatttaatctgtatctagtataaataattctcatttttctttgatgatattaacagagtgggcttttccttttgcataaaggctagtaactgtatatgtagcatggatttaattagtcatgatattgataattacaggcagaaaatttttaatcaaatgattagagcttaaatatttgcaggcaagtttttttttttcctttaagaaaaggaaaaagtacacattcactagaattcttcagaaaatttagtggtgccagtttccatttggtatttccttattaaaatattctagaattttaaggagattgaagggaatcacagtggggtggggagacctgggtttggggaatgacagagagaagaggtggtgagggcctgattaaaaactaagcagaagtagttttaacaaaaatactcatgaaaatgtttggaaactgaaatttaaacaactgtaatattaaggaaaccagaatcaataaatcactgtcttgccagcacagctacagagtaacatgattcaggggaggaaaagttccttagagttacttttataattctttttttttttcctcttaggtttagaaatcttacaaatttaaactttatcctttt

SEQ ID NO: 5698 - DNA, 626 bp, Homo sapiens
aactgacttttggagctttccttcttttttcatttcaactgaaaatgctttaggtaaaaacctttccagtatgttcacctctagaatagccacccaaagaccttcctgaggctgcctcagaagcaccacttgctgttttgaatgactctactagtatgagaaggatgtgaaggtggttggctggttgggctttaacttcctgggattcataatttttaagcttggaagatagctgctgttcccatgatgggcacatttcctgagaagcttgaatgactgatgagcatagagcacccctgccttcctcaggaaacctgaccggcaggggctctctggcttcctgaaagcttcacctcttccctcgtttatatctcaactgtaagggcattttcaagcttctgttcatggaatgagcaactcagactgtctggagcttgctgagtacaaacacaccaccactaagtttcagaactttccttagaacttgggcaaaatgtggtggtaactcttaagtgcttttggtatctcttgagattctaacttttaaagagcaaccattaatgtgtaaaatgattcctattattcaaggtttttttttaatgaaaataaaatatttgattttctag

SEQ ID NO: 5699 - DNA, 73 bp, Homo sapiens
gatgtatttgtatgtgtaaacattcaatgtatattgtatagtcagtgtataaaataacacttttagactctaa

SEQ ID NO: 5700 - DNA, 2633 bp, Homo sapiens
gagggataagcttctctcttgcagtgtgctctactgaatattctgactctgaaagaagacagtcccttgacttgaagtaatggtacagactggctccagctgcatgttagttattacgttcacctggaactaaagaagagcgtccaggtgggactgggataattgttcaaggaattgtgttctcaaaggcaaatcctatcacccactcagccccaaatgccctggattatatgatttttaaaacattttaagatacagctactcatcaacatcagctaaatatagctgatatatatatatatatttatctgaaacgtgatattttaaaaacatgtaggtttaacaaaccttcctaggacaaaaaggagactggggagggaagaggattactttaaagcacctgaaacgtatatgtacttttggttgctgttaccatcaacatctgttttattaccgaagacaattagtacacagacatgaactgttcttaaacagaacagtcttaaaatgtctgtacatatctgtctggtccatcaaattacaacagccaagattacagaatctatatagtctaatgctgacaacttctattttaaaaaacaagactttactttcttctgccccctaagtgataggtttaaacacacagagacacacacacacgtttccaaagtgcagcagtgtctctttcagtctacaataagattcctagggcagctttatcaaattttgccaattcaaagttcaaggacattacaagttagtcctggctttgtcatatctacttagtccatccgacacctgaatcattccatgtaaaacagagctctaagatgatcctttaagcaagcagtcatagactggtcgggattaagtaaaagacggctagttggcctcctcattttatttggtcagcatcccttgactcaagagtacttgctttcaagttcttcataaatcttgagattgacgtagtatgaaacctaaaagtatacaggaaattggacaaatgtggatacagcaagtttacactgcttaaagtacattatgctttttaatggaactaaatgatcaaaaaaagaatggactgtaaccagttgctgtaacgtgatgtaaaaacgttactgtaaacagcatgaggatatgaagtccttccaccttctatcttaaaactactacttactgagctagcccaatatgcattacaatgagctaatgctccagatcccagtattcagatgtgtctataccttccactatgaacacagataaactgaggctcagataagtccaaatgaaatgaaatcaactcccaagccctaaagagaaccttctcacaagaattaaaaacaaaaagggcaaacctaggaagctaacggctactcctgtaccactctattcactggtacagtccagccagtaaaaaacacttccaaaaagatacacagaagaggaactaaatgactgcgaagctggaatactgctacaggaagtatgagagttctgaaacccttgatagaaactggaagcctgccatggaacacaatactttgggcaataatcagaaaaagcaaaaaaataaataaatgagtacatctccccttcccacatcactcaaggcataagcagattttactgttagaggaaaatatgtaatacttacatgaatgttgcatgtgtgcatgggagcaactgagtagcaatagtaaatttactttccaaaaaagccttattaaaatataaatattagaaaattactttggagacccaagtaaatatttctcatacatatgtagaaagaaatataggtaagcagcttacctcagtatttcagggcagcaagtgtttgtgaagcaaggatgagcagcatgaagatgtcagatcagcaaggagaaacttcaactcaatcccaggttttctcttcttcccttatcctgcatgtacaataactgctgcctggcaaactgcaaacaagcagcatcactcaagtttgaagtttcgccgcttttgtcaactatcctctgggcaaaggtattcagcaagaggtggaatggctagacactgaatcaagagatttcagtgttactctggtcaagttagtcgccctctctgggctcccttttttcctatgcataaaaaggggagaagcagagagtgggaagacagctctactaacccttcagctctagcagtccatgactttttaaggaaatgtaatacaagtcaaaccaggcaatacagaggagaagggaaaggcagagggtgtgattatggtgacaatagctgccttcccctatcgaacagttatcagtaaaagacatttcaatcttacaaagcaactgttagaaacttctgtctaacaccatcacaaataggttcatggtcagcctaaacatgtatactgtgcattttatgggtgactttgaaagatctgttcaattatttttcagaaactaaattttcaaaaaattaatatgtgtacaattaaaatgaatgaaagaaaaaccattattgtacagaggtattaatgagactatgaaacggcaatacttttttaaatcacagatttgtaatatatgttcactgtgcagagggattgtaccttgtacaaaataaaacaaatttctcaaact

SEQ ID NO: 5701 - DNA, 91 bp, Homo sapiens
actcttaaatttgattattccataaaggtcaaatcattttggacagcttcttttgaataaagacctgattatacaggcagtgagaaacatg

SEQ ID NO: 5702 - DNA, 120 bp, Homo sapiens
gtttccattaagagaaaatgtatctgttaagtcatcgtcctgcaagcttggcgttactatgtattttttcttcttggagtgaaaatccttagatagtaaaactgttatagattattgttt

SEQ ID NO: 5703 - DNA, 390 bp, Homo sapiens
gtgaaatgcacatctgaacagagacaggcatgggaaggaggcccaaaagcgacatggcaaaccaccgggcaggggactcgctctttgttgcttcccaaacacttagacgccagcagcatgggttggtgtgctgggctggttaaggccgatggtggagcagagccaacctgcaaaatccacttcctcagcatcagatctcttgataaaagcatgaacctgcatgtaaggaaacgagaggacgtggtgttaaaaagaaacaaaaaaacaaaacccaccaggaaggaaaatccaagagtttcaggtctagagcttgtgctgcacttggaaagagcacctggcacctgcccctgagcaacagtggggccagctgcaggcccaaagacctgctcc

SEQ ID NO: 5704 - DNA, 289 bp, Homo sapiens
gacaggattatcaattttggagcttcataagagaatcttcaggatcttcctcccttttctgctttgagggtttccatacattgctgttttcaggttctacaataattacctttttttctctttctctttttggcttgtgctgggatttaagaattagaaaataaaaataagcagaaattaaaaaaaaaaacacttgtaatctcacccctcctaaagttaatgttaagattttgctgtatataatgaatgtatattatgaattatttacaaaaatggcatcatagtatac

SEQ ID NO: 5705 - DNA, 1792 bp, Homo sapiens
attattcatactagggtttgaccaacaaagatgctagctgtctctgagatacctctctactcagcccagtcatattttgccaaaattgcccttatcatgttggctgcctgacttgtttatagggtccccttaattttagtttttagtaggaggttaaggagaaatcttttttttcctcagtatattgtaagagagtgaggaatacagtgatagtaatgagtgaggatttcttaaatatactttttttttgttctaggaatgagggtaggataaatctcagaggtctgtgtgatttactcaagttgaagacaacctccaggccattcctggtcaaccttttaagtagcatttccagcattcacacttgatactgcacatcaggagttgtgtcacctttcctgggtgatttgggttttctccattcaaggagcttgtagctctgagctatgatgcttttattgggaggaaaggaggcagctgcagaattgatgtgagctatgtggggccgaagtctcagcccgcagctaagtctctacctaagaaaatgcctctgggcattcttttgaagtatagtgtctgagctcatgctagaaagaatcaaaaagccagtgtggatttttagactgtaataaatgaggcaaaggatttctattccagtgggaagaaaacctctctactgagttgtgggggatatgttgtatgttagagagaaccttaaggagtccttgtatgggccatggagacagtatgtgataacataccgtgattttcatgaagaaattcttctgtcttagagttctcccctgctgcttgagatgccagagctgtgttgttgcacacctgcaaaacaaggcacatttccccctttctctttaaagccaaagagagatcactgccaaagtgggagcactaaggggtgggtggggaagtgaaatgttaggcgatgaattcctgagcaccttgtttttcttccaaggttcgtagctcctctctgcccttccaagcctgtaacctcggaggactatcttttgttctttatcctttgtcttgtttgagtgggtcagccccagaggaactgataagcaaatggcaagtttttaaaggaagagtggaaagtactgcaaataaaaatccttatttgtttttgtagactttgtaatgcatatcattagccctcactgtgatcattactgctgtggctctgaactggcacatagtacagtggatggaaggtgcccgcacaccagctgagaactggttctggcctaggtgggctctagaaccatttacacagcatgaaagaaacaggttgggttaggagcagaaagaaataaggctcacacccctccagacactaccttataagcactgcagaacctgaaacagatggcagaaggaatggaatgctacaggggccagcaggagtgaccacagggaggggacagctcagtgactggagcattcaggaagaggctttccagggaacactggacattgcttagtgaccttttgttcctttttttttttttttcttttactgttctgaaagactttgagtctgtggttcaccaccagcccatcagtgtttctttgaggtgattgcattagggaagttggctctgggattgcaaaaaaaaaaaaaaggtggaacatgttttccttaaaagatggaaggttttagaaaatatactaggccatctggttagaaaaaacagaccagactagaaaaagctgtgaatttgattttgtagattaaacaaagccagatgattaaaatgtgatttatttataa

SEQ ID NO: 5706 - DNA, 3309 bp, Homo sapiens
aggaggagaatgggagagcctcccctgggcctgaaaacttggagcaattaattttttttaaaaagtgttcttttcacttgggagagatggcaaacacagtggcaagacaacattacccaactatagaagagaggctaactagcaacaataatagatgatttcagccatggtatgagtagatctttaataaaagatttgtattgattttattaactaccgtgagtccggccctttcaagcatggaaggagcctgcggtttggagtctggcctgggttccagtcctggctctgctgcttcccactgtgactttgggcaaatcatttcactcctcaaagcccccccacacaagctggattcccacttcttacctcatggagcctgttgaggaaggattgagctgatgacttaagggcaatctaccaagagacttattctgtatttgggggctagaaccatcttccatatttccaagattttccaagatgaagccagtgctagctgagaagcagcaatgaacagaaagctgtaacacttatgacaacaattcttgcagtgccagaggcccatttacaaattctcatttccatctcaacagatatagtgacatagctcaggctattcattcataaacacagagtgtagagtgaaaacactagagtgaaaacacatgctacaatgaggcagcatcagctgagagcaggaagagcgatctactttacaccccacaccaaaggaaaccagatgtgagctgctaaattgactggccttgcagagctcaagaagggggcttccaatgctgtgagaattccgagctgttccctgggctctgttaacaggcagagaggttccgggatggtctgctcaagtggcccacactggtcattgccttaagccacctccccaggacttacggagagaaataaggggatgtaaccagcaatggccagggtacaacagccctggaaaacagtagtaggagcactaggctttctgggagtccatccagctggagtggctttgagtgagttacacagctagaaggtgccaggttggtgctgccagagattcagaggtgccatacacttgtcaaatctggatcattcgtagtgccagcacagtcctaaaagggctggagtaccacaccaacacaggtaggggtgcagggcttcaagtacaaagatttgcatccatgtatgtatcaaaagtgggttctctgggctgtggctttgtctagtagtaccacagtggctaaagtagaagaaaaccaaatcaaatgggatgtgtcttttgggaggatgtacaagacacaaatctttcactaggcaccgggcacagggaaaactgcagggaacaagagttgtagtgttagtgcaactgtctcaacgatgctgtgtggcttcagacccaaacaaggccctgaggaaggagactctcatttccccaagcataactgcaaggagaggaggaattcctaggagccaaagagttttgtggggtgagggtaaataaatggcccaaatgccaactaggtgaagttgtgaccatctggctgggaagcccaggtccacacagtgtaggagcagatgttttgtggggtctgaggtttacgagatttggctgccttaagaatacaaaaacagaaatgcagaatttctggggctgctcctaggaccagaacaagtgaagggtcctggtgcttaaacttcattaccttcatggtaaatccaccagagggccggttagatgctggccccgccgagagaactgctgtcactttcaggcaaagctcaaaggtcctaggcccacagttcttttgagctccagtcatggacattaggaagtaaatcctgcacagccaacctggaataccaaagattagatgggagatagataccaatgatttagatggcacaggaagagcaagttctggatataataaatgagggtactttccgtcaaagcttttctatgtctatatttatcactgaatagtcccagtatggttttaaagcaagttttatgaatctcatttgcctaacaggaatctgaaatataacttgccaaaaacacacagttggtgtggaatggtcattagaacctggggctcctcttcacggactccctgctcattaagggattcagtggtccagagtctaagatcctattaagtgtttgattcaaacctctacccgaggaagggctgttaccttactcctggtcctggtttcaagctcattcctgaaattccagctggtttctctagcacctagtgttgtttacaagaaggccacggtgctcttagcattcaaactgcagatactaaacagatgctgtgatttattaaagagttagccatatttcaacaagaaagggaaatgatggctatattcattacttacctcaaagcatgctgcaagaaaattagttagttacttgtcatgctttgaaatctctggatgaaaggtgctttggaagcacaaaccattatcacttgtctcatagggattgtccccttgaacatccagcagtgttattttacagaagacaaattaactgaaggcttttcttttattacatctaaagagctctacataaacaggtaacattcaataggtaaacaatttttttccaatgcatgtaataaatattttcacttggtacttttatacaaactgacattgtctactatacatttttaaaagccattttactggtttggcatgcggtatggaaattctaagagagaaagttttaaggcaatgaatcacagatttaagttcatggaatttatggtaactttatctgtttatgtacattttcccctttgttaaacaattaacagcagcacactctgggaccaccagctattttccctctctttctgaaatctaagctttgtatttaattaaaaaacagaattcaacatctattgataaaacaaaattcttactaaaataatttcaaatgtgctttaaaaagtcctgaagatcttgaaagttttatgtgtttaaaattgaaattgtctaaaaaaatgctctttccacattaatttagttaggatatattttcactccatttcagacacttgactcaaaggaaaatctgccaaagaatccgatttttcagagcttacgtgaatctttcctcagtaaagatacagaattgtgatcatgtctaaataattagtaaagcaattttaatgctcaaaatagtcaaccaagtatggcatggttctggttcagattttttttttttaagatgtatccaataacactcacgaagtaattaaaagccactttaaccctgct

SEQ ID NO: 5707 - DNA, 1146 bp, Homo sapiens
gtccctggcaccaggctctggcgctctgctgggtgggagggtgggccatggagggcatctgaatacaggagtagggggggtgtgggtgtgtaaccagagaccgagagcatgagtggggtgtgcctcgtgtgcgtggattcgtgtgtgtgtgtgtgtgtgtcttgtatatgtgtgcgcagagtgcatcattttcagactctactatttccgtcaagtttctgtttgatttggatcatctcaggatcggattctgttttagagtgtttctgggccaggatccgggcccctgccctcctctgcacctgaccacactccctactcagggctagtctgttcttcccggacatcttctggtagccgtgcaggagagggctgggtggggcagaggccaggaggggacctggtgtgtcacctgcccaccacctggctcatccctcaggcccaccctgaccctacattacataggttacgtcagcctactgtggctgttgagcaaagcatttctcctttctgggcctcatttgcactagatgggcctgtggtcccaaagtaggtcagtaggttggggttgctgacaccccttgggtgcagctttgggacagatgagtggctctgtcctgtcactgccctctccctgcctgggggctatgtgcactccagacccctgcccaggctcaggcccatgaggtatggagacaccctggcccccaggagctggaggcaccgcccactcccctggcattccagctttgcaggtgaccctcctctacccaaagctctgtccccctgctcccactccagaagaactgcggcacgcgcttcgggcagcctagccacaggctttgagcgcctgcattcctgggggctggagggtggggtgccaaaggccctgagcaaaagccagagctcctctcatcaaagcctttacaaggtgctgggcccagaggctttgccttgacagagtggcccagggtttcaagggaggaggaacctccccctacctaggacccttcctgtggggggtctacagagtcagggacagaagggaagggacccacaggaagtcacagtggtgcccagggatgtgtcagcccccagccacggggacgcgggattcaagaatgaagtaaatacagtcacagcccc

SEQ ID NO: 5708 - DNA, 1347 bp, Homo sapiens
ggctccagaggagactttgagttgatgggggccaggacaccagtccaggtagtgttgagacccaggcctgtggccccaccgagctggagcggagaggaagccagctggctttgcacttgacctcatctcccgagcaatggcgcctgctccctccagaatggaactcaagctggttttaagtggaactgccctactgggagactgggacacctttaacacagacccctagggatttaaagggacacccctacacacacccaggcccatgccaaggcctccctcaggctctgtggagggcatttgctgccccagctactaaggtgctaggaattcgtaatcatccccatcctccagagaaacccagggaggaagactgtaaatacgaacccaatctgcacactccaggcctctagttccagaaggatccaagacaaaacagatctgaattctgcccttttctctcacccatcccacccctccattggctcccaagtcacacccactcccttccccatagataggcccctggggctcccgaagaatgaacccaagagcaagggcttgatggtgacagctgcaagccagggatgaagaaagactctgagatgtggagactgatggccaggcaagtgggaccaggatactggacgctgtcctgagatgagaggtagccgggctctgcacccacgtgcattcacattgaccgcaactcacacattcccccaccagctgcagccccttgctctcagctgccaaccctcccgggtcacttttgttcccaggtacctcatgggaagcatgtggatgacacaatccctggggctgtgcattcccacgtcttcttgctgcagcctgcccctagacatggacgcaccggcctggctgcagctgggcagcaggggtaggggtagggagcctcccctccctgtatcaccccctccctacacacacacacacacacacacacacacacacacacacacacacacacacacacacacactgcctcccatccttccctcatgcccgccagtgcacagggaagggcttggccagcgctgttgaggggtcccctctggaatgcactgaataaagcacgtgcaaggactcccggagcctgtgcagccttggtggcaaatatctcatctgccggcccccaggacaagtggtatgaccagtgataatgccccaaggacaaggggcgtgcctggcgcccagtggagtaatttatgccttagtcttgttttgaggtagaaatgcaagggggacacatgaaaggcatcagtccccctgtgcatagtacgacctttactgtcgtatttttgaaaaattaaaaatacagtgttt

SEQ ID NO: 5709 - DNA, 214 bp, Homo sapiens
gtggaataacctattttgaaaaattcctattgtgatttgactgtttttacccatatcccctctcccccccccctccaatcctgccccctgaaacttatttttttctgattgtaacgttgctgtgggaacgagaggggaagagtgtactgggggttgcggggggagggatggcgggtgggggtggaataaaatactatttttactgccactcttt

SEQ ID NO: 5710 - DNA, 17 bp, Homo sapiens
acaagaactccagcagg

SEQ ID NO: 5711 - DNA, 2500 bp, Homo sapiens
ccgttagcactgactgccagtatctgttttatcttgctggtgctgaacattctttgtgcaactccatggtctttctgggccttactgtgctggtataattaaaataaaatatattttgttctattggtaggtttttttttaaaattagatgaatatgttagtctttttcaatatcagtttgaatcttattttctgtatgtgttaattttacaaataggcaaacaacataactttgccctggattgactacatatttttaaaccttcaagtccctaataaaacatgagccatctgagtgagtccatatgaagcgaggttaggctgaaataattgcttaaagatgtctttcagagaaattaatttggttggtggccacttttaggtggatcaaaagacctttcagatcctcagaaccttgagacataatacagttgtgaggaatgtgttgtaacttggctggccaagttacatgttacagtatctttactgaggtaacttcattagtgtctttggccttttttgtaggtatagatattttttctttttacactaataacttttatgccttttaaaataaatttattttcataaatggtttgcagtgctaaattacatttagattaagaacaggcaggggtggaatatatcaggaatttataataaaattgccttaatctctacaacagtatcttaatttttacttgcggtgactattcttgccacaatattggagaataatgatagatgatatactagatttttcaaagtgtgaaaacctttagactttttttagcaattagtttgacattcgctactatagtaaccaagcactcattatatatgcatcctccaaatgtttcatgcttatttataggaaagttatattaatgagattaataatgtgaaatacagttttcctgcaaaattagcattagagaattgattttagataacagatttttaaagttttagagaaaagtacagtaatacagtaaactgaaagagtatatagatagcaataaaataacataagtggacatgtttatagtaaatactctgaagtaaacaaccgtttttattaactgcatctcattagggaaagtttatatgtcttgttattttttattaacattttatttaccattcagagtgaaaattactaatttgagtattaacaaataactgaataaatggatcattacagttaggttttctcaaattgcaaaatttgccttagcaattatctttgaacatcccgaaccagatttttaaatcccatttttgtttaatagggtaaaaataccatcaaaatgacttctcataccaaagaataagccatcatattttttcggtgttgaaacaacattgaaagtcagaattggatttgtttttaattctttatacggtttacataagcaatatctgtctctttaattattatgattaatgtcgtccttcagcatgagttctgtttcacaagttttgggccacctatttcaataaaaaataaaatataaattaaaaaagttgccgggggtggtggctcatgcctgtaatcccagcactttgggaggctgagggaggtagatcacctgaggtcagaagttcgagaccagccttaccaatatggtgaagccccatctctactaaaaatacaaaaattagccctgcatggtggcaggtgcctgtagtcccaggtactcgggaggctgagacaggagaatcgcttgaacctgggaggcggaggttgcagtgagccaagatctcgccactgcactccagcttgggcaatagcaagactccatctcaaaataaaataaaataaaacttagagcaaagtttaaaactgagtattcatattaagtgttttattttccatattagagatgggaagggaaccttatgtgtattttattttgttttcaaccatcaataaagttttctctagaatattgttttgaacatccttgtaaaagatttgcgagttaaactattttatttactgtctgtgagagcattgggagtaggaaacgatggactccaaagtacaagggagaatacccattttcattcagctatctggagtaaaatatcaagtacttccttcaactaatcttgtctcattcactcaccttttgatatcgaaggcagaaattgcgtttacaacactgaagaccaaagctttttaattagtaaacaagcggaacatagataatggacaatgctggccactgccattctgtgttcagaaagactatgagacctgaacatatggccaagaggaaagaagagtgacgttgtctaagatgtaatgagtgctctctgagagaatcactcaattcctattggagtgcaatccttacttgagaactttattactcttgttctgtgtagttttttttttttgtcacttccccatcagaaaagcatattctttttgatagagggtcagtgttataaataattgtcttttgaaataaaatcaaatattcatgcattg

SEQ ID NO: 5712 - DNA, 500 bp, Homo sapiens
ataccttctatttttaatacaagctccactgaaaaccaccttcgttttcaaggttctgacaaacacctggcatgacagaatggaattcgttcccctttgagagattttttattcatgtagacctcttaatttatctatctgtaatatacataaatcggtacgccatggtttgaagaccaccttctagttcaggactcctgttcttcccagcatggccactattttgatgatggctgatgtgtgtgagtgtgatggccctgaagggctgtaggacggaggttccctgggggaagtctgttctttggtatggaatttttctctcttctttggtatggaatttttcccttcagtgactgagctgtcctcgataggccatgcaagggcttcctgagagttcaggaaagttctcttgtgcaacagcaagtagctaagcctatagcatggtgtcttgtaggaccaaatcgatgttacctgtcaagtaaataaataataaaacaccc

SEQ ID NO: 5713 - DNA, 208 bp, Homo sapiens
gacatgtttgttgactgaatgcgtatctctatcatcacactcactcaatggtgttgagatatttgtgtttccccttccctagacagtgagatccttgaaggcagctgccttatcttattcctttttgtatttccatacctagcctaatacctagcttatataagggaacagaataaatgaacaataaagaaaagtctttacagcctct

SEQ ID NO: 5714 - DNA, 1111 bp, Homo sapiens
aaactcaacatcaaatgctctgatgtgctatagattttcaaatctttactcacataattatctctttgctattgtaaatctttcacttcaagataatttgacagttgagtatcagcataatttgtttagctctaaggcaaaagtttgcttgcttgccaacacaatgaagataatacctacccacaaacatccctattctctactttcacctttttttttcttttaatccttttggtagaaatcaggttacaaagcaaaaccacaatatcagcaacacttcctaatcaaaattaagcattgaatatttgtttaagcttagttcagaagcaacgctcctacaggacttgacatttgctagttagaatatccctactcttctaaataatttgaaagtatagagcagtaacacagtaacagtgagcacagccaagcctgacactactaaatgatttggtagtgaagccaggacatctacccttgactattttttatgttatttatttattagtttgtccatttgtaacatgtatagatctgtcctgtgagcatttctgatgaatctatggttcttacagaaatttttcaaaggaatcaatttagagatagagttttcatatacttacattaacttattaatgaaatctgtttgcatcagtgcttactgcgacacattaattagcttgattaatttagattagaatcattaacatcatgaaaaataaaagtactacatttctaacgtattcccattgcaggtgttaggtattttttctgtcaacacctctcttttgaattctacatttgagaaataagcatggaaatattagctgccccgtctgccattcaccaggaaaaatttctatggcaattttgtaccatgaagtaaactgttacaatagtttctgagaagcatactataactctgatcttccattgagaataacaaaaataaatatcaattttacacctcatatgtcttcttagttctgaatgattagaagaacttgcatgtatttttatcctagaaggtttaaataatacatcaaagttattttcttccaaatgtaattttatgtctgctttaaggaaaataaaataaaatattaatagg

SEQ ID NO: 5715 - DNA, 560 bp, Homo sapiens
accggcagatgtgtgtccctccgtggctacagagtggtaaacaaatctcacctttggggctgcgtttcatcacctcgtccacaatagtcaatcctaattgtggtcctgcctcttttctaagcatatggctaagactgtatgtgctgaattcctgggcctcctgcagaagcagaaagcctgctggggatggtgccagctgtgccttggctgttgtatttgaattgagatttttactatacaaagccacctagggcctggggatttgggtcagttgtagttgcctctcccccaccctcttttcccttcccaaaggtgggtgttgaactaggggggatattgctgtcctgagggaccctctcatttctgacatttgaagaaaacgtataaatctttcttaaccgtgaaagcaaaagcctttgggtttattttgggatagttaggagctagggtagaatataatttttttccaaaaacttacttacaaacaaaaagcctaatccctctattttaagatttctgaaaaaacactccatgttatattctggggaaagcaaaaacaa

SEQ ID NO: 5716 - DNA, 2202 bp, Homo sapiens
cagccacttggcctttgtccccattccttctccaagaagaatgttctgggtgctaagtctccaccaatgatccctgtggtttatgctgctgctgtgctaagactgcctatgaaggaaaatattccagatccctcctcctccccgcagctcttctcttccctctatgagagatctgaagtacgtgtttacaaagtaactggcttctacaatttttggactcaagcaaaaagccagattttttggaaccaactgaggaattctgtacacaaagcttcagcaaacacttagagaaaacaaacaaacaaacaaactgggtccttggaaacagttctggcacacaggcagaacactggaggccacctcaaaggacagaggccatgctttcgcatttggaatgtggctctgccacacagctcactcctatggtggggtcagaggtcagaacacaaaccacccatgtgggctctgctccctcccaacactctgtgttcccacagggcttctctgcgggcagccaggcacctgtcaggcttgggcaggggcctgctgagaatctgtgaatgcagaggggagggctcatggccaggattccagccagagatgaatttccatgctctgggccagggctctgtgccggcccctcatgaggtggctggctgcattatggggagatgctgcccacggcggagatggtggcagtggctgtgaagaacagaggtacctgaattctgtgtcctcagctgtcactttccggtgagacaagtggagcagggcctttgatcactgtggtcacagacctggtactgggttttgcccttgtgtgctcaaacatttctaaggtgtcccaagccctggaaatagggaagggaagggtggaggcttggatctgaggtcttgctgtccactccctgcctgcctgcccgcatctcaggcatggccaacagcagcccgttgaggggggcttgtctggacagttgcgtgtgatggtgttgagccatcacagggcagaggtcacttgtgtcacccccatagtcattgggttgcaggccatggaggagggacctccactccatggggcctattctccattaaggtggaagtgtccactgtgggcctagcacagtgcaggaaccaggccagggggtctatctcatacctctggggacaggaaaggtagaggatgaggaggttggacgtggtggtggctttgccttggatattcctcttcctctatcaaggccttctcttcttctctgtgtcccacaactctggcctcatcgccctgggactcccatctgctaagatagtggctttggaggttctggaagggcttagtgaggaggccagaagtatcagggaaagttgctggtgatggggtgggcggtgtcagaagcagccactgttttcccctcttcagacactgagagattaatcagggaatgaaatccaggtggaaattatttattgtgaagcagacgactgtctgtcctgtttatgacaaacccaaatgagaattggagggactaccagtaagtggtctcttcatgctctccccatcccagtttttaggatgaaatttagagcctggccttttgtgttgcttgcaccaaatctgtatgtctcaggtgaaactcactgttccatgaatggtcatcctttttttttttttttttttggaaccagcccctttcaccctttcatccgtcttttttttttaggaaaataacccttcttgcttcagcacttctccctggtccttgctgaaagacagagataaaaatccattctctgagccttgcttggttgtcagaggccatgagaggtgccagttataggtggatgtgccaagatgctggtgaacttggtcttcagctatacccaggctcagaaagggcaagagccatgctgcagcgtaggtgactttggaggtgcacttggggcccagggctttgagtgttgcgggtgtgcctgtccctccagatagtgctctgtttctctctgttgtccccctgcctggtcctctggggccactgtgctttctgctgtgtgcatttataaatgatgtgtattttatatagacctgcttgcattggctgatgctcctctaattccctgagtttgattcaaccacccttgggttgttttgctatggccttagcctttgaaaatattttaaaataaaaaacttgatttttctagtgt

SEQ ID NO: 5717 - DNA, 621 bp, Homo sapiens
tggaccccagagcccctcctccagcccctgtcccacccccttcccccagcccatccattaggccagcaacgcttgtagaactcactctgggctgtaacgtggcactggtaggttgggacaccagggaagaagatcaacgcctcactgaaacatggctgtgtttgcagcctgctctagtgggacagcccagagcctggctgcccatcatgtggccccacccaatcaagggaagaaggaggaatgctggactggaggcccctggagccagatggcaagagggtgacagcttcctttcctgtgtgtactctgtccagttcctttagaaaaaatggatgcccagaggactcccaaccctggcttggggtcaagaaacagccagcaagagttaggggccttagggcactgggctgttgttccattgaagccgactctggccctggcccttacttgcttctctagctctctaggcctctccagtttgcacctgtccccaccctccactcagctgtcctgcagcaaacactccaccctccaccttccattttcccccactactgcagcacctccaggcctgttgctatagagcctacctgtatgtcaataaacaacagctgaagcacc

SEQ ID NO: 5718 - DNA, 273 bp, Homo sapiens
gggggccccagccctcgtaccacccctgttaccccaggatccatctgccctcataaaagtgttcaggtacagcagctgaggctgccctgaggaatcaaggggccattaccaaggggcaggaaaaggatatgtaagaggtggccttcatggtagagcttgacccaagaactactccacattcggatggcccagactgactccatcccctgactttccctttgacttcaccctgtttgtaaataaaacaataaaatggaaggtgctgtggactgg

SEQ ID NO: 5719 - DNA, 1615 bp, Homo sapiens
aaacagaagagtgagaagaaaggagaggaaaagcacagaaacgcttgagcagcccttcccgaaggagcagctgcggacggaggtggatcggacccaaggctggtgcctggggctaaggccactctaaggattgtttttatcaagtgggttgttctgtgcctgcagcatagagcgcaggctggcagagcaaatagggctggtgaggagtgactgtccaggggaaccagcagagggcgttgggggtgccaagggcttctccgcaagggaagcccagatttacttctttcaaaatcatatcattccttagagtttagggaccaaaggactattgcttttttaagaatatatatatctatataaattaaaacaaagaaacaaacaaacaaaaaacaagacaaacaactacaaaaaaagacagtatagagtctcataaaagctgcctttaaatatccctaggagacagggtgaaggagacccttgacagccccagcctaggcagatgggggctgtggaaagattgttctgtgtctcattccctcttaagccactcccccaccctgcccttttaaaaataattaaggatttgaggtctaggctcacatgcaggtaatgagaacgttatggaagcagtgaacccacaatccacaatccccaaactcagagtgcatcccagaagaggccccaggcagagctcaggttggccctggcctttgccatcccgggaggccccctagccagcaagagtgggattgcctttcctgtggaaccactgcttccccaggcgggaagaaagagggagttctggccacctgagcctttcccttgccaatccaggtagacagaggccctgcctttggctgagctgagacacctcctgtttcccttccccttgaaccagtcccagtgtccccttgctccaggctaccttctgtctcttagtctaagtttgcccacctgtaaagtagattcaggatatctgtagagggctgtgacaacagacttggaaggtttgctactgtatatactgccattgagaaggggaaatttttcaatatgtagaagcttcagaattagaggtccctctttaccccagacctgggagggaagtagatgttttgccaaaatacttcttcattcctttaaaaactacatctttcctatgcaagagtgtctcacatgtgcttaaccgaggtgcttctagttggtgagcagtgttgagcttagaagtggtgtgtgctctgtctgtctgtctttgtctgtctgttgtatacagtgggtgccatataaagctgatcaatggtggtgcttcctgcctgcttctgtgagatgggcaaaagattcagcttagaacaccatgactcaccttgccttggtcagcctttcctgggcctgtagggccttgcacatatttttcccaggaggatttcccctccaccccacaggcatggatcagcttggtctgaggccccagctgtgtggggtccctctaatccccagatgttgctgaggctgaaggcctctgatctgataacatgtcagatagtaaaagatgtgggggtgggggtggagggctcctccttcataacagtttctaagaaaacttgttcccacctgt

SEQ ID NO: 5720 - DNA, 639 bp, Homo sapiens
gccccaggcaccgaggagggtgctggctgtaggtgaatggtagtggagccaggcttccactgcatcctggccaggggacggagccccttgccttcgtgccccttgcctgcgtgcccctgtgcttggagagaaaggggccggtgctggcgctcgcattcaataaagagtaatgtggcatttttctataataaacatggattacctgtgtttaaaaaaaaaagtgtgaatggcgttagggtaagggcacagccaggctggagtcagtgtctgcccctgaggtcttttaagttgagggctgggaatgaaacctatagcctttgtgctgttctgccttgcctgtgagctatgtcactcccctcccactcctgaccatattccagacacctgccctaatcctcagcctgctcacttcacttctgcattatatctccaaggcgttggtatatggaaaaagatgtaggggcttggaggtgttctggacagtggggagggctccagacccaacctggtcacagaagagcctctcccccatgcatactcatccacctccctcccctagagctattctcctttgggtttcttgctgcttcaattttatacaaccattatttaaatattattaaacacatattgttctct

SEQ ID NO: 5721 - DNA, 972 bp, Homo sapiens
gaagattcttaggggtaatttttctgaggaaggagaactagccaacttaagaattacaggaagaaagtggtttggaagacagccaaagaaataaaagcagattaaactgtatcaggtacattccagcctgttggcaactccataaaaacatttcagattttaatccgaatttagctaatgagactggatttttgttttttatgttgtgtgtcacagagctaaaaactcagttcccaaatccccagtttatgcagcgccatcaggtattttaagctaaacttcttcacccctgagagcatgtcagctggagaaaagcagttcttccttgcccacttgagaagtgcacgcccactcacccaacatcctggtctctaggaaagcctcatgtgaggttcctctttctttcagctcagtgcccatgggcaaggatcatgatttccattccgtgttacaatgacaatatttaatgagcataaccttctcagtctcctgctctcaaatttaggacagagccgctaaggacaaaacaatccctcccgtgctttatgatggcagcaggggctggggagcctctgagggactctttcattctgcagttgtctggaagcctgggtggcgtcatgagctgaaggatcatgctttcctgtcctggctccataggttataggctggctggtgaaaggttcacgtggcccaggctgaacttcattgcctagctttggatgtgctttctgccataaagactgatttttgttcgttctgagccttcaaggaatttgttttttacaactggaatatgctcctgtgtgtgttaacagatcatggatgttttatgttttcactgatcatttaaagagtttgacctcagagctccaggatcatcagtaaatttgtcatgttatatatttatttttttataaatcaagacttctgtgtgctcttaaatatattaaaaacaatttacatttcagg

SEQ ID NO: 5722 - DNA, 887 bp, Homo sapiens
gctgggcccttccttccctcttctttcttcttttctctcccttccttcttccttcaggtttaactgtgattaggagatataccaataacagtaataattatttaaaaaaccacacacaccagaaaaacaaaagacagcagaaaataaccaggtattcttagagctatagatttttggtcacttgcttttatagactattttaatactcagcactagagggagggagggggagggaggagggagcaggcaggtcccaaatgcaaaagccagagaaaggcagatggggtctccggggctgggcaggggtgggagtggccagtgttggcggttcttagagcagatgtgtcattgtgttcatttagagaaacagctgccatcagcccgttagctgtaacttggagctccactctgcccccagaaaggggctgccctggggtgtgccctggggagcctcagaagcctgcgaccttgggagaaaagggccagggccctgagggcctagcattttttctactgtaaacgtagcaagatctgtatatgaatatgtatatgtatatgtatgtaagatgtgtatatgtatagctatgtagcgctctgtagagccatgtagatagccactcacatgtgcgcacacgtgtgcggtctagtttaatcccatgttgacaggatgcccaggtcaccttacacccagcaacccgccttggcccacaggctgtgcactgcatggtctagggacgttctctctccagtcctcagggaagaggaccccaggacttcgcagcaggccccctctctccccatctctggtctcaaagccagtcccagcctgacctctcaccacacggaagtggaagactcccctttcctagggcctcaagcacacaccg

SEQ ID NO: 5723 - DNA, 1032 bp, Homo sapiens
atctttaggttcctgaaactggtggcaacatgacctgctaaaattttctgcttggacctctttggttctctcccctttcaagtgagcaacaccacaatgactgtctaaagcatgccttatttagcctctcctgtaagggtgatctagccaggtacattttaaacaatgcttcagtgtagaaggtgtaaactattttgggcttgatgtgctgtgaatgttgcttttttttttcctttgttaaaatatttaaatagaagtgaaaaggtcctctgaggatcagatcatgcatgcgccattttttacttaatgcagctgttaaattggcaaagctctaaaatgcactgctgccatctagtgatacacttttgtaaagtacagcaaaacctacagatatatacagtatataaatatatatatatatatatttatatttttgggggtgggagaaatccaaaataaagtaaatgcttgtttcatttttaagctgctgatattcattccttattgtatgttgtcagatgaggaaattgtgcagttctggtacataaagatgagtaatataaactgaaatctataattttaagggcttaacctgtgactttaataagctggaacagtccactgaatgggtataatgaattgcagtatatacgtatgattgctttttaagtgattatcttttcttctgttaagtcatgtaaattcataaatccttttgcactgatgtgttgaaccttattcttgtacattcattcaatcaaggcaaacttttataatttttcttttgtttccaatgaccttgaaatgttatagcatggtaatattctatgcaactatagttatactttttggtttgacactgtattttttcacattgatttactggttgatgatagattttataacctaacggttctcatgcggtgcgtaattgtagatgcatgtacttgtgtgttttgtgtaattattgaagtgcaatgatgtataaaaaagtggattcacctgtttttaaaaataaaacattgataaaag

SEQ ID NO: 5724 - DNA, 717 bp, Homo sapiens
cagccttggctgactttccagagcccagtcccaagcctggcaccaagcctgaggggcctcttggaggaggaggtgttcatctgcaccacagagagttgaggccctaacaaatttcaggcccagccaagagcccatgaatggaggctgcaggaggctgagtccggctgccatgcacgtctcccctacagtggttctctggacaaggctttgtccatcccggtccccagctgagtgcccagcgctgagctgggtgcacggtgtgattccaggaggagagccaggcctgccctgccctgctggcttcctgactggagagacaggacccacagaaacagcctgacagcagctggtttggtccttgtgtgagggaccaagcatgtggcccaggctctaagctctgcggggattggagagggatggggagggaagggaaggcagctccaagaagaggtccctgtggcgaagttacctggggatcctggctggcccaccttcctggctgcagtccaggcccgtgctggcgggattgggcatgggaaggagcagggcctgctgcttccctggcgctgctcccaaagatttctgactcatctgccagctctgtcctgcatgcctggcgagctggggcccagggcagcatgaaggagagccctgcgttctgtgcttcttaccagaggtttgcaagcctcagacaaataaatgtggtgtttacaatgt

SEQ ID NO: 5725 - DNA, 611 bp, Homo sapiens
gggcagggaaggtcaacccacctgcccatctgtgctgaggcatgttcctgcctaccatcctcctccctccccggctctcctcccagcatcacaccagccatgcagccagcaggtcctccggatcactgtggttgggtggaggtctgtctgcactgggagcctcaggagggctctgctccacccacttggctatgggagagccagcaggggttctggagaaagaaactggtgggttagggccttggtccaggagccagttgagccagggcagccacatccaggcgtctccctaccctggctctgccatcagccttgaagggcctcgatgaagccttctctggaaccactccagcccagctccacctcagccttggccttcacgctgtggaagcagccaaggcacttcctcaccccctcagcgccacggacctctctggggagtggccggaaagctcccgggcctctggcctgcagggcagcccaagtcatgactcagaccaggtcccacactgagctgcccacactcgagagccagatatttttgtagtttttatgcctttggctattatgaaagaggttagtgtgttccctgcaataaacttgttcctgag

SEQ ID NO: 5726 - DNA, 210 bp, Homo sapiens
tcagagaggatggcctgcagccacatgggaggaaggcccaggggtggggcccatggggtctctgcatcttcagtcgtctgtcccaagtcctgctcctttctgcccagcctgctcagcaggttgaatgggttctcagtggtcaccttcctcagctcagctgggccactcctcttcacccaccccatggagacaataaacagctgaaccatg

SEQ ID NO: 5727 - DNA, 642 bp, Homo sapiens
ggcctcccgaggctgggcatgcctcaggcttctgcagcccagggcactagaacgtctcacactcagagccggctggcccgggagctccttgcctgccacttcttccaggggacagaataacccagtggaggatgccaggcctggagacgtccagccgcaggcggctgctgggccccaggtggcgcacggatggtgaggggctgagaatgagggcaccgactgtgaagctggggcatcgatgacccaagactttatcttctggaaaatatttttcagactcctcaaacttgactaaatgcagcgatgctcccagcccaagagcccatgggtcggggagtgggtttggataggagagctgggactccatctcgaccctggggctgaggcctgagtccttctggactcttggtacccacattgcctccttcccctccctctctcatggctgggtggctggtgttcctgaagacccagggctaccctctgtccagccctgtcctctgcagctccctctctggtcctgggtcccacaggacagccgccttgcatgtttattgaaggatgtttgctttccggacggaaggacggaaaaagctctatttttatgttaggcttatttcatgtatagctacttccgactgc

SEQ ID NO: 5728 - DNA, 113 bp, Homo sapiens
actccctgcttcccctgaacccccagcaagttgcagaggctactgcccttgggaggcactcatgaaggtgcctccatctctcccttccccaatatacctgatggtcaactctc

SEQ ID NO: 5729 - DNA, 2053 bp, Homo sapiens
agggttcctgcgcaggcaggactctgctgtcccctgctgctcctgataacaaacgccttaaggatatgaagcttcatggaccttgttaaagttttttctcttttgggtttgtttcttctgtgagagaacagaacttacttaaaactgacctgtcacttgctcttagccagggaagtctttcccactgggttccgggctgggtggcaggctgagcgtgcagcaactccaggcatctctaccctcagccccctgcacggccaggtgggcctttgtttacagccgtaggcagctctcaagactgtgtttcaggtttacagccactgggcctgggcacacacattgaagagtgggccaggtcctgtctgggggcctgtacctgctctatttcagagcttgtggctttgtgtctcccctgctttccccacgcagacagcccttcctctgtagaaccagctgcacggcagctgtccaccagagggcagacctgcactctccattcatgtccagggctgtgacagaccaggccttcccctagccccacaagttgatttggggggttttgacccttactcctgagctgatccaagttttatgctgatttttccaaggatctctccctccttttccctccatcactcagaggtagggaagggggcggcattaggatggtgttactgtattgggattttatgttgttctgtcgtcttcagcacaggtagtataaggttatattactgtagaaccacagtgcccatcttgccagcagtgcccgcccccaccctcaaagctgagcaggttgagcctttgcctagtctggggccagacccctcagatggggatatccctgggggagcctggtgctgaaccagaagaggcttcctggtgcttctgtcctaggccaccactcctccagccctttgcccgcacatacatgccccacctactctttcatcccctctgcccttcccctgaaacggtcctttgcagctgtcatcccagagcaggcagatgggctcccgtgcttgagctccaccccagctcttacatcatctgggctttgaaccttttacatttgtccagtctagatgagtaggcttggggccagcaccctgtctcaaagatggcaaaatgaggctagttctggatgagctagctggtgtgggttccaaccataggaacacactgatgctcaaatcctaaggtgccaagctctaggccctggaggctggtagaacaggatctatgcctggaatcctggcagggattcctgtcaaggacttgtgtttaagcctgcttcagggcttcaggctgcttctgctctgtgtctgcccaggctggctgagcgggtggatgggtggacagaagggctcaccaaggattgtggacatagggtaggccctggtaccacgggtttcaggctgttatcacttcccttgtaggaacatagccagaagcagatgagccagggtagagggctggcccctcctctcatcttcccttcagtcttaaattgtctccagcgatgggaagaggccagggactgtaacccttgtgctgtgtattctctgagcctctgctcactctcagggccaagcagctcccaagccggggccctctcttggccaaaatctgaggagcagtctaggttacaggctttttggtaggtaggttctggctgcctgttaatgcagttaggccccctgattaggtacagtgagaaacaagctagaacaaccctggcccagaagactgtccactccagcaagatccagggatgatagccttgcagggccactgggagtttgtgcccaagcttctccctcttctctccccagggggcactgggactggtccctgccctcatccttagcctgggccttccccagaggtattaaagagaagtatgattcctctgtcttcagttcttttcaggggcatcctgcccatagtacccagttcccaaggggcccccagtcacgtggtgaagcctagcactcatgcagctcttagggaaccaaaaaccagcactgaaataaagctgaatgactgactg

SEQ ID NO: 5730 - DNA, 165 bp, Homo sapiens
atgggcttccccaaggatttattgacattgctacttgagtgtgaacagttacctggaaatactgatgataacatattaccttatttgaacaagttttcctttattgagtaccaagccatgtaatggtaacttggactttaataaaagggaaatgagtttgaactg

SEQ ID NO: 5731 - DNA, 939 bp, Homo sapiens
gtgcttgagagccctgaggcctagactctgtctacctggtctggttgggcagccagaccagcaggctggcctatgtggtctaaggttcagcctgaaactcatagacactgatctggctgcagttttgctatctgggctgtgggcaagcctaagggatcctgcctgcccctaccctggacttgcctctgcacaccctccagagacaacaggtaaaacagggccacatagatgctgatggagccttcccaagttgtgcttgagccaggaggcctgctagggttaggaggtccttaggcctctgagaagctctgaagaactctctggaagcccctgggcccagtacctagctggctctgtgagggtgctgactggcttcagcaagttagaactagccaaaccaggaccctgtccaatctttgacaattgggagctgccaagagtgaagggaagagacagcccaggatactggcacagaggtagtctcactgcttgaactaggctgagcaatctgaccctatgggtctaggacacagttcctgggaacatcacattcctctgcccttcctgcaggcaggaacaaacagggctgccttctggccttgtaagacccttattgctgtcctggaggggctggggacttgtgtctgcggggatcagagcgcacagggagtgcacatatccaggcaccaggactagggctggagtgaggggggggtatttcaattaccttctattggtctcccttctctacactcttgtaataaaatgtctatttttaatgtttgtacacaacaatccttctattctagcctgcattgagcttgcatgcttgcataagagcttaagaaccattgatttaatgtaatagggaaaattctaacccaggtatccaaaaatgtgtaagaacaactacctgagctaaataaagatattgttcag

SEQ ID NO: 5732 - DNA, 227 bp, Homo sapiens
tcctcctctcttctctccccctcagcctttctctcgcctgccttctgagctgcactttccgtgggtgccttatgtggtggtggttgtgcccagcacagacctggcagggttcttgccgtggctcttcctcctccctcagcgaccagctctccctggaacgggagggacagggaattttttccccctctatgtacaaaaaaaaacaaagctctctttccttctctggt

SEQ ID NO: 5733 - DNA, 2632 bp, Homo sapiens
acattaccctccaaggtgggccctgctcaccatgaggcctacagagccctgttggccactcatagctcacacagtgcagtgagcactgaagtcactgacccctagaaagtgacctgcaggtagcccttacctgttgcttctcaggccagaggcccccatctgggctgtgggctgataggtagaattctgtagttttcctctgctgttggagcagagtttggagaagtcactttaataagggcaagacagaaaattctggttcttatggtgggtgacaaaggtggctaaggaaaacacttgcagacagcttgattggtatttgtcatagtgcttcagggaggcaaaaagggagctcttgtgcccaggctgtgctagatagtgttgaatggaggcagaaaatagcactttatggtttattatagctggcaatccaaaaaagaaactgtttgagaccagttcgagaaattccgtttgctctattcttcctagctctaagatggtttgcaggcttgaccttcaagacagcataaagtgagtccttttgtccctcttcaggttgcacctgtctaactatgacagggatcatagcaggttgcttaatgatacagcaggatcctggcttccagaatccctggacctggggcatccccaactggtccaaccgtccgggtgagtttagtgattctggtttgcccttccctagttagagaaaaactgctctgacatgttcatatttatttatttgtatttccttggtctgggtgagtttcttcacccagtctttgagctaaagattaggtcgaaggtactggggctggccccagaagcctgcagtttttattattaccagcagagggagctacagggagcagtccggtgccttcctattgtttactttttaaacttttgagaagtagcaatggactcgtgagagtgggtatacagctgtgtgggctttgtcctagactgaggcttacagacaggaagggtaagagagacctaagccagctcctagacccttgcctgaggaaatcagtccaccagtgtagagggcctcccttcactccagcatggaccattctattgccagattcttctggtcacagcatgggccttactggatactcaggattgggctttaagcagacctctgggtgtgacacagcctctttcagcccccagcccaaacagcagaaataggcataatttctgctgtgacaccccctacccacaaattggagagtatatcttgctatactctataccaagcctctttctagaatttttccaacaggttttgttttgttttttggcttaactcagaaccatggtgagcgttctgctttgttttgttggagacagggtctctgtcacccaggctggagtgcagtggtgtaatcacagctcactgcagcctcaacctcccaggcccaagcagtcctcccacatggtgagctttgaatgggcatagacagggttcccagcccaatagtcgggattggggtataggttctacatgggaaagtatccagtctcttgctttactcagtgtcctgtgaccaccagaggcatgagagggacaacacactcttttcgctctaccacaaggggtgactagaagatgagcaagtctaataaaaagatacggccttatttgttatttgtctgacaaccatccttacgatggtaatcctgtgagtgcctgatggacatctatctttgtgtttttctcaaaccatggaaggttgagaggaatatacagtatctgggggctgacttactctactagctaggagcatcacagcagagagataggacagagaccagagtcatgccagcttggggtcttgggaagagaggcagatggttactctgttctggaatgggactctgcagctctatgcagtggccaacattctgagcactttgtgcaaatgcttgtagagctcaagaacatctccatccagaaccccttccccatctgcagagaccatgtccaggcctttcttgtgtctgcagaggtgaagtgcacatgtggaaagggatcaaatgtagcacagtgtaaagaaagacagcaacacaggtagagggacccagtgtgtgctgggaggtggctgtggaaggtaagtatagacctacatctctgttggggaggtggtcagggcagaatggcctgggtgtttagcagcttctaggggtgagggtggcaggaccccaaaaccaaggccctctgcatcgttgttgtaataatcagctctggcatattcagctgcaactgtccctgaagaagaggtttctgagctggctgaccccatgtaggagggtgttaccttgtagaaaaagctggagggacctggtgggacagtgcagtgaggcagggtagaaatggtcagttgtttagggccagtggccacataccaaaataccaccaatgtgcccagggccaaactgccttaattctgagtgctgtgtgttctgcaggtgacagtttcctgaggagaggggtgtatccaggcttacctcccagcaggagtggtaccatatggtgtttatgtactactctatagaactcttggcttgcacttctacagctctgtacatttataagaataaatgcaatcacactagttga

SEQ ID NO: 5734 - DNA, 882 bp, Homo sapiens
aactccggactgtgggccacctagtccggcaggatcttccgccagcgcctccaccttcagatgtacctccagcctttcactcctcggtcctccggagcccacaacctggacacagctcctcaagacaggtagcatggaccttaaggcgacaagagaggggccccaggagtggcaggagaggatccccgaccaccctagggaaacttcgtgcgataattgctgcttatgcccgtgttgcgtgaagacacggaacttcaccttttctgggaccttctttgggggagaatggtggacagtgggattctggaaacttgtttgggacccccaagggttaaagccacccagcattcacgaagagcacctgaagtatggaagctgagaagagttattggaatcacccccaccgttgacagaggaaggcagggggtgagaattaactgcttgagggtaggagagtctgagatgtgggggccctattccgctccccgccctgggacagttttcctttctagttttctttcccctgcttcagaggagcatctctgagggttctagctcttttaacaccccttttccccctgctggcccagagggagacccaggactgaactctccaggcctcctcccctgagccctgcagctggctggagtcttgcttccaataaaacaagcacaaaaatggctgtgtcccccattttttttctaaccacccgcctgtgcagagacagctctcgcctggccccttgtgtctcccctcccctccagccttgcgtcctgagtctttggagtcttcagggtcaggcacagagactgaacagcttcaaaatggtgcaaggcactgcccagtccctggcttcttcctctctcctcccccactccgcc

SEQ ID NO: 5735 - DNA, 113 bp, Homo sapiens
gtccctggggctggggttttgtttgtagaaggctctggggactcctaatttctgcttccccagcctaaagcagggatcagtcttttcttgtggaataaatccttggatcggga

SEQ ID NO: 5736 - DNA, 1043 bp, Homo sapiens
ctgcaaagccagagcagataacttggggtgtgtgtggggatgtgtgtgtgggcctatgcactcacacactgaagaaacaaggaagatgcctttcaagcctcactgggcctctctgggacatggccacctgacctgtgtgtggctggtgcagcctggcaccaagtgggctacctgttaggaacatgaataccttacaaagctgaagctggaacttttcccaaagggttttgggtatagcctgccctggaggggaaggaagtccatgcaagcaaagacatgcagtttgcttgcacacaccagcagagctaagactggagtctcctgtggcctaactttcaatgagggaaccggatgctgttcacactttgactggatggagatgcatttacaaaacagactggagaaggacttaatactcagatggattggaactatcatggtcactgctcctctcccctccccacaaaaggaaaaaaaagctggatttgattttttttttctggtcactcgagcacatctaagatcacccattaggttttatctgggacctgcagtttggctttgggattgatcatcttgtggattttattcctgacgattcccttgctgcctacccttttctctcctctggttctcaacctcaacgagttcaaatcagttgtcctttttagctcccgtggaactgttttgtatctgcctctttactagtctaccttagtgccatccaccagctttactctctgacacacacacgcacacacacacacaattttaacttgtttttttgtacataatgtacatactgtcaattttttattaaaagaaatatgctttgatgtgctagcataactgctctagcttcttgtgtaccatagtactgtggcttcagatttagtacctatgaacagatgtacaagacatttattacactttttaccaaagggagttaccattgtagtacttttgtgtaaaacttgtcttcccctttgcccccaacttttttttttttttttttgtaaataaataaagcttggttcttactt

SEQ ID NO: 5737 - DNA, 1647 bp, Homo sapiens
ctctcctacgaacctcctacctgttggccagccttccttaaactaccctggacaccgctgagcctataggttgccatcagttacgctgaagccatggatcaacttctttcttgtgtctcccagcacacgtgtgcacgcaaggcagcctttccctttggctagataaatgtggtgaaattgccactagaaagggccagtagcaatgtgttcttaattcctagcatctgctatcaaactgtgccttattaaaaccaaattgtggctattgatttttgctagggtccccgaggtaagtggggaaggaacctccctcctcctttctcccgccattctttttctgaggtctcctgtctcccactccttccctttcctaggattttatggggaggtttgatgagcatttgcctttctccccagagagcttgaccaagttacatattctagagatcgtcctgagtgccaagcacgtttataagtagggcgtgtattccagtcctttctgtcattctgtgtgtgtgtgtgtgtgcacttatgtgtatgggtccatatgtacgtgtgtatataatatatattgtatgtgataatatgatcgtattctataaatacatatacacacgatactcctttccagaagttcctggggctccgtgttgcagttcaggactccttgcttcttggaccctactatttatcctggactagcttgggttggtgatcatgtctcctcttgtcaggctacagagtggtggaagaggacacacacacatctcctccatgttcctgccacagggccccttccttaagtaatgacttatctccttccagttgccacctgttggagccaagaatgtattagtttgtggtgacactgggttagctcagcatggatttcccttatccgatgatttttctacatttacttggccaatttggggaacagacctccactgtgattccatactctctctttgctttcactatcccagggatgggaggcggagggtagagatgaactcactgagcagccagagccaaatgcaatcggtacgaatcttagaaggaaggagggggagcccaggtatgagaaagaaaaaaccactaagaaaatacctccctgggaggatgagctggggccctttttcttttgctggatggttcctttatgcagcttggccctgtctaccgagatgcccatctcttcctgcctgctagcctgctagaccctcaaactgggtgggttctgtgtcaataaaaagcttcaccccctggctgagtgaggtggtcccctgcaatcactgtttgtcccctacccacccaacctgtccctgcctgctcccagcccactcatccttatgtgctagggataaatcaagagtcctcagcactccacattcccaaaaaatcccaggaactcctaaaccttcccctgtgacagaagatgaggttggcagctgatcagacctcaataattttatactgtaataagctctttgaatgtgtatattattattttttacaatcatttcattttgtatttaatatcaatggactgagtctgattcagaaaataattgtaatgttcatattcaatatcttacagtgatacagttttgtatttacatataaatataccgacatgatcaaaac

SEQ ID NO: 5738 - DNA, 273 bp, Homo sapiens
agagagaagcctccttaaggagccacaggatggtacctggccccaaaaggaatcctggagaggaggacagtgacaacaggtgacttcattctttagagtgaactttccaaacccagtccagctggaaacagcttatctataatctgaaatgctggctcaaacagttatggggaggttcccagattgcgtagcattcagattgatttgagcagctcctactgtgataagtgtatcccagatccacaatgtaaatatatgtgatttgtaagaaag

SEQ ID NO: 5739 - DNA, 519 bp, Homo sapiens
cggatctcccactttgcatggctgtcttttacagatgggaaaactgaggcctgatgctggagattctatgagggtgctctcctcaagggtatcagacggtcgtaggttcttaagaatttgattcatcagtggcaggccatgcatagagccacgggaggtgcgtccttgttttccagggaatgttcttagaacttggactactgattattaattgactgtgccttgggaaacagtgggaagtaacttggtgcagcactggggtattgttggcttcttgtgttggaaactttgtaatgtaaaaggaaaaactggaaatccccacgccctgtttccctttatcgtcttgtggttggactggttcaattcgtttaactcgaattcttgctcctggccgtggttaagctgtgtacagatgatggagagtttggcctcaagtttttataaactgagcgagactagtgttcaggatctcctcccttgtttaaatgtcaataaatgccccaactgctttgtaagtgc

SEQ ID NO: 5740 - DNA, 1228 bp, Homo sapiens
ggcctggcctgggcccagatgctgatcgggccagggacaggcttgcccatgtcccgggccccattgcttccatgcctggtgctgtctgagtatccccagagcaagagagacctggagacaccaggggtggagggtcctgggagatagtcccaggggtccgggacagagtggagtcaagagctggaacctccctcagctcactccgagcctggagaactgcaggggccaaggtggaggcaggcttaagttcagtcctcctgccctggagctggtttgggctgtcaaaaccagggtaacctcctacatgggtcatgactctgggtcctgggtctgtgaccttgggtaagtcgcgcctgacccaggctgctaagagggcaaggagaaggaagtaccctggggagggaagggacagaggaagctattcctggcttttccactccaacccaggccaccctttgtctctgccccagagttgagaaaaaaacttcctcccctggttttttagggagatggtatcccctggagtagagggcaagaggagagagcgcctccagtctagaaggcataagccaataggataatatattcagggtgcagggtgggtaggttgctctggggatgggtttatttaagggagattgcaaggaagctatttaacatggtgctgagctagccaggactgatggagcccctgggggtgtgggatggaggagggtctgcagccagttcattcccagggccccatcttgatgggccaagggctaaacatgcatgtgtcagtggctttggagcaggttaggctggggctcatcgagggtctcaggccgaggccactgcggtgccagtgcccccctgaggactagggcaggcagctgggggcacttggttccatggagcctggataaacagtgctttggaggctctggacagctgtgtggtgtttgtgtcttaactatgcactgggcccttgtctgcgtcggcttgcatacagagggcccctggggtcggccctccggcctggcctcagccagtgggatggacagggccaggcaggcctctgaacttccacctcctggggcctcccagacctcctgtgcccccacctgtgtgggcaggtgggccagtcttcgggtgatgggaccaaaccccttcagttcagtagagaaaggctaggtcctctacaaagagctgcaagacaaaaattaaaataaatgctccccaccctaga

SEQ ID NO: 5741 - DNA, 135 bp, Homo sapiens
agaaacgtcaaagtgaaccaaatcattgtttttattttacaaaggcagaaaatgaaacaccactaggtaaaagaattaaaaatctaatcctttatttcttaaataaaacgcttgtgtaactcgtatcatgaacca

SEQ ID NO: 5742 - DNA, 319 bp, Homo sapiens
atcaggatcatgccttaaaaagaaaacttttgttaaagtattccactgaaatcacagatatttgtgggtattataacaatcattggaaagcatggagagctacatttcataatttgagggaaaatttctaacagatgccagaatgcttgtttatgggattgctgtgtttccttttaattatttgtggttccaaacaattattgtttgaactttttaaattctgtactaaaatctataataaagcttttccacagctttaaaactatcagaaatatgcctagcctctagagaaaattgaagaaaaggagtaaaaattttg

SEQ ID NO: 5743 - DNA, 436 bp, Homo sapiens
atgttttggttgattctgtatttgagtacccttgttaatattttaaattgtccaaacaaacattctaattgttccttaagaactcattttcccatgtttatactcttcccacactgtagatatggcatgtactttacactatttataatgactgtagatacttgaatgttctacttgctaattttgcaagttgagtttatttcatttatgcagagtatcttggagtttggtaatttccatcttatgataatatatactttgcatttgtgatatgggtgaaaggagacataaaattagcaagtctgttttgttcttgtaataaagtaacttattctgttttcattgttgacttttcatgttaaggaaatacgaatctgaaagaaaaatgttaactccagctcttgaagtatcttaaataaagacttaattaaagttt

SEQ ID NO: 5744 - DNA, 845 bp, Homo sapiens
ttgacaactcaagcctgagctttttggtcttgttctgatttggaaggtgaattgagcaggtctgctgctgttggcctctggagttcatttagttaaagcacatgtacactggtgttggacagagcagcttggcttttcatgtgcccacctacttacctactacctgcgactttctttttccttgttctagctgactcttcatgcccctaagattttaagtacgatggtgaacgttctaatttcagaaccaattgcgagtcatgtagtgtggtagaattaaaggaggacacgagcctgcttctgttacctccaagtggtaacaggactgatgccgaaatgtcaccaggtcctttcagtcttcacagtggagaactcttggccaaaggtttttgcggggaggaggaggaaaccagctttctggttaaggttaacaccagatggtgcccctcattggtgtccttttaaaaaatatttactgtagtccaataagatagcagctgtacaaaatgactaaaatagattgtaggatcatatggcgtatatcttggttcatcttcaaaatcagagactgagctttgaaactagtggtttttaatcaaagttggctttataggaggagtataatgtatgcactactgttttaaaagaattagtgtgagtgtgtttttgtatgaatgagcccattcatggtaagtcttaagcttgttggaaataatgtacccatgtagactagcaaaatagtatgtagatgtgatctcagttgtaaatagaaaaatctaattcaataaactctgtatcagcccccaacatattatttttcattatttgggggatatttcagttcc

SEQ ID NO: 5745 - DNA, 1017 bp, Homo sapiens
ggccggggcggggggcagggacccccgggcggccgggcaggggaaggggcctggccgccacctgctcactctccagtccttcccacctcctccctacccttctacacacgttctctttctccctcccgcctccgtcccctgctgccccccgccagccctcaccacctgccctccttctaccaggacctcagaagcccagacctggggaccccacctacacaggggcattgacagactggagttgaaagccgacgaaccgacacgcggcagagtcaataattcaataaaaaagttacgaactttctctgtaacttgggtttcaataattatggatttttatgaaaacttgaaataataaaaagagaaaaaaactatttcctatagctagtcggaatgcaaacttttgacgtcctgattgctccagggccctcttccaactcagtttcttgtttttctcttcctcctcctcctcttcttcctcctttctcttctcttccccagtggggagggatcactcaggaaaacaggaaaggaggttccagccccacccacctgcccaccccgccccaggcaccatcaggagcaggctagggggcaggcctgggcccagctccgggctggctttttgcagggcgcaggtggaggggacaggtctgccgatgggggtgggagcctgtctgctgggctgccaggcggcaccactgcaaggggtgggagcctggcttgggtgtggctgagactctggacagaggctggggtcctcctgggggacagcacagtcagtggagagagccaggggctggaggtggggcccaccccagcctctggtcccagctctgctgctcacttgctgtgtggcctcaagcaggtcactggcctctctgggcctcagtctccacatctgtacaaatgggaacattaccccctgccctgcctacctcacagggctgttgtgaggaattgatgagatgatgtatgtgaaacactttgtaacctgtaaagcgctgtgcacacgtg

SEQ ID NO: 5746 - DNA, 3269 bp, Homo sapiens
ccgagctggaggccatccgtgaggacttcctgcgtgagcgggacaccagccctgacaagggtgagctggtcagtgacgaggaggaggatacctgagtgggctcgggatgctgctcttccttccttcacaaccaaagtgtgcccaaagggtgaaagtgcacttaaaagccagaatgtaacgtgtgtgtcctctggggatctgctgggcagatgtcccaagccaggctgcccttcctcatttcccactgtgcggggggcaggggtgggaggtctaatctgtttacaaccatttccgtgccatgcttttggttacacgtatctcagtcacgctttctgcctggttggtggatcctcaggcttaccagtggctatttgcaagagcctgtttccagcctccgtcagcctgtcggtgctctgaccctctgaaaccttgctttgctgggcatctccccatattctctctcctgtacatagtgggcagtggtgtgtggttttgaatggcagtgctataaaggatgccagctgtgctttaggcacctgtaggccagagggttgctgcctcaggcataaggttggtatgaaaaggggctgccttagaaaagcaggcacatcccttgttcagaaatggccactgtaggaaagcctgtgaacctcccaccagtggctttaagctgccagccatgccccatttctagaatagcctttgctcttccacacgcaacccttccatcagtgtcttccagcctgcatggggagggcctggctgcccagacacccaccctcacttctcatggccagcctgtgtttgcagatcactgggctgctctgtccccagcttgccccgtgccaggcatggctctgtgagattctgtggaatgcccttcttgacttgtggaaatcattcaccaagtacgatgggatgggattccaagtaaacagtggaccgtcatattgcaaagcaggcccacgcctgggctggccttggttgaggggatggaggaatgttttcgggggtgctttgcagggcagtggtgcagccgcagcgtgaacgctcttggacagctgaaaaccatggcctccttggggatggccagtgctcctggtgtctccacctgcctgggttgtgcaggaggccggctgccagtgcctggggctgggaaacttttttgcttggggcaggcttgggtgagctctcccagatgtgtgcccaccccaccactgcctggaacatccttgttctctgccaggatgcaggggcactgttgcctctgacacagcagtttctgggaactcagaggactgcctttctgaaggctggggagaggctttgagcaaggagcttgtttttgcttaatcgctctagaccatccctgatgcgtagatgtgagaggatgttttctggcacagtgttatgaaaatacaagataaatgatctcagtggaatgtttcatattacccgaaaaaaactggaaatcatcctttgttgtgaacacactgagactaagaattgaagcaatgcagttttaagaagtatttttcctattttttgctgtcaactttttggcaatgccacggcaaagttggtgtttcagcacatgctagagtgagctccggcttcgtgtctttaaccaactccactaatgtttcactgggtagacggagctggcctctatatttagccagaagcctttgcctcttttcaggcatcaaaaatgggttttgtcattgtctttgtctttgagagcagcagtttgaggtctgactccttcagttgtcctgtgagctgggcgttgcagtctgctcgaatcaagtgttggaaccccccccacccctcagcccatcgtgaaacgacagctgtcagcctggggggcggctgctgaggaggtgcagcaggaatggggctgggccctgaggttttactttccgagccaatggcccctggaacatgccagcacacactgccatgtcctggggctaagagctgcctttagggacaggctcgtgttgtccagtttgccctgagagatgcacctgaccaggggcccgtcgtggctgcaacccacggtggtatgttagtgtttccaggcagttgtcagcagctgccgggcagtgtgtgtgtgcgacagcaggagagttcctggaggaaagggactggggacactttctcagaggttctcctgcctggaatcaagtgatgcgtgtccagaaggcaagagagggcggctccgcctggttaaagtttgggaacgggacggagccaactcctccttccaggactgtgggccccactcttttgcgctaacacttcccctccctcgggtcactgaggaaagagctgctctgtcccctccagtgccctgaaggtccctggcctccactggctgccatggcagggggcccttctgacaggggctgccccaagctgctgttcctcctctgaaccttcaccccaacacccagcccgtggcccctgcaagggggaccctgccagctgggaaacccaaaggcctgtccaaacgtgcgcaccaggaccgaggggagctccctcccaacacctgctaggaattgccaacttttaaatggatggggttttttatgggttgaacctctgttaatacttttgtacactctcactacagtttatatttttataggctattttctcaaggtgtttctagattccacatatctattttatataacaagttattatgttatgtgtgtgactcccttgtgtgtatctgtgccagcctcagcctccgagttgcttttccctctggccctgactctcactgactcaccgatgtgatgtgcaggcccacttcttaccccagatagcctcgggcgctgcctgtagtcatgctgacagctgtacagtagccgccaagactgctgacagctggagacggttctggtttcaactacggtatattgatatcggaagtattctagacagatcctcggttgggttttctagctacatgtttgtattgcacagatccccacctgccatcctatagtgttgtcttcctgtgtgttccggggcttctgggcagctgggcctgcccggggaagtccttgcaggtgggaggccatacagagacccactgtgtgccactgaacgtcccactgctgctgggcaactggaggactgcagggggcgccaggtgactctctccttttatatcacagcagctcctgtgctgaccttcaagttacgttttggaactgtaatactaaaggaagaaataaactactaatttgtataat

SEQ ID NO: 5747 - DNA, 662 bp, Homo sapiens
ggacactgccgaggctgtaggggcctagaagtccaccatcctgccctgcagtcacatgggtgtggcctccaagctccccaggaaagcagtggcagcctctggggtttacaccacaaatatatcctgtggccctttcagcaaaaaaaaaaccttaaccaggaagggggcctgtgaaggttaggacccttcccacagccccgctgtggtccagccccgggacccatggcctctctccaggccctccgcaccccgccccatgccccagtcctttcctactccagaaatgctccccacccccccaaagagggaaaagcagataacccaacaggaggtggtggggtctgacgtgtccaagtgctggcagacaccctggtcacccaggacagagcggaaaaaaaaaaaagaggtcagggttttaacgagctatgcaatctttttccaaaacccaaggttgggctgcttcccacccctgcctgttccccttctcccggcctccttcacaatgtgaagctgtgggtgcagtgggcccaagggctcttgctcctgtctctgcctctgggtcatgagtaccaccctgcctgcctccccaacaccgtggaatcctcactggtgtgctgtccacagatttgtgaactcctggtagtaaaacacttttgcatccc

SEQ ID NO: 5748 - DNA, 597 bp, Homo sapiens
tcagggcctatgcctgcagtttctatagaatagagggcaggcgttccgagcctcttcctgagccccaggtctcttcagtctgggcacaggcatttctgccaagtctgttagatctccaggtcagggcacagcactggctctacatttaccaggtcttacgccaacaatagctgacaattccaagaagcttcacgtgtgggtagttttaattcagtttaagtattgctttttgttcaggtgacaaatgagatcagctctccttccagaacgaaagggctgataatttttggccttagttccaggtagattaaaaagctgctagctcacatacaggacagccagcagtaggctgtggagcgggtaggagagagatggctgatactgctcacgtgcgctgcaggaaaagcaatcagtcacaactcacctagcgacctgacttactctggaatcttggcgggcatcgccgaccctattattccattaccaggcactccgccacccacatgccaactgacttgatgcttaataaaactgctgctgcctgtttgattctatttaatgtataatttgaatattaaaccttttaacagaactgtc

SEQ ID NO: 5749 - DNA, 194 bp, Homo sapiens
acatcaaagtctccaggcttatgctgcaaagagaatgtacggattgatcatgacattccttaccttcttaggcttgtttaaaagaaatatagcatttattgtagcaaagacttaaattttgtagatacaatatgaatcttttcatgttttattggaaatgctgttcatactttaacataaagctttcttaatgc

SEQ ID NO: 5750 - DNA, 1294 bp, Homo sapiens
gcactaagctgtgtgcctgcctgggagacttccttgtgtcagggcaggaggaggctgcttcctagtaagaacgtactttctgttatcaagctaccagctttgtttttggcatttcgaggtttacttattttccacttatcttggaatcatgcaaaaaaaaaaatgtcaagagtatttattaccgataaatgaacatttaactagcctttttggtatggtaaagagatgtcaaaatgtgattctatgtgattagtatgctatgctatggaatatacatgtaaaaatgtttccttttagttgttgaaacaaaactggatagaaaaatgctgttcagaaatatgaaaagtcattcagttatcactacagatctcccagtaatttttcttatttagcccataatctctttgaaggtttatactaattcagcaatcccccatcgttacccatttcttaccatgcatttctcgttctttactgggtctaaagggctatgcctccatttcagagagcttcaactacttctcttgcatacttctaaattataccatgagaaatcatgcctagttattcattgttaatataactgtcttagtacaccataaactgggtggattataaacaacagaaacttctcagttttggaggttgggaggtccaaggtcaaggcaccagcaaatttggtgtctggtgagggtcctcttcctcaaagggtgccttctagctgtgtcctcacatgactgaagggactagctatctctgtggggtctattttataagggcactaaccccattcatgagagcagagcccccatggcctaatcacctttccaaggccccaccttctatctaagacaatcacgctgggaataggtttcaacatatgaattgggggaggacacatttggaccacagcatgaacctttagaacagggtttctcagccttagcactatggacattttgggctggataaatatgtgttggtacagaatgggggtatcctgtgcattgtaggatctttagcagtaccctagcctcaactcactagatgccaatgacataccttgcttcttcaccagttatgataaccaagaatgtctccattgttaaatgttcccttaggagcaaaattgcccctggttgagaaacattgctttagacaaattgttaagagtatcatgtactacacttctgaaacttaacgtgatcatcaccactgacagatgattcacagagactgtttgaatcttgtctcactagtttttcctgtgcaaaaataaaatggacagaattgc

SEQ ID NO: 5751 - DNA, 839 bp, Homo sapiens
gggccccctgggttgtggggtgagaggatgtgagtggccgggtgggcactttgctgcttctttctgggttgtggctgatgaggccctaagtaaatatgtgagcattggccatcaaccccatcaaaccagccacagccgtggaacaggcaaggatgggggcctgggctgtcctctctgaatgccttggagggatcccaggaagccccagtaggagggagcttcagacagttcaattctggcctgtcttccttccctgcaccgggcaatggggataaagatgacttcgtagcagcacctactatgcttcaggcatggtgccggcctgcctctccatcaccatctctctccacttccccttgtccagttcctcacacacttctagattcttcccagctcagaggcttggcatttgccatatcatcatctttttttttttcttttaaacggagtcttgctatatcgcccaggctcaagtgattctcctgcctcaacctcccaagtagctgggattacagaaagccgccaccgtgcccagctaatttttgtatttttgttggccaggctgatttcgaactcctgacctcaaatgacccacctgcctcggcctcccaaagtgctaggattacaagtgtgagccactatgcctggccttccctatcttctacctgaaccttcttcctcttcccccagggcttcccaagctctttccacagccacatcagtcagggcatggctccaatccattctttgctccaatgtcacctcctctgagaggccttccctaaccacccaatcattctaaagcagcctccctacagtcacgttaccctgcctccttc

SEQ ID NO: 5752 - DNA, 218 bp, Homo sapiens
ctgcgccaggatgcacagaccgaccgacagacctcagtgcccaccacgggctgtggcggagctcccgccccctgcgccctaatggtgctaaccccctctcactacccagcagcaggctggggacctcctccccctcaaaaaaggtatttttttattctaacagtttgtgtaacatttattatgattttacataaatgagcatctaccattccaaagca

SEQ ID NO: 5753 - DNA, 380 bp, Homo sapiens
gccgtggcagccgcagcgcagactggcggagaaggagaggaacgggcagcctgggcctgggtggaaatcctgccctggaggaagttgtggggagatccactgggacccccaacattctgccctcacctctgtgcccagcctggaaacctacagacaaggaggagttccaccatgagctcacccgtgtctatgacgcaaagatcaccagccatgtgccttagtgtccttcttaacagactcaaaccacatggaccacgaatattctttctgtccagaagggctactttccacatatagagctccagggactgtcttttctgtattcgctgttcaataaacattgagtgagcacctccccagatggagcatgctggtcctgg

SEQ ID NO: 5754 - DNA, 200 bp, Homo sapiens
agctgagcccagcccagacccagctgctcccggggacatgtgctagatgatactgtacatattcgtttggtttcactggattttcttcttcagtatgtgcttctccaagaatacaaatcgtccttgttcttagattcctgtagaaccggaatatgaatttctgcaccgtttcagacttcgcccacccatccctcccctcg

SEQ ID NO: 5755 - DNA, 232 bp, Homo sapiens
atctggattactacagccaaataatcagtgttttatatgagagtaaagcaaagtatgtgtatttttcccttgtcaaaaattagttgaaattgttcattaatgtgaatacagactgcattttaaaattgtaattatgaaataccttatataaaaccatctttaaaaaccaatagaagtgtgaatagtagaatattaattaaaatggaggctatcagcctgtgattttcagctt

SEQ ID NO: 5756 - DNA, 174 bp, Homo sapiens
ccagaaaggacactccatattgtgaaaccggcctaatttttctgactgatatggaaacgattgccaacacatacttctacttttaaataaacaactttgatgatgtaacttgaccttccagagttatggaaattttgtccccatgtaatgaataaattgtatgtatttttctct

SEQ ID NO: 5757 - DNA, 3465 bp, Homo sapiens
tggggcagcagtgacgcgctgtggggggacaggtggacgtggagagctctttgcccagctcctggggtgggagtggtctcaggcaactgcacaccggatgacattctagtgtcttctagaaagggtctgccacatgaccagtttgtggtcaaagaattactgcttaataggcttcaagtaagaagacagatgttttctaattaatactggacactgacaaattcatgtttactataaaatctccttacatggaaatgtgactgtgttgctttttcccatttacacttggtgagtcatcaactctactgagattccactcccctccaagcacctgctgtgattgggtggcctgctctgatcagatagcaaattctgatcagagaagactttaaaactcttgacttaattgagtaaactcttcatgccatatacatcattttcattatgttaaaggtaaaatatgctttgtgaactcagatgtctgtagccaggaagccagggtgtgtaaatccaaaatctatgcaggaaatgcggagaatagaaaatatgtcacttgaaatcctaagtagttttgaatttctttgacttgaatcttactcatcagtaagagaactcttggtgtctgtcaggttttatgtggtctgtaaagttaggggttctgttttgtttccttatttaggaaagagtactgctggtgtcgaggggttatatgttccatttaatgtgacagttttaaaggatttaagtagggaatcagagtcctttgcagagtgtgacagacgactcaataacctcatttgtttctaaacatttttctttgataaagtgcctaaatctgtgctttcgtatagagtaacatgatgtgctactgttgatgtctgattttgccgttcatgttagagcctactgtgaataagagttagaacatttatatacagatgtcatttctaagaactaaaattctttgggaaaaaccctcaattgtgattttaataaattaaaagtagcacattacatggttagaaaatgtcagtgttaaagaatggtacaaagtgaaaagtgtatccctctcttgccgccggtggtagcttgtcccagtggaagctgctgttaacaatttgtgcccccacatccccctccctgcccatccaccaaaaaaaagtacatttacttatgtaaatgtacttatggtgatgtatgtttgttttggcctcacagcatctgtttccccttaatttggtagctgctcacatttccctcgaaagaaccacaccctctgcattctcagttctctgctttggatgggacatttgccctgcagtccccccaccctccaggccatgccctctccagggtgaggcctgtgtgatctaccgtactagggtactaggccctgaaagaggcttttcttgttcctcctgcatcttgaacctggagcgggagctgttgtaggccccgcccttggagaagagaactgtctgacagtggggagagagcgccacaccctggtggcataaacgagtccctgaatcatgccgtggctgaaccaagccctgtctgtgggctttttctgttgtactcagggcagtttgatggggttactgtcctgcatagccataatggcccagtataaagcagctgttttgatgagataattgctttaattaagcaaaaggtagcaaagctttcactccgccctgtaccttctgtttccacttaggagccttcccatgtcagaatgtgcagatctgtctcattgtttcctgtgcagtgtgcccccacttcacccagtagtttctgtgtgtctgttatgtactaggtactacaaggtgccaggacggtgtagatacagcctctgctatcgtaaaactcaatgattcggtgggggaagacaaatgtcagtaatgtacaaagtaaaatggcagctgttagaagtatgaaaggggcagggtagggggaggtagaatcttccctgaccaggttaagaaaaccagaggccttctctgagggcaagaggaggagaggagaaatagagtaaggcaggcagaggaaacagtctgagctaagaccctgtggctagaagtggcagagggagaggcagcaggaaggccagcggggaggctggggcccagtgcaggcccaggttggaggagcgtagcacatggagtttggtaggagtttgggacgccctggtggatcttaattgtgatggggtgggtgtgaaaggcagtccaggttgcactggttgcacaggagaagtgatcagaagaggaccccagcaggtgtgagccgtgagctgggaggtgcttcagtagtgcaggccatagctgaaggtgtcctacatcagcagggtgatggtgaggtttgaaccactgtttcactgcatagtccctgctgatggacacttgagtgttcagattttttgctggtatattcagtgctgcagtggacattttcatacaaaatatttcggtacacttttgtttatatctgaaaggtaaattcctagcagtagaattattagagcaaacggaatttaacattttggtgtgtattgccaaattgccctcccaagtggtttagtcagcttacccttgccaacaatagatctatccttgccagccttgggcatcacatttaccagtttaatagattgtaaaaccatatcttaattggctaccctgaagccaccatactggagaggctgcgtacagtgtttcacgtagagagagggatacccaggaggcccacctgctccaaccccagctgcatgagtcttcccagcccaggcacagacatgtggataagatttaaacatttccagccccagccttcaagcaatcctagttgacactgaggggagccaacataagctgagctgagaaacagtctgcccagtctgcagattcatgagcaaaagaaatgttgggctgggtacagtggctcacgcctgtaatcccagtactttgggaggccgaggtgggtggatcagttgaggtcaggagtttgagaccagcctggccaacatggtgaagccctgtctctactaaaaattagccgagtgtggtggtgcgggcctgtaatcccagctactcaggtggctgaggcaggagaatggcttgaacccgggaggcggaggttgcagtgagccaagatcaggccactgcactccagcctggatgacgggatgagactctgtctcaaaaaaacgaaacaaaaattttttaagagaaatgtcatttgtttttgtttttgagacagggtctcactctgttgccctcactagagtgcagtaggatcacggctcactgaagtctctacctaccggctcaattgatcttcccaccacagcctcccaaatagctgggagaaatgtcctgtttttaatgaatttgtcttcctttttgtcttgtttgttttaatatctagtgatctaataaatttggatgatatcttttgactatc

SEQ ID NO: 5758 - DNA, 583 bp, Homo sapiens
tgctatcgttacttcttggcaaagaactcccgtgactcatcgaggagctccagctgttgggacaccaaggagcctgggagcacgcagaggcctgtgttcactctttggaacaagctgatggactgcgcatctctgagaatgccaaccagaggcggcagcccacccttcctgcctcctgccccactcagggttggcgtgtgatgagccattcatgtgttccaaactccatctgcctgttacccaaacacgcctctcctggcagggtagacccaggcctctaaccatctgacagagactcggcctggacaccatgcgatgcactctggcaccaaggctttatgtgcccatcactctcagagaccacgtttccctgactgtcatagagaatcatcatcgccactgaaaaccaggccctgttgccttttaagcatgtaccgctccctcagtcctgtgctgcagccccccaaatatatttttctgatatagaccttgtatatggctttaatgccgcaaaatatttatttttccttaaaaaaggtgtcaacttggaaataatggtttaaaaacaggataagcattaagg

SEQ ID NO: 5759 - DNA, 1373 bp, Homo sapiens
aggcagcgggcgctgctagtgcgcaccgtgctgggggaagggggaacccctccccaccctctttccccagcgctcgcctgcctccctgggtgccccccctctcccttctccttcccggccccaccaacactctgagatccgagaggagcttggaaagctgtagtatccgctcatttttaaaatttaatttttaagtaaaggaatttgccaggatatctgcatcaagagtactgtagcctgggaaacctgaacacctgaaatgcatgctctataaataataggaacggcgacattctagtaatgatagtttttacactgtacttaataggaagcttccaaaagaagaaaaccccacaagttttccattttcttaaagtaggaaaaaatgaacagtaataattatgatgaagatgatagtagtgctatgggatgtgtggactgtttagtgtgttcccctttgtgggtgggttcctatgatacttattatagaacacagtggatcctttttgaatgttcgtggaagggccaggagttcctgtgaaaccaggatactgcagctttattaaagttaaagaaactgtaacatatctcttatatattaaaaacgtttaaaagttttaaagagaaattgcattaatacagattgaagtattttattcttttttgacttgaaaaattatatttcatattgcaaagatgtttacaagtattttaatttaagttcagtgaacttttttgtagctgggttaaatctttttattttagtatggccttatggcaaagaacactgtattattttaataatcacacaattgtgacggaattacaaccataaaatgtgtaatgttttgaacagtattctgttgggatggagattttataggttcagacaaatcttctagatctgcttcacccagcatattttctattcagtgatataaagcatattttattctatattattacaaaaacggaaatgtataaacatgtcaaaaagaactgttgatgctttctaacatttgtataaatagaattcagtgcaagttacaaaaattctgttgcaccactctagttttagtatttctattttaatacatttgtttaccacttgtttatgtatatgtaggtgatgttacttgagcttaaatgtactttactgagcaaagtttaaaaaacaaagtatattttattttatgataaagggcctttaacctcatggtcaaatactaatattatatttgctgagacaagatttgaaattgtatcaagagttttatttttctgacatttaaagttctacataataaaggtaaaacttaagtaatggtgctacttcattttttaagtatttctatataaataaaatattgaag

SEQ ID NO: 5760 - DNA, 153 bp, Homo sapiens
ctacctactactggtggattcttttccttatagtgaatttaaaagtatcatcaagggtttaatattgggaaaatttctttttgccacattatctctgtttattcactttcaataaagttgatccatataaatattttaaagaggatgttagag

SEQ ID NO: 5761 - DNA, 48 bp, Homo sapiens
attttttctgtagtgctgtattattttcaataaatctgggacaacagc

SEQ ID NO: 5762 - DNA, 48 bp, Homo sapiens; identical to SEQ ID NO: 5761

SEQ ID NO: 5763 - DNA, 1391 bp, Homo sapiens
aggagctggccttgcccagtggcctgtggcgcccaaagctggcaggtcaggcaagcagcctgcaccaccctgccactggcgaccagggagctggcttcccaaggacaagggaaaattgtagtcacctttgcacttgctgaatctgtctttgtttctgcactaattaatgcacattgagttttgtcaggttttgttttcagggggtgtaccaagggcaaggaccctctggcttaccctccaagcgactctgtagttttcccagattttagttcctcattttgcagatgaaaagcggggaaaaaaaaaaaaaaaaaaaaaactacgtgtccagaaggtattgaggtattgacacggatgcctacacctaggtttatttattaaaagcgcttttttacattccttgcaatactgatggtgatgatgcgcaggtctcattggtttcattcttgcagttgccatacagtgcctttccatttatttaacccccacctgaacggcataaactgagtgttcagctggtgttttttactgtaaacaataaggagactttgctcttcatttaaaccaaaatcatatttcatattttacgctcgagggtttttaccggttcctttttacactccttaaaacagtttttaagtcgtttggaacaagatattttttctttcctggcagcttttaacattatagcaaatttgtgtctgggggactgctggtcactgtttctcacagttgcaaatcaaggcatttgcaaccaagaaaaaaaaaattttttgttttatttgaaactggaccggataaacggtgtttgagcggctgctgtatatagttttaaatggtttattgcacctccttaagttgcacttatgtgggggggtggggttgatagaagtttttaatcacaaagtcacaggacttttttcttttgtaactgagctaaaaagggctgcttttcggtgggggcagatgaaggctcacaggagccctttctcttagagggggcaagtacccttcccttatatctttaatttgaggaatgtatgagataacagttgcagttgactgaaatgccactggaatttgaaaacttgacttttttttctttcctttttttttttttttttttttttaaaaagaaacaaaaaacccacaaaaactacttgcccctcctagggaagctgtgtgccaaagaaccagtgtcataacccctccctcctgctgagctgacgttgcattgttgcatatcccagctactctgtgggttttgtgaagctgtgtgtgaagtctctacctcattgtagtatatgcaggcaagactgcactctcctacagatgtgtggagtaagctgtggtgtagtttttttggcacataataaacacgttgcagcaga

SEQ ID NO: 5764 - DNA, 278 bp, Homo sapiens
cttccaaatgctgtgacctgtttggctcccatctatacctccccatgacacctaggctgtcagtctctctcatctttctctctctctctcatcatcctcctcatgccagatagcattcagggtgtcctctctccctctggaggaccaagccctcccctaatgccctccccatggattccttagtgatctgtgcagagagagatggcagccactcccttcagtcctcccagatttctgtagctatttatgtagcaggctcaataaaatgtcttctctct

SEQ ID NO: 5765 - DNA, 76 bp, Homo sapiens
aacattctgatgtccagtttcctgtcttccatgcctacccctctcgcagctgctcacgccttagctggctgaacct

SEQ ID NO: 5766 - DNA, 729 bp, Homo sapiens
ggctggccgaggcccaggccccgcccgtgagtcccaagcgtgtgtgcgagaccagatagctctaggacgttcttctgtgtgcattgcttctgtaaatgcaggcgcagtttgtcgtgtttccaaaccagttgtgccgtccactcactccttttcagaatagaaatctcctctcgcttctctggccttgtgaggttgtggacaactggaagattctgactcaggaatccagaactaggtctaccttcaacatttatgcagtcagggcagggatgtttatatctttcataagggctgttgcaaccatatgaactgaaaaaacacgcattttgtaatccaaatattgatattctttacaccaagccatcaggctccttttatcaaatagcattcagagtatttgaatgtccaccagacaccagccccggggggcacagagagaacaacattcctctctgtcaacatcgagaggctttaaaacaactgtttagtggaaactttctgagagatggaaaacaagcttctggtgggtgcattttctggcccggagttgcctgcatccacgctactgccccctgccccccgcccccccagtttgtacggttgcaacagtgttccttttcttggttttaatttctgagcagatgattgtgctgtgggaacagcacacagtgagggtgcctagcacaatgtctggcacaaagtaggtgcttaataaatatttgttcaatt

SEQ ID NO: 5767 - DNA, 945 bp, Homo sapiens
aagcaagaaatgaggccgggcgcagtggctcatgcctgtaatcccagcactttgggaggccgtggtgggcggatcacctgaggtcaggagttcgagaccagcctgaccaacatggtgaaaccccatctctacgaaaaatacaaaattagccagatgtgatggcgcatgcctgtaatcccagttactcaggaggctgaggcaggagaatcacttgaacctggggggcggaggttgcagtaagccgagatcgcgccgttgcactccagcctgggcaacaagagtgaaactctctccccccgaaaaaaaagaaataaaaaatacatccttgagaaacttttttattgctaatggtgaagaggctgttaaatagaaaaatatactacatgcacagaagaacatgggggacatatatatatgtatatattcgaataagactccaaaaagtagaaatttaaaaagtgctatacattgcatcaggttctaaaatcccaaaccccaaacagcctggaacatgttactctgatttcatggcgttgtaaaataacagagctgggaagaatattcaagatgacctgatttaacacctttcattctgttggggggcctttgatttcctatatccagaagttgagagacttactcaagattgtaccatgcaagctggcaactagaacccaaatccttggactacttgttgaatgcagtttttctagattgtaaattaaaaatcatatctccacaacggttctggaattctggggattgccttctaatccagtttacaagtgacagaaaacctgttatgctgctttgtagtcttaccttagatttttaaatgcttatttaaatgtaaaaaaaattttttttttacatcttttaaagactatatttaccattttgttgaaaaagtaaagaaaaatcatgacttgtaattaaatgtgaatt

SEQ ID NO: 5768 - DNA, 1795 bp, Homo sapiens
ggtccagattcccactatggcacaaaaggattgaagaaagtagtgcatgagacacctgctgcaagcaagactgtttttttcttttttagttcccctggcaataataatggcacttcaatagaagatggacaaattccagaaatcatattttatacataatttagcattataatacatcttggctaaataataccatacaatctagtgtcaaaaacataaatggccacaaaaaagtagtttgagtgttatgaatatttaaaattgtaagataagaaacagtttcttagagcagatagaaaaatgcttatttaaatctttgcatgatttaaaaacagattttccattttcttacaactttaagagaaaagaactgggtttaatggtttaaaaaaaagcacagctttttcaccttcatcttgtataatttcatagattggctgacttagggtctttcaatagtttgggaattgaaagattcttgttatatatagctagtttgggtttgtttttgttttaactattttgaaggttaggtgagatgggcaaataggcttaactattttgaaggttggatgaaaagagatgggtcagtattcctacagaattcttattaactcaaataactaaatttcagaaaattaagaagctgactttatatttggtggtttgaagtatcttgttgttagcatttgtaataatgctaaaaaaggcctaataaaatgcccaagaaaatattcagtgcatttatagagaaggatattttgtagtagtatagtaatgtgttatgtagtacagttttaaagctataaatggaattttgtgtaaattcacaaaaatgtgatataaacaggatctaagactggattccctgtcactaaactgcaccactatacctgtctctctgtgtgggggacactgctgatgattcccaagattgagatgatgacggtgatgacgactgggtgaacagccatcacttcaacattgtgataatccttcacagcaagaaaccgaataaaatactaacatttctaacaactgctctgacattgtaaagagatccaacagaatcactcctgctgaaaaatacgctttctgccacctacacatttctatttaggaagtaaaatttgcttcatggtcatgaccccattagtcagtgttacagctgtgttggggataggaagtatatctggcagattgatatttatacacttttttataaagcagattttaaaatatagtaacatccatttttttcccttgaaagtgattctcttataaaaaatgaaagtggagtttaaggtatatcaaatcgttgtggaaggtgattaaaaatcaaaattcttttaaatatcaacttaattttttctaagtaagatacaaaaaattttcatctaaagtaatatttcactttatattgtaaagaaggtaggtatattggtggctgaggtctcttgaaattgctaaagggaaatttttctatggtaatgctcttacggatataaacctcagttaaatggaattatctatgggatgtgtggttctggttaactaaaaattaaccagtaaacactctgtagtaaccattacagaaaatacttctgccttaaaaaatatgatatgccagagatgagttagtgtttcttgacgttggagaccttttaaatgcctcatctgttgtactgaacaattgaaactgcatgcagccataaaagggacaagaaacagaactgtttactaactttgggacatcccctggagtttttaaaaataaataaatatatatatatat

SEQ ID NO: 5769 - DNA, 1206 bp, Homo sapiens
ctaccataatgaatgctgcatattaagagaaaccacaagaaggttatatgtttggttgtctaatattcttggatttgatatgaaccaacacatagtccttgttgtcattgacagaaccccagtttgtatgtacattattcatattcctctctgttgtgtttcggggggaaaagacattttagccttttttaaaagttactgatttaatttcatgttatttggttgcatgaagttgcccttaaccactaaggattatcaagatttttgcgcagacttatacatgtctaggatccttttatcaaggcagttatgatcatcgttttcctgccttgaccccaccatcatcaaacactcagttaaatataaattaacattttttagatgaccactcaacataatgcttaagaatggaatttcctctctgtgacagaacccaggaattaattcctaaatacataacgttggtatattgaagacgaaattaaaattgtccttcagttttgaggccatgtgtaaagtttaaccatattgtaaaatatctattccgtattagaaatagctagttgacagcttatacttctcaaaattcatattgttatgtacacaaactaagtttctatatgtgaagttagtgagtctttttgtgttactccaaaataaaggcaatgatttatttttttcccagtgccaatacaattttgagctaagcactcaaggtggatactttacattttaaagctggaatcagcaacagccctatgggaaaccagacaaagcattgacttttaaatgtagacttttaaaataaactgttttcttttggaactacaattagaatagttaatattcatccttaaaccattattatgtgtacattattgttgctattgtgataatagagaattttatttatttttatgccagcttatattgtgagaacacatttagtcagtttgggttttatcaatcctgttaatgcttgtccttggaacatctttcgcgtattcacggtttgtagttgaaaagtttactgtaaaaaaatcaaaaacaaaaaaatgtattgtttttacagaataaatttattggaatgtgtactgggagtaagatttgaggttgtaagcaaactaagttagtgtaatttggcttcatatatgtaacgtgaggtattaatgtaattcatatattaaagcaaaaattgttcacagc

SEQ ID NO: 5770 - DNA, 1539 bp, Homo sapiens
caagatggcaaaccaagtatgctcagataagcttttttcataattcaggaataaagtagtccatagaaatgtttctgtttcatatcatttggggcgagtcaggcaaaagtatttgatttgactttatagttttccacagcacaatgagcaaaagacaaacctcgtgggaagatgacactggggcagcccttcctattatttttcttagcccaagaggtctttcactgatacaaggaaaacttgcagaaatgtgatttttcccagatttgtttacatgttccctgggacagatccaggtctgcagatcgacaccagtgggcccaggacctgggggtggctttaaatgaggcttgcagtgttaaaggtcttggataagaagggtcctggggaagaagactctgtggacaagataccagtccccaaaacagcattttcagttccttcttcaattagtttgaaatccagacctgagtttggaagactgattttttgagaccatccctgtgtttggagtggataattgtccctcccctcagccctgcaccagaggtctcatatgttaccccagggagttctcagaggattgggttggcctctaacatgttccttgttaattcttgttctgtaacatgcattcaagaagctaggggaaaaatatctcatgcacttaaataatggtcttcaatttaatttaaaaatattttgacaatatttaatttgtgcttatgtggtgtttggtgtgagtgcagatattgcactgtgtcacctctggatctctgctcagaagcagaacaagtgatgacctaaatgtcaaaatcactgctcgttttcatttggtgaacttcaaactctgttctttttggtcacctgtggaatgaatgcaagcatgattttggcaggaacatttgtacatattctgccgtagataatgtggttctgatggttgttgtgtattttcagtatcactggatccctcagtcttcaccgttttataaacgtataagattaggatgaacttttgaatttacttggtaggaaaaaaagtaggacattattgccatattgtatgtcttaatatttaacttattcggaaatatattccacactgttacatacattttccatggtagaaaggaagttcagtcagtcctgtggaatgaaaccatctcctaaaattcagcatttgcagcattctaaaagcctgtgtaggtacaaggacattgattttgtattcagaattcaagttaactatcttttaaattcgtggttgatgtaagtaataaaaaacattcttaaagttgagggttataagagagattatttctgtggtctaaaggttaaaaagccaacaacctgttaccaattatttcagctttttttgttttaataagtgtgacaacttaaaacttgtttctatttaaagtgaaatgtatctttcaactgtttagttacccagctgtttaatattccagtcttcccaaagtgaaaagatttgtatacaaatgttttctatgatttaataaaaatatatggcacacc

SEQ ID NO: 5771 - DNA, 690 bp, Homo sapiens
caccagcatctttccatctaggcctctagaaaggggaggagctgctgtagtagcaagggtgctcatgtaggactcaagtgactaccagtccctgttaccagctgtgtggccttgggcaagtctgccagcgtcacttagcctcagtttccttatctgtaaaatgaggatagtaagaactacctcgtagtgatattgcgaaggttagaagaaacgcatggcataattacttggtagctattgttagatctgggagtgtgaaatggtagcgttttgtccctgtcttcacactatcatagggagaatcaaaagagctaacaaatataaacatgctttgtgaatttttttaaagaaaaaaatgtagaggggccaataaacatgaaaaaatcccagccctagtagcaattaaggaaatagcaaaacaggatttctgctcctcttgagtgggtctcatgggaacacaggtgcactttcccacacttgtccccccaggtgactaggttcaagagacatttgcttttggtggccccacaaacatttccttttgagggcccatagtgaatattaaagtgtgctggacatggtggctcatgcctgtaatcccagcactttcagaggctgaggtgggcagattgcttgagctgaggagtttgagaccagcctgggcaacatagcaagatcccttcccttaaa

SEQ ID NO: 5772 - DNA, 243 bp, Homo sapiens
caccaataatggggcagacacaacagcgtggcttagattgtgcccacccagggaaggtgctgaatgggaccctgttgatggccccatctggatgtaaatcctgagctcaaatctctgttactccattactgtgatttctggctgggtcaccagaaatatcgctgatgcagacacagattatgttcctgctgtatttcctgcttccctgttgaattggtgaataaaaccttgctctttacatac

SEQ ID NO: 5773 - DNA, 473 bp, Homo sapiens
gaagcctgccttgctgttcctgggaagatgccatagttttcgttactggatgtttggagtagatactggtctgtgattggtggaatggagaacacacgtgttggtgcttctgggtagcactggtttgcattagtttatgtttccatgccagagtttgtgtgggcgggcgcatgtgcaccacagagtgcactcgaggggactttcagtcacaggatttcataattgtcattgtcacactttcaaatttttgtacatcagtgaatttttttatattaaaaggttgagccaaagcccccagtgtttgtattttgaagccaagcttcacttctaaagtgcctacagagacttgtaaatgaaaatgcagctctgcacgagtttgaaaccgtcatacctccttctattaggaatggcatatactgaggtggtcgtaagtcttaacttctaaaattttaaataaaagactttgcacattg

SEQ ID NO: 5774 - DNA, 1682 bp, Homo sapiens
accgcggccttcagtgtcacagcgtggccttgcttgtctgccacagcgggagctaagccggccctgggccagcactccgagaggtggaaggggccctgccagctctggggagcagcagccttgggctgttctgagctttaggcaagagaagagaagcatctcttgcatccgtgcccctgggggcctcttcagctttgcagtggtttgtgggaagacatacctcccagaggggcatggactgccaccaggactgaccctggcgtcggggagaaggacacttgcagagccttgagatcacctgtttggcaggtcctggactggggccgggcaggcaggggcagggaggcgccccgggtgggctttggggctgcggcactgccacacatcctttccctcctggcctgccctgctggggctctactgccatctatagatggtgtcctgggcctgggaaactaggttcccaggggttgagaccagaaaggtgaccaagacagattttttaaggtgcagaaactgcaggggggcctcagtgacatccatgaggccttattagcaaaggacacccagacctccaaggtttgtgggccccttccacaaagctgtaagtcccagcccacctactcagggccttgctcagtgctgtggcccggtggggacacagttgctcgtggccactcagtggagctgggcctgcagcagactcaaggctccgagtgccctgggggtcacccctcccctcccctcctcagagcccaccctgagaggcagcagtgacccccatggcacacacctgccaacagcactgggggcttctccccaggagaccacgctgccctccaagaccaggagcagctgtgagctggagacagcagagggaccccagggtgtcccctgcagatcccaccagggccgcatccatctcagtgtggaggacagtgacgggaccctcaccatcctcttgcgttttggcccccatttgctccctgagctccaagataagaatggccccgagagaactgctgaacatttgttcattgctgtcacctcctgagtcactggggtccctcaccagcacctccctgacacctgggctatggagaggttggcgcctgtcagtgaccatcctaatgcctctcgctcactcccaagccaccatttgagagggaggggtgttggtgccctgacagggactgggcagggtgtccaaacttggggcttcccaggcacctgcagtgtgaacactgcttggctggctcaagattagggccgcggagggggctgtgcacataccagttacttaagcagccacgagtgtcccccatgccttggtgcgggtcctggaggcctcttgggggtgggacctttgggcagggtttgcccactgacacgcccgccatggggcactggctgcatggggctccttggaccctgtagacccagcagaccccgcctgtgtcaggccagctgcccgaaggcacttggctgtggtcccaggggacggctctgctggcacactcaggagcctggccgcggggactgcagggagggtgcctggacccgtggggttgcttcattgagataaagcacacttatcacatagcacaaaggacgtgccatggtgctttccccaaaagttgtgttgcttttatcagttttctaacttaataaaaagagttgag

SEQ ID NO: 5775 - DNA, 1981 bp, Homo sapiens
aaactccttttaagcctccttgttttgatgtcaccttggtaggctgggccctctgagaggttggaagctctaggcattgttctctttggatccagggatgctaagtagaaactgcatgagccaccagtgccccggcaccctttaacaccaccagatgggtgttttcccccatccaccactggcagggttgccccttccctccaatcatcactgtgctccttttttcccggcctacgaggcagctcctgccactatctttagagccaataaagagaattaaaaacctgtgcaccaggagcatcttttaaatacactagccattctcttgctttacaaaaacaacctaaccatcacaagaaagcctgatgaagtccagccgtgctccagcctcactttccctgcttggaagcgtggggtctccctggctctcccaggataccatgctgtcctcttagtgacctcgtcgccctgcaacctccagtggggaagagtcacagagagcacctaagcagaggtggagacggcgcggtaagaggagggggagccaggctcaagtattggcaccaagttaggtctcagaggaaagaatggaaaccaatcactttacatttttatttttattttcggtggaaaaatcatccttttttgggacatacttgccccctacttcctcttctctctggaacggctcacaatgagtgtgacattagaaaactccttgcagaggagagtttctccaggctcttcctgggcccttagatctgcagttccgacaagctttggctgcaggaggttttacccatgaactggccatcctactaggaccacaagggaccaagggaatcagggacaaaggcccttcctgccagcccatgatcccgggattggctctcttcccctacttccacttattcttgactctgagaacttttggaacccaatggaatcagcatttcaaggtcaagatgaactgaaggggaagagaagtaaaacttggcctcctccagcccctctcatggcaccaatggaagtgtcctcctgttctctggtcaatatgtgtgtttactttgcttgctttgactcatgccttactccatggccaccctctcccaaagagggggctcgcttcccccattttcaacttgatccactgaggagagggaagggggtgactttcccttcttcagtaggaaaggcacatttgtagggcctgaaactctcccgtatttgctgactcattggtggagtagacttctggctcccagctccactggcccatggggcctccattgtatgaagtcagcataggctgcccacctaatggtggagagcatgaaactgggagcatcctgtggggggcttgtgggggaaaaaggtggttgttttaacccaccgttgttttggggtggtgttgcacactagtagagaatagagtctatgcctttggcaaatttaactgggagtttggattcccacttaagggttttacttcttgggtcctgtggatggtggttcttcgtgtcaggatcccagcccgattctgcaaatgcctccatggggtttaaaaacatgaggctttccaagttcttgcccagtatctggggcagcctccagagtatcacctgggagttcaggttctctccagggctccaggtgtgtgtttatctcgccccctccagctctcctcatcctgctccccattgctccatgtcaggctgttccccattgtgccctgctgatgctttgggtccagggcctcctcccaagtgtggctttaaggagtaagcttgaggatgatgttttttaattattgtaaatcattacctcatttccagcctcccaggctccatccatcccagcatcttttattctgccattttcctcaccttgtgctatgacaatggggcgttgtgtttccacagagacttataggagtgttcagtgtatagtttcttaataaacactttattttctaatgaaa

SEQ ID NO: 5776 - DNA, 178 bp, Homo sapiens
tggtggctggtggtcatgaattcatactctgttgcctcctctctccctgcctcacatctcccttccacctcacaactccttccatccttgactgaagcgaacatcttcatataaactcaagtgcctgctacacatacaacactgaaaaaaggaaaaaaaaagaaagaaaaaaaaaccc

SEQ ID NO: 5777 - DNA, 134 bp, Homo sapiens
tgggccgagctgcctgtggacggtgctcagacaagtctgggattagagcctcaaggacattgtgtgattgcctcacatttgcaggtaatatcaagcagcaaactaaattctgagaaataaacgagtctattact

SEQ ID NO: 5778 - DNA, 468 bp, Homo sapiens
gtgcctcaccagagccagattatctggtcttccaagactttgccactcacttatctcagtggactccaaagcaaaagctcccgactactagctctgttagttccagcctgctatacctcagatgggagagagccagagagaggagtgagggtggctcaacctaatggaatttttaaattgtatacaatactgctactgattgttataatatcctcttgcgttttccctgtgggaatgcccagcattaattaagtccatttcatttttgctttactttgcatttgattgctgtgaagatgaaagcattagacttttatccccttcatgtcacttcttcggcattatggtttgcatctgaaagcagttaaatcttgtttactgatgagaatgacatacatcctttccatttagctcataagcacggctatctttttaagagaaaaataaagccatggtattttcatactt

SEQ ID NO: 5779 - DNA, 681 bp, Homo sapiens
gacctggggccctcccctgccgcattccctcactggctgtgtatttattgagtggttcgttttcccttgtgggttggagccattttaactgtttttatacttctcaatttaaattttctttaaacatttttttactattttttgtaaagcaaacagaacccaatgcctccctttgctcctggatgccccactccaggaatcatgcttgctcccctgggccatttgcggttttgtgggcttctggagggttccccgccatccaggctggtctccctcccttaaggaggttggtgcccagagtgggcggtggcctgtctagaatgccgccgggagtccgggcatggtgggcacagttctccctgcccctcagcctgggggaagaagagggcctcgggggcctccggagctgggctttgggcctctcctgcccacctctacttctctgtgaagccgctgaccccagtctgcccactgaggggctagggctggaagccagttctaggcttccaggcgaaagctgagggaaggaagaaactcccctccccgttccccttcccctctcggttccaaagaatctgttttgttgtcatttgtttctcctgtttccctgtgtggggaggggccctcaggtgtgtgtactttggacaataaatggtgctatgactgccttccgccatcccc

SEQ ID NO: 5780 - DNA, 710 bp, Homo sapiens
tggccacctgccacccccaggtcttcctgctttccatgggcccgctgcctcttggcttctcagcccctttaaatcaccatagggctggggactggggaaggggagggtgttcagaggcagcaccaccacacagtcacccctccctccctctttcccaccctccacctctcacgggccctgccccagcccctaagccccgtcccctaacccccagtcctcactgtcctgttttcttaggcactgagggatctgagtaggtctgggatggacaggaaagggcaaagtagggcgtgtggtttccctgcccctgtccggaccgccgatcccaggtgcgtgtgtctctgtctctcctagcccctctctcacacatcacattcccatggtggcctcaagaaaggcccggaagcgccaggctggagataacagcctcttgcccgtcggccctgcgtcggccctggggtaccatgtggccacaactgctgtggccccctgtccccaagacacttccccttgtctccctggttgcctctcttgccccttgtcctgaagcccagcgacacagaagggggtggggcgggtctatggggagaaagggagcgaggtcagaggagggcatgggttggcagggtgggcgtttggggccctctatgctggcttttcaccccagaggacacaggcagcttccaaaatatatttatcttcttcacggg

SEQ ID NO: 5781 - DNA, 418 bp, Homo sapiens
aaacatctcctgccagctgaactgtagttagaatctctgggcctctcctcaactgtcctggacccaaggctaggaaagggctgcttgagatgactgtggtccccccttagactccctaagcccgagtgagctcaggtgtcaccctgttctcaagttgggggatgggtaataaaggagggggaattcccttgaacaagaagaactggggatagttatatttccacctgcccttgaagctttaagacagtgatttttgtgtaaggttgtatttcaaagactcgaattcattttctcagtcatttcctttgtaacagagttttacgacttagagtctgtgaaaacaggcaaggagcccgggttaaaatatccccctattcgcccccaaaatgcaataaaagaagataaaagagagaggata

SEQ ID NO: 5782 - DNA, 423 bp, Homo sapiens
cactgcctggaggctctgtatttgctcccgtggagcttcatcggggtggtgcaggctcccaaactcaggctttcagctgtgctttttgcaaaagggcttgcctaaggccagccatttttcagtagcaggacctgccaagaagattccttctaactgaaggtgcagttgaattcagtgggttcagaaccaagatgccaacatcggtgtggactacaggacaaggggcattgttgcttgttgggtaaaaatgaagcagaagccccaaagttcacattaactcaggcatttcatttattttttccttttcttcttggctggttctttgttctgtcccccatgctctgatgcagtgccctagaaggggaaagaattaatgctctaacgtgataaacctgctccaaggcagtggaaataaaaagaagg

SEQ ID NO: 5783 - DNA, 445 bp, Homo sapiens
gctccacagactgtcctggggcccagaggagctggtgctgacctagctagggatgcaagagtgagcaagcagcacccccacctgctggcttggcctcaaggtgcctccacccctgccctccccttcatcccagggggtctgactgagaatggagaaggagaagctacaaagtgggcatccaagccgggttctggctgcagaagttctgcctctgcctggggtcttggccacattggagaaaaacaggctcaaagtggggctgggacctggtgggtgaacctgagctctcccaggagacaacttagctgccagtcaccacctatgaggctcttctaccccgtgcctgcacctcggccagcatctcctatgctccctgggtcccccagacctctctgtgttgtgtgcgtggcagcctccaggaataaacattcttgttgtcctttgt

SEQ ID NO: 5784 - DNA, 443 bp, Homo sapiens
gccctcggggcagaccctgccttggagggagactccgagcctgctgaaaggggcagctgcctgttttgcttctgtgaagggcagtccttaccgcacaccctaaatccaggccctcatctgtaccctcactgggatcaacaaatttgggccatggcccaaaagaactggaccctcatttaacaaaataatatgcaaattcccaccacttacttccatgaagctgtggtacccaattgccgccttgtgtcttgctcgaatctcaggacaattctggtttcaggcgtaaatggatgtgcttgtagttcaggggtttggccaagaatcatcacgaaagggtcggtggtaaccaggttgtggtttaaatggtcttatgtatataggggaaactgggagactttaggatcttaaaaaaccatttaataaaaaaaaatctttgaagggac

SEQ ID NO: 5785 - DNA, 1215 bp, Homo sapiens
gtcgccgcaccagccgccgcgccccgggccggcgggtttctctaacaaataaacagaacccgcactgcccaggcgagcgttgccactttcaaagtggtcccctggggagctcagcctcatcctgatgatgctgccaaggcgcactttttatttttattttatttttattttttttttagcatccttttggggcttcactctcagagccagtttttaagggacaccagagccgcagcctgctctgattctatggcttggttgttactataagagtaattgcctaacttgatttttcatctctttaaccaaacttgtggccaaaagatatttgaccgtttccaaaattcagattctgcctctgcggataaatatttgccacgaatgagtaactcctgtcaccactctgaaggtccagacagaaggttttgacacattcttagcactgaactcctctgtgatctaggatgatctgttccccctctgatgaacatcctctgatgatctaggctcccagcaggctactttgaagggaacaatcagatgcaaaagctcttgggtgtttatttaaaatactagtgtcactttctgagtacccgccgcttcacaggctgagtccaggcctgtgtgctttgtagagccagctgcttgctcacagccacatttccatttgcatcattactgccttcacctgcatagtcactcttttgatgctggggaaccaaaatggtgatgatatatagactttatgtatagccacagttcatccccaaccctagtcttcgaaatgttaatatttgataaatctagaaaatgcattcatacaattacagaattcaaatattgcaaaaggatgtgtgtctttctccccgagctcccctgttccccttcattgaaaaccaccacggtgccatctcttgtgtatgcagggctatgcacctgcaggcacgtgtgtatgcactccccgcttgtgtttacacaagctgtggggtgttacgcatgcctgcttttttcacttaataatacagcttggagagatttttgtatcacattataaatcccactcgctctttttgatggccacataataactactgcataatatggatacgccttatttgatttaactagttccctaatgatggacttttaagttgtttcctttttttttcttttttgctactgcaaacgatgctataataaatgtccttatcaaaa

SEQ ID NO: 5786 - DNA, 320 bp, Homo sapiens
ggtgtttttaggcttggaactagtacctactttaaaagatggcctcttggtgggacagacatttgtataagtcacaggccatgtcatactgtgcttaagttcttgttcatgtgagcatttaacaacctgtgatgtgggcagagatgaggccaagaacggagaagggaggagcatgaagagttgtatgtttttggagtgctggagtgacttgtgaatttctgaatattttcccttcatctaacattgattgaacatctcttatgtgcatagtgggagcttagtatttgctgaatgaataaaaattgaaaggaaaaaattta

SEQ ID NO: 5787 - DNA, 269 bp, Homo sapiens
caagggacaactgacgccgtctctgtgagcaccgaggctttttggcctcagcaccttcgaagtggttccttggcagactgcctttcctggaagagggcacgggcgatcccgacgggggcattcctgcgggtgagagccgtccccaccgcggcggcccttctcagcccctccctccatggagggacccatagggctagacactttgaggcaagcaggaggctctgcctaatgtgaatttatttatttgtgaataaactgtactggtgtca

SEQ ID NO: 5788 - DNA, 454 bp, Homo sapiens
tccccagcccttgaagtcacccggcccccatgcaaggtgcccacatgtgtccatcccagcggctggtgcagggcctccattcctggagcccgaggcaccagtgtcctcccctcaaggacaaagtctccagcccacgttctctctgcctgtgagccagtctagttcctgatgacccaggctgcctgagcacctcccagcccctgcccctcatgccaaccccgccctaggcctggcatggcacctgtcgcccagtgccctggggctgatctcagggaagcccagctccagggccagatgagcagaagctctcgatggacaatgaacggccttgctgggggccgccctgtaccctctttcacctttccctaaagaccctaaatctgaggaatcaacagggcagcagatctgtatatttttttctaagagaaaatgtaaataaaggatttctagatga

SEQ ID NO: 5789 - DNA, 1958 bp, Homo sapiens
ggatcaagtattggcctgaaatagagtccttaagacaagcaaagacaagcaaggcaagcacgtctggaaacagaacccattttgagccttagaagagtcaagcctcaggacctggaaactttgtgtctggggaagactgtttggcatggaatagggaagggattcctattgacactgctcgggtgcacccagttctcacatgtgcagtcatgccgttctctgatgcatacggccactgcagatgtgaggggccctgccttcctcagtagggagtcaacatgcccaagtcatttgcacctttacctctcacatggatgctcccaagggttagggactgcattgagcaggcccacctgcttcccagaacctcctcactagggctgagcaccttctctgagtagagtcttcatccttagcaccacagacttctgaggtcctgtgccctttacttgctggtgaggtgtcataggtagaaaagggctggcccttcagatctgggggtgtggtgagtggcaagtaagggcagaattttaggagaaccagagtcacccgctggctctactgagattgttacacccagaatccttttgtgtttttttgtggttttttttttttgaggtggagtcttgctctgtcacccaggctggagtgctgtggtgcaatctcggctcactgcaacctctgcttcccgggttcaagcatttctcctgtctcagcctccccagtagctgggattacaggcacccaccaccatgcccagctaattgttgtatgtttagtagagacagggtttcaccatgttggccaggctgggctcgaactcctggacctcaagtgatctacccgccttggcctcccaaagtgctggcattacaggtgtgagccaccgtgcccggccaccagaatcctttggtatagccaagccttttggttaccgcctcatgaagaatatgcttcccgcattgtcctagtcccagttgtattctcacaggtgttatgtgcaggacacaatccaaatcataaacctggctcatgcccaacacatttctgctaatagggagagggacccaccacacacccacacatgccagaggtccctcctcacagaggagagggcctgtgtctgtagaaggttaaagctgacaacatgtgaaacatcccagaattatgactcttcccaagtttaaaatacattctcctcatgagagcagaaggtttgttgctgtgttgtgaatgatgagctgcctccatagggaacccactgccacctgggccagcttctggagcatgagaacctgagccagggtcacccttgtggggcctggacatgacgcacgctggctgcgactaggagcagggctgcctcttctccctccccaaggtctgcttgtgggcacgctctgttccctcaggtgccattctcccagggcttaggcgcccataaatgttctttctgtggtggagtagggcctcctgcttccatactgtcgcatgggctagatctcaggtgtggtgttgagccaccttaagatgagggctgcttcgcagtaaagtttccagcctgggcccctcttgggccttctggctggggaccctcagcctcctgatgctgttgcagggcaggtctgagagggtgcccagcagcacccggtgtcagggccaccttgttttccatttttgaacagcgctccctgtggtttgtgcccactgctcaatacagcctccgatcctcactcttgaaagctccatgataagcacagagatgggcagtgtgggtcagaaggtgggccgcttcctgtggaagagggaagtgtaggtgaatagatatcaaaacccctgatgtcattcttttgaggggttggattttcttttttctggcagacatttcagtacattcacatttctctcacatttgctgaatgtgagatcagaataaaggagatcggcgtttatttcgt

SEQ ID NO: 5790 - DNA, 1195 bp, Homo sapiens
gggacgtggctgcctctgggggcaccagcaccttctgtagcattgtggaacatttcttccatgaacttctactctggagctggagagaacagtctgccaagtcttacctggttcttccccatagccaccttggaatactctttgaacaagctctgctaaaaccaaacccatgaccactgtgttggtggtggggcctcatgctgtggctcagggagggcccctccctgcatgtgagtctagccttcctagacattacatgatgaccctttaaaaaaaaattagagatggaggtctcactatgttgcccaggctgatctcaaactcctggactcaagcgatccacccccctccacctcccaaggtgttgggattacaggcgtgagccactgcacccagcctcatgttgaccctggccctggatagcagctttgtttgtagaggcaggtggtgggagagaccctaggacagcctgagagtaactggacctggtattggtgcggagtggggaatatcccttgtctaaatgcagagcagctgagagaagttagcggggctcttcctccgttctcattgtttcctgctttccttccccacccaccccttcctcagcactctgtgttgtagcctgtactatcctgcttcaagcctccgtgtcccttgtaccttccccctaccttgagttgccagttctttactccctcaaatgttcccatgccacctctggggtttctgttatctgacatccctggctgctttcctggtagatgccattcccagagaggccaacagcgttcccaggcgtggctggctggtccgcatctctcagactcactctgccaggctacagttttgagaataccttttttgttgttgttttgtacctggagaactttttatgaatgagtaaatcttcagaaaggaattcctccacccttactgggttattgtcaggtgtaaacggcctttcagctgagcaatgttcctatgagaaggaagccatttctcttggctcatgaacactgccttttgggtagtatacccacacccagatctgtgaagagacctggaattgaagtctccatgtcgtcaggacttggtggcatgtggatcttgcttgacttgggaaaagagagggtggtggtgaactaataattatggagtccccctaatgtgtcgaacacaatgctagatgatt

SEQ ID NO: 5791 - DNA, 284 bp, Homo sapiens
ggggaggcgccacccatggctgcagtggaggggccagggctgagccggcgggtcctcctgagcgcggcagagggtgagcctcacagcccctctctggaggcctttctaggggatgtttttttataagccagatgtttttaaaagcatatgtgtgtttcccctcatggtgacgtgaggcaggagcagtgcgttttacctcagccagtcagtatgttttgcatactgtaatttatattgcccttggaacacatggtgccatatttagctactaaaaagctcttcac

SEQ ID NO: 5792 - DNA, 238 bp, Homo sapiens
cagcagccccagcgtgtgtcctggcaccctgtccaagaacctttctactgctgagctgtggccaaggtcaagcctgtgttgccagtgcgggccaagctggcccagcctggagctggcgctgtgcagcctcaccccgggcaggggcggccctcgttgtcagggcctctcctcactgctgttgtcattgctccgtttgtgtttgtactaatcagtaataaaggtttagaagtttgaccct

SEQ ID NO: 5793 - DNA, 618 bp, Homo sapiens
ctgggccaaggggaagttttcaggacagctcattccatcaggaactcatggccttgaaccaagcttgccaggaagtggggaaaaggcagtgctttccttgacatcacgctagcaagtttctgtcgactcttatgcaggatggtcagaacatcgagtccaggaatacttcgagtgggcagcgcaggtggtgaaggggcttcagggaacaaaccggcaactggaagaggctctaaagcatctgttcaagcagcgggggctgacaatctgatcagtgcttgaagctatccagaggcacaactccagcctcgttcaggccggacaggattcatacgccatcttttctgtgtctcctgagctccctccatccttcccagatattagaggccaaaaaaagacttgcattttttctcagtctgaaggtctcctgctaactaagctgagccccgcgtggtgggaatcagatgtacccatccatttctgatgcactcaccgcctctccccaagtcttgggtctgtttgctattttgcatggtgggatctctggcccctcagggacttgagattatttaagtactagttcctaacacgttctggaaaataaaaataactctgggttaa

SEQ ID NO: 5794 - DNA, 1131 bp, Homo sapiens
tgctacttctggaatcctcaattcaaccaacatccagtcctgagaagccctgatcagtcaaccagctgtggcttcctgtgcctagactggacctaattatatgggggtgactttagtttttcttcagcttaggcgtgcttgaaaccttggccaggttccatgaccatgggcctaacttaaagatgtgaatgagtgttacagttgaaagcccatcataggtttagtggtcctaggagacttggttttgacttatatacatgaaaagtttatggcaagaagtgcaaattttagcatatggggcctgacttctctaccacataattctacttgctgaagcatgatcaaagcttgttttatttcaccactgtaggaaaatgattgactatgcccatccctgggggtaattttggcatgtatacctgtaactagtaattaacatcttttttgtttaggcatgttcaattaatgctgtagctatcatagctttgctcttacctgaagccttgtccccaccacacaggacagccttcctcctgaagagaatgtctttgtgtgtccgaagttgagatggcctgccctactgccaaagaggtgacaggaaggctgggagcagctttgttaaattgtgttcagttctgttacacagtgcattgccctttgttgggggtatgcatgtatgaacacacatgcttgtcggaacgctttctcggcgtttgtcccttggctctcatctcccccattcctgtgcctactttgcctgagttcttctacccccgcagttgccagccacattgggagtctgtttgttccaatgggttgagctgtctttgtcgtggagatctggaactttgcacatgtcactactggggaggtgttcctgctctagcttccacgatgaggcgccctctttacctatcctctcaatcactactcttcttgaagcactattatttattcttccgctgtctgcctgcagcagtactactgtcaacatagtgtaaatggttctcaaaagcttaccagtgtggacttggtgttagccacgctgtttactcatacagtacgtgtcctgtttttaaaatatacaattattcttaaaaataaattaaaatctgtatacttacatttcaa

SEQ ID NO: 5795 - DNA, 431 bp, Homo sapiens
tgtttttcccggccagtgttgacatcttccctgaacacattcctcagtgagatgcaggcatctggcacccagctgctataaccaagtgtccaccaactacctgctaagagccgggagcatggaacgtgttgggatttagagaacattatctgagaaaagagttcacttcctgctcccaggatatttctcttttctgtttatgaagtacaacccatgctgctaagatgcgagcaggaagaggcatcctttgctaaatcctgtttgaatgtcattgtaaataaagcctctgctctcagatgtaatacgttggtcgttctggacacgcacttccatctttattagtgaaagcccattggagcttgctacaggggcttcctgtgcttcttggcctggactttgtagtggctccaggcctggtctggttcttccct

SEQ ID NO: 5796 - DNA, 2007 bp, Homo sapiens
aacctgtttcccagcctggtggcatcctgtggaaagttggtcagctgcaacctggggtgtgaaggactggacctggaagccctcttgcgtcggaggtgttgaaaccaaaacgaacgttatgtataaaaccccagctccatcgtgcgtgtcaggcatctgctcagactgtcactggcaagctcgtttccacgtcaccacaatggagttgcttctgccaccctttgggcatccctttaaagtgccccctacttctactccccatgtaagaggctttgtgccttgctaaggagcaaagggtagaaacatgttgattttaaagaagtttttttaagacaattgttgacaatagtaaaagagatcaggaggatcaagaatctaaaacaagcctgaaggatgtccaactgtgtatttagaatttccgacattcttctctactggatctacacattggaccccatctgatcctttgctgcttttttggcttggtcaggtcctggcctcattttggcgttacctgtgtcagagttcaaggtggatgtgcttagagctggtcagccccttccagacctggacacgtctgtggctccttttctttcttcctttttttttttttttaaaaaaaaaaaaggttcagcagaaatcagcgtggctagttcacaaagaatttccagtatcagggaaaaactgtgcgtgtgtgtgtgtgtgtgtgtgcacgtgtgtgcgtgtgcacgtgtgtgatacctataaaacagtttctccttctctgaagggaaaggaaagtgctaggcagcctgtgattagcaacattctttgtgcttttttgttgttcctctgctctgtcacagttctacgttgtttgccttagaaatgtaatttttaaaaaccattttaaaaatgaacggtgatttggctggctggaaaaaatcacactgtcaggggactatatttgaagtcagtctagacggggctggactaggaacccacctggacccaggagaccccacaggacccaggaggtccctgccggaaggcagaggttcaggtgagagtggctcacctctgagctggtgaagtgaggacttgcctgtgacatgacccagggatctgctgctggcttctggagacagggccttgggctgacttctcaggttgattgaggcctcctgactagcggtgttcccaggctagaggtgattggctgcaacaaagatgcttctattagtctattagcagtgccttcgggaccctgggattttgctctctctagaaaggtgttttttatttttttattttttatctcccccttttttcctggctttgctccagggtttgtgtatttgcctgtttattgtcctgctctttttttttttggatgaaaactccagcctttcctgactcacctccatcttcggttcttcagttttctgagaagagttgggatatgtgggaaggggcatgggagctcggcagcctccgcctgccaggaaggcagtttcgcctctgcaggaaagagcagagcccgtgggaagccctgggtgagggtggcgcagccggcccagcacgcatggtattgccagccacggggggcctgcgtgtagtctctgctccctgcatttcaccttctttgttgactttccttctctgttttcccccatctgtttgccagaggggtgggactggcaacagaacagccgtggctgctttatctctcctctccacggtgtactcaggcctgagtggtgactcacgggagcctggccacctcgcagctgttcgccccctcaacctttgaactggaactgctggctcacacagggttttcgacaactgcagctgaatctcatggaaaagctggattcctctgccttacgcagaaacacccgggctccatctgccaggtgcttgccactggtcctggcagaaatggcggctgctgaaagtgaccttccaaatccttggtggcacttcagcgccacaggctctccaataaaaaccctttacacacaa

SEQ ID NO: 5797 - DNA, 1591 bp, Homo sapiens
acgcgtagatgtggagggaggcgcgggctccgtcctctcggcttccccatgtgtgggctgggaccgcccacggggtgcagatctcctggcgtgtccaccatggccccgcagaacgccagggaccgcctgctgccaagggctcaggcacggacccctccccttctagtgcacgtgacaaggttgtggtgactggtgccatgatgtttgacagtagagctgtgtgagagggagagcagctcccctcgccccgcccctgcagtgtgaatgtgtgaaacatcccctcaggctgaagccccccacccccaccagagacacactgggaaccgtcagagtcagctccttccccctcgcaatgcactgaaaggcccggccgactgctgctcgccgatccgtggggccccctgtgcccgccacacgcacgcacacactcttacacgagagcacactcgatccccctaggccagcggggacaccccagccacacagggaggcatccttggggcttggccccaggcagggcaaccccggggcgctgcttggcaccttagcagactgctggaaccttttggccagtaggtcgtgcccgcctggtgccttctggcctgtggcctccctgcccatgttcacctggctgctgtgggtaccagtgcaggtcccggttttcaggcacctgctcagctgcccgtctctggcctgggcccctgccccttccaccctgtgcttagaaagtcgaagtgcttggttctaaatgtctaaacagagaagagatccttgacttctgttcctctctctcctgcagatgcaagagctcctgggcaggggtgcctgggccccagggtgtggcaggagacccagtggatggggccagctggcctgccctgatcctctgcttcctcctcacaaccccaagagcccccagcccggtccatccacgtctggagtctggggagaggagcagggtcttaggactctcagctctgagcatccctggcagggtcttcaacctctaatctcttcccttaagccctgtggccacacagccaggagagacttgccgctggctcccgcctcatttcagcccagggtgctcatccaggggcccagaacagtcccacctgtgctgctgtgcccacagcacaaagccaggcttcactcccaaaagtgcagccaggccctggagggtgatcctgccagcagccctacagctccacaccctacccacccatcggcagcccctctgctgttccccagggacctctcatacactggccaggaggctgcagaacgtgtgtctccccctccctccaagaggtcctgctccctctgccagaaccgtgtgtgggcgggtgggagggcgctcggggcccggcccctccctctccctgctggttttagttggtccctatgttggaagtaaaaagtgaagcactttattttggttgtgtttgctcacgttctgcttggaagtggggacccctcactgcgtccacgtgtctgcgacctgtgtggagtgtcaccgcgtgtacatactgtaaattatttattaatggctaaatgcaagtaaagtttggtttttttgttattttctttt

SEQ ID NO: 5798 - DNA, 2469 bp, Homo sapiens
cgtctccagacgcccatctgggccaggtccagaggcctgcctgggctcccaggattcgggtctgagacttgtgtgtctgggagtgtaccttccctggggatctttgaggggccagtgaccccacgggccccacctacctctgaggtgggctcaggctctagagtacctgagaacgtgctgcgctcagcatgcgacaccgtgccacagtgaggaagtatttccctaagttaattgttgacagttcctaaacgtttcagaagcttactcgttaaaactaatgtggtttctgtttctcaggataaattggtgggactttaccggaaccacagggatgttttactgaatgtacctctttccttatagaagtttaaagatgctcaggaaggggccacacccgttccatctgggctgtagaaacccattgcaggtttgtgcatgccagccctgctgttgccgtgagaccacggacaccaaagaggtttgcaggggtacacgtgtcctttccggacaccaaagaggtttgcaggggtacacgtgtcctttcccgggaggcttcagccacatcagtgctgatgtgcctcaaggcacatgagtgccttgagggcaggggcagtggctggatggtgcctactgtaggcctggagctctcttctggcctggtatacagaaggcactcagagagctcatatgggaagtactgggtaggaatttgggcagatggtgcttctagaatattggtggccttgagtggaaagtcttgtggtagtaaaagtaactgaaaatgatagcctggctcgaatgtgacattggcttcccccttctcaaatactgatggagccctgtttggtcgctatagtgtatggccgctcttgggatgcagagacaaggacctgctcttaggccccaggtccaatgggctaggcagagttgtcccagggccgcctgccctcctcaagggtggggcgcaaatccaggctgctttagggagcccaaagcctgctccccgagaggtggggtggtgctttctctgctattgggcccagccttgctgatttcagtaggatttttcccagagaaagctggtcaggccctcttgaggcagacgacccaagttcttgcccctgcttttgggaaaatgcaaatccaatcccattgccgaggacatcccaaacccctctgtgctcatcactgactttggagaagccaggggccctgctgcctctgctccttgccattggagttcagctgcaggatcagccctgggctgcctggttactttgttgacagaagaagagggttttacctttttaggatgtaataaagcccctcctgtggcctgatgaggagactaccaacagtcccaagttctgggaatatatcgtctgttcccttgagcagtcaaaggacacacatggtgggacctgttatttattcatccatgcacccagctgtccatctctctgtccatccatccgtctatccatccatcatccatccatccacctaaccatccatctattcaatccattcatcatccatctatccatccctccatccatccattcatccatctatccatccatcatccgtccatcctccatccatcatccatccatccatcctccatccatcatccatccatccatccatccatccatcctccatccatcttccatccatccatcctccatccatccatctatccatccatccacccatccatccatccatccacccatccatcatccatccatccatcctccatcttccatccatccatccatccatccatccttcatccagccatccatctatccatacatttatcatccatccatccatcatccatccgtccatcctccatccatccattcatcctctatccatccatcatccatccatccatccatccacccatcctccatccatccatccatcctccatccgtcatccatccgtccatccatccatccatccattctgttgtacaacagatattcagcatgctttctcagggacatgctctgtgctggggacaggggatataagtgaggtatggatactggcctcaggaaactctcttctctttggaggaatctcttctggagtgttccactggagttttcatctctcttgcacccattacaaagatggaagggtccaattgactagaaatatagtttagagattcatatggagacatcatgaagcctgcctcccccctgccccttatacttgggctctctgtgcaggtggcacagaccataaaaggagagtgaagtctacagcctagagggtgccctgtgtgtggtgtcagatgtaacctttcacatgggatgtgtgtgctgtgagcattgtgctatttgagatgaatggttagtattttgtgtttacatgaaaataaatgtttaaaaatgtctcaggggtttgatgaagttactattcaataaaagaaacctctcagggaag

SEQ ID NO: 5799 - DNA, 1686 bp, Homo sapiens
ggcccccaccctgaaaaagcctaggacattcctgggcactgtcatttagggtgctgtacaaatcacctccgcctagaaaatggaattcaacagtcaggatacagatttccaaggccaactgttggccccaacatgcaacagtgagaccataagcctcccgtgggccacattttgacagtggatgcccttcagggtgatatatgctataaagcagttttctatcacctaagtggtttttcttgccaacaagaatttttacccatcagcactactgtggctgaaaaacttctcttcaacagttcagtgcgccctgtgcaggagtcagcccggcatctgcttgtacacacagctccttgcataggtgtggagttagatctggacagtgaacttcaggaagtcctttcttataggaggctaatagggattgagaataacatgagaagaaaacgctaataaagggaaacctgaacacgctgctgtcagcatgtgttttcaaagtgcagcctgcctcagagttcttcggagcctgaaaaggggtttgagaaagagcccagtaggaggggcaggaggccgacacacctgacttggcctggggcccaggaggcaggtgtaagggagtgaaaagaaaggctagccggaggctgcggggggaagaccgcagactccctgctgcttcgcatccctcctgtggcctccactgcaggcaggacaaacctggatgccacctggagctgcttcctgagttggcacactatcgtgtacacagcagtcttcagccccctggaaggaggccatagtcgtgtgaggatggcaaagtcgaacaggaagctttgagtgccttcctccacgatgtcaacgaggagatccagtgccagatcgaggtggatggaacacccaggggtaggggtgcaggtgtgggcagtgatgtcccttcccctccctcccctggtcccacagactgtggccatgaggctgcaggctggtgctatgacagcagattgcagcacagggccctcccctccagcccccagtgggacatcaaaaccaccctggggccatttgtgcagggcaccacctccagtattgatggggaaaataaactcagtagagccacgacagggtggagagaagcagggaccattgtcttcctcaggagcgtgacagctgaccccacagaccatgcttgctggtacacactggtcccagacccaggcctgtcggacatcagcagtgtgctaaaaacgtgtaagatgtcactactcaccgtgtgtcctatctagttgacatgggtggagtcagctaaggggtgaatgttcatatgctcccaattcacgttgaagccctaatccccaaagggatggtattgggggtggggtcttggagaggtgattaggttatgagggtggagccctgatgaatgggattagtgctttataaggagagacaccagagagatgatctctctctccaccatgtgaggacacagtgagaagacagccgtctgcaggcccggaagagagccctcaccaggaaatgaaactgttggcaccttgagacttcccagcttccagaactgtaagaaataaatgtttgttgtttaagcctttcaggctacggctttctgttacagcagcctgaactgagagtccatgccgagtttttgaaataaatgtgaattctgatgtt

SEQ ID NO: 5800 - DNA, 1714 bp, Homo sapiens
gctttgtttttaaagactaggcccagctttagcaattggctgttgatgtgcctcagctgtcactggcgatgtcctaggggtgctgcattttgcttccggggaaggatggacacttttcagaagtcactgcagtattcccaattgcactggccctgggcatggccttacccagtctaagctggcaggatctaaaacagcagcgacctcggcccctatccagagaggtgcagcaagagagccatttccctgtgacatttagtggactggccagttcatagcagcactgtgaggacccccaagttggacgtgctcggagggaaagatttatggcctctgtcgagggacctgcagcgtgagagccagtggcatctgcgcggcttgcctggctcttgctgtatcctcacttcctgtggagcggggattggctctgagaaggagtgttctctgtctgcctggcaaaggtgctgtggaataggcttggcatgccaccctgttttagagagtgacagttacagttgtaacaagcctacttcatattggccccctcagttagcctttttgaggcaatgccatttctagagttgaaaaagccctggacccaaactgcggcactgttgaataaagggcagtcctactcctgtccttttagagtggcttagtgtgacacacaggcatctcccaggccaagcacacacaggctgcgcccagttccgcaggagccgtcccacagcgtggctctctggattctcccacttgtcctccttggaaggagctcttgctggccagtgtttggaggggaggatgagtgcctgtcactgaggcctcactatggttggcgtctgaagctgggcggtcgtcaggcctgtgctgagagccgcagcccctgtgcacacctaacacagggcgctccccctgctgcttccctggctcagttcttcggagctccagagtgagaaggccgcttcgtcctttttctctgggtgatgcccttagaataacactatatgcaatgtaactcacaatgttccaggaccaaagacttgatggaggggctagaggcgacccttgttgtaaaaggcgatcagaacacctgagggaggaaggggcttgcagttttcccagcccttctcgctgccaaggcagcagtggtgctgtggatgggctggggactgcgggacagagcctgctactacttgggagttggtgctgccctgtggcatggaggggtgggaggggctgagatggctgctggcccggcctccaagagttctggacaggaggcagacactgcccagatgctcggtggagggacagtgatggcctttgactcatgaggcctggagaaaagtatcaaaggtctcaccatgtaagagtgatttccgatttctctcctttcagttgtgtgaaaaaacagctggcctgggttccattagcaaattaaatcatcttcaatcttaaattagaaaccagaatgatcttcaggataaaaagaacttctgaatctctgcaataggaaatgtttcgatcatgcaagtgctttcccagccaaatgtctgtgctctctgtgtcactgagggccacaggttcctctaacatctgtcactgtcacttcaccaggcaggccttggagttccatgacaaaatcacttttgtcagacaaagaatgtatcctttacttttctcaaatggaataaaattatttcttctgtggagg

SEQ ID NO: 5801 - DNA, 2964 bp, Homo sapiens
cacgcagtcccaagggtcgctcaaagctcagactcaggtctgaaacccacccacccgcaagcctaccagccttgtggccacgcccccacccggctgccacaagaatccaactacatagaacatgagcgtggacttggcgtttgccattagtgcttccgtacttaatatattgttaacagccactggctggctttctacagtgaggagaaagtaggcatgagtcacaaagtaacttcaatttctaggatttcaggtacctcgaagggaagcacctctggcagacaaccgtcaagagagagacatcatttagtgttcttgtcttgactcgcttttgacatttgaatttccagtgcttggtatatcatggaggaaacatccccaaaacgagacatgctagaaaaggctttattctgaaagccggcgacaccatggagggaggggcaggtgttggtgagcctctgcccgtggcttctctggggagggccgggctgcttagcacacgtttctctccatctaccttcttgaccacatgagaaccaggacgttgcctccatgcccgtctctgagaacatagtctctaaatcctaggtgttgccttggaagtctcgtgcgtggagtgtaaatctatatatgccagcgaggacagcagtgccacgcagttcataccacccgcatgggaagaatgttccaagagagtctgggtttggggaagcatctaattttcagagctctgctgtccaccgtgtagggaaacagaagggcctctcttcaaggtgctgtgacataagaaacggtaattgcggtgatggggttgcttcctaaggcaaaggtaagcttgggccagcttcactggggcggatgggcacctgccccgccttccgggaacatccactctggcctgcacttcctaaagctttgtaccttagagatgctgtaccacatcccagtggctttctaccgaccgtggccatttatctgaaggtaagacgacatttgggacctctgaggacacaagcccaggcctaggatctgtagagcaaggcctgactgctctatcctggcacggagcagcctgatgtgccaggaccaggggaggaacgccatctggctggcactgctgcacacccgccgagccttcctgtagccccagactttgtggtacccattatcatcacgcctgtcatcattgacccatcttcttggtggggcaaggatgatgcatgatgaaggaaggtccttcccccctgcagcccccttacgcctggcagcagacaagcagagtggcctctttgagagcacagaggatggtagcaccctacctgcaaggaggccgggcagggaccctagatgccaggaggcctgttttgctcaccaacttggtgggcatttcatgggtgcttatgttctaggactttaccgtaaataacacctcctccctgatttcagacggaaggtctcacttggacttccatgggatcatctccctgtgcttcttgatttattggtgctgtgtttctgtgttttgttttgttacatgtcacaaccgtagagttagcttaaatcagaaagaagcctctctgccttctccaccctgtcttacgagctgtgtttttgtttttactaccctagaggcagagaagcggtagggatgtcagggaatttactcacttccacttgaatcaacgagaagtgttgagaaacttccgtgggtgctctgtggaaagaaccgagggtgtcaggatggagcggcccaccctcgccccgcggcctgcgcagactgctgtcctccccttcaggcctggccaccagcagactcccatgaattcccattttcacaaagccctcaaaattttgggggcgctgaggttcaattttcttcatccccaaatgaactgttaattcactgaaagacatttagacttttgcagccaaggagcagagccgggcaagctcactaaggaagccttagcttggtctcctgcatgggccccggggcctccagatatgcccactgtcaccctggcaagggccccacaccctcagaatgaaaaggattgattgggttattgtcagatacccccattagttcccctaaagtctgcatctgcagagctcttttagctcatctttttgttgtcggtgttgttttttgagacagagtctccctctgttgcccaggctggagtgcagtggcgcgatctcagctcattgaaagctccgcctcccgggttcaggccattcttctgcctcaccctccccagtagctgggactacaggcgcccaccaccacgcccacctacttttttgtatttttactagagacggggtttcaccatgttagccaggatggtctcgatctcctgacctcatgatccacccgcctcagccttccaaagtgctgggattacaggagtgagccaccgcgcccggccttttagcttatcttgaaatccaccagcctaccttctgttcatggcacgagcagtgatttcagtgaaaccatcataaacattcttgttccactagatgctgatcacagcagtgatgtttctgtgttaataccctgtactgtccctcgagtactgtacctttgtgcttgcacacgtgtcactaacgcacgtgttaccagagtctcacgaccctacggtgctatttttattggtgcaaaattaaaccctctcagctgaccgttgctggataggatcagaatgcaggaaaagagcctctatggcaatacgattgtccttttttcgtttcagagtcaaatgtatctattttccattcgttaacttgcattacatactgtacccatggaatttttgttttactttttggggctggttttgaaaggaaaaaaaacggaagacaaacattggacgccattatacatgaaaattatatagaaaaattaatcatttcattggaagcaagttgaatatgtgtaataaaatgtttttccataac

SEQ ID NO: 5802 - DNA, 2317 bp, Homo sapiens
ctggaagcctacaggactcccatggcacagcatgctgcaagtactgttggcagcctggcttccaggccccacaccgaccccacattctgcccttccctctttctcaccaccgccttccctcccacctaagatgtgtttaccaaaatgttgttaacttgtgttaaaatgttaaatataagcatgcccatggatttttactgcagttaggactcagactggtcaaagatttcaaagatttctccacagaaccgtctcagttctaattgcactccctcatgcatgtcactttctcaggggctcgctttgttatagaccctttcgcctcgccaccttgcctgtcctcaggacgctttcacaggtgctaagtgatctcatttttcccaggtgtgtttggccacaaagagcagcttctttctcaaaatgagttagaagtggcagtgggacaggagcggaaggaccacaccaggagacacttccatcctgaagcttaggtgcctcatctccacagggcggtggcagtccctgcctgccaccccacagggttacagcaaggattaagtgagatcacagaagtttaagtacacactgtcaaccgtggggtcatcgtgaaccaacccactttgcactgtttgggagacagaaacctggctaaacatggcactgcaatgggcctgaacaaaaggcagaatctttaaaaattcctcttaaatgactctggagatacctggaaatgaaagtgccaagaaaggtgttccattttatttgctaactatttatgcattagctccccaagggtcattctcagattctcctggaattcttctccctcaggacccatggttcaaggaaggaagcttaggccctgttccttcctgtcctttgctggtctttcccttttttcctttctaggagggaagcttctgtgctgctgccctgagcccttccttcaggccagcacagtacctggggacctccacgggggaatgggatccaggccaggttgcttgctgagcctcatcacccaggaggcctgagcctctggggagggcacgcatgtacactgccagacccaggggagatcttgggaacagaggatgctacgtgatttcctctggcttccaacccaatcagcctgcatcacagtgaaacacaacacaaaaggccataaaaggcatacccctgagaaatgtttaagggcaggtgctagagtcagtgccagctccctgggaggagggatagggacgggcagatcagtagccagcttgtcctcaccctccggaagggagcaccggagaagacttgcacacgtccctgcctcccttgcggccttgtcaccagagggacacatctcctgggcacaatgtgcagggctgacctgggagacttctcaggtggctgctggctgaggagaggccaggccttcccaaggaagaccctgagtaaaatctgcatctgtcctcaccacctggcacagtctctcataacggtcagattttgtatgttcatcctatttattcaggggctcgtactagaaagccacaggagaggtcggcttgtagggactggaaaatcagccccaagcagagcagctgcagggcccctggagccggaaggacactgcacagaacagactgcgttattgttatttttaaataaaaatatacatttgaaaccttaaggctaaacaaaaataaacaaaaaatcctttagaattctttccacaacaatatctctttctgagaaattgttacaaacaaggtcagattttctctgtataacatttgcttttatgaggacaatatcatatgcattatatgcataatatgatattataaatcaaaatgcctgcacccactttagggtatagctattgacttattattaatattatattattattattttgctggaagaaggtcacactaagatataattttttatgttttcagttaacggtatgctttcttctttgcttatttggtttttgtctctgtaccaaatatcttcttgcttaaggtagaaaagtatttgtttacctctatctccagttttttttcttatttgaatgttgaaggtaaaattgatataccaattttaactatttctgatacagctgaaagcactaaactacttcataagaagtagatactcatttttgtaacactatttagggcttttgtggttaattttaaaggaaaccactctttctacaggaaacaagggctcaggattcttcagatgaccttataaaaatgcagtccacagtgctatcaatattgtaacagtaatgactacaataaagccaaaagtccagtgt

SEQ ID NO: 5803 - DNA, 1660 bp, Homo sapiens
tgtccagctttgctggaaaagacgtttttaattatctaatttatttttcaaaaattttttgtatgatcagtttttgaagtccgtatacaaggatatattttacaagtggttttcttacataggactcctttaagattgagctttctgaacaagaaggtgatcagtgtttgcctttgaacacatcttcttgctgaacattatgtagcagacctgcttaactttgacttgaaatgtacctgatgaacaaaacttttttaaaaaaatgttttcttttgagaccctttgctccagtcctatggcagaaaacgtgaacattcctgcaaagtattattgtaacaaaacactgtaactctggtaaatgttctgttgtgattgttaacattccacagattctaccttttgtgttttgttttttttttttacaattgttttaaagccatttcatgttccagttgtaagataaggaaatgtgataatagctgtttcatcattgtcttcaggagagctttccagagttgatcatttcctctcatggtactctgctcagcatggccacgtaggttttttgtttgttttgttttgttctttttttgagacggagtctcactctgttacccaggctggaatgcagtggcgcaatcttggctcactttaacctccacttccctggttcaagcaattcccctgcctttgcctcccgagtagctgggattacaggcacacaccaccacgcccagctagtttttttgtatttttagtagagacggggtttcaccatgcaagcccagctggccacgtaggttttaaagcaaggggcgtgaagaaggcacagtgaggtatgtggctgttctcgtggtagttcattcggcctaaatagacctggcattaaatttcaagaaggatttggcattttctcttcttgacccttctctttaaagggtaaaatattaatgtttagaatgacaaagatgaattattacaataaatctgatgtacacagactgaaacatacacacatacaccctaatcaaaacgttggggaaaaatgtatttggttttgttcctttcatcctgtctgtgttatgtgggtggagatggttttcattctttcattactgttttgttttatcctttgtatctgaaatacctttaatttatttaatatctgttgttcagagctctgccatttcttgagtacctgttagttagtattatttatgtgtatcgggagtgtgtttagtctgttttatttgcagtaaaccgatctccaaagatttccttttggaaacgctttttcccctccttaatttttatattccttactgttttactaaatattaagtgttctttgacaattttggtgctcatgtgttttggggacaaaagtgaaatgaatctgtcattataccagaaagttaaattctcagatcaaatgtgccttaataaatttgttttcatttagatttcaaacagtgatagacttgccattttaatacacgtcattggagggctgcgtatttgtaaatagcctgatgctcatttggaaaaataaaccagtgaacaatatttttctattgtacttttcgaaccattttgtctcattattcctgttttagctgaagaattgtattacatttggagagtaaaaaacttaaacacg

SEQ ID NO: 5804 - DNA, 636 bp, Homo sapiens
gtagaatattccgtggttgcttcttgaccaagggaaatacagtctggctgtgagagacttaaaatctcttgaggagcgctctggagaatggctgaaggagaggaaacaggagccttgagcagtgtaattacaaacaaataggttggcatagtcttaagtctttgagtctagagagatttgagttttgttttgcctgtggaggcaattgggggtttcaggtcaaagagagggtcagtggaaacaagggtgggccttgtgaggtgtggggaagccctgggaccctcactccccttccagtgtgtaactggattggctcccaccagcccagaagatttacgacgtgggaaatggtatacttggattaaaatatttcatccagatttgtttacatctagagagaaccccttgtaggttataaggaaactttttaacattcttccttgaatatattttctgtagctgaaaatgtttgtgaagtggctgtcaactacacatcgcatgagtagaggggctctgggtcggggtttcatatgcagcagagcagctcccttgctgccgtccatcaagagccctcaacacaagagtttgttataaatagaaataaacgacaaaaagtagaggggtatgtttaagtac

SEQ ID NO: 5805 - DNA, 585 bp, Homo sapiens
gaatcttgttagtgtcacttttgacattagcaagatgaacccttaaccctcgattcaattgccttacgcacgcttttcacagtgactagccaaggggaggtggggttgatttctgttcctaactacacctgcatatgtcagggctccagtcagcaaaaggtatagatgttgcctctaggcatgaggtcattggtcacattctacttggagacagtgattgcattcattgatttcatggttaattgctagttggtaggtaaaggcctctagatgattagcaatcttgataaaagaggcctagtaatgttcttttgaggttagaaatccttgctgctaggacagtctctgtgacaggttgcgttgaatgatgtcttccttatcaatggtgagcccaccagtgaggattactgatgtggacagttgatggggtttgtttctgtatatttatttttatgtacagaactttgtaaaaacgaaactatttaaaaaacaagaataacatttttagcatctttattcaaggagatttatggacttcaatttgtctatcaaacattaaatagctttttattacaacctctaact

SEQ ID NO: 5806 - DNA, 212 bp, Homo sapiens
gcagtgaggcagatgtataataataggccctcttggaacaagtcttgcttttcgaacatggtataatagccttgtttgtgttagcaaagtggaatctatcagcattgttgaaatgcttaagactgctgctgataattttgtaatataagttttgaaatctaaatgtcaattttctacaaattataaaaataaactccactcactatgctacc

SEQ ID NO: 5807 - DNA, 1329 bp, Homo sapiens
gggtgcctagctgcccacagagggcaggcactcccatccatccatccgtccaccttcctccagactgtcggccagagtctgtttcaggagcggcgccctgcacctgacagctttatctccccaggagcagcatctctgagcacccaagccaggtgggtggtggctcttaaggaggtgttcctaaaatggtgatatcctctcaaatgctgcttgttggctccagtcttccgacaaactaacaggaacaaaatgaattctgggaatccacagctctggctttggagcagcttctgggaccataagtttactgaatcttcaagaccaaagcagaaaagaaaggcgcttggcatcacacatcactcttctccccgtgcttttctgcggctgtgtagtaaatctccccggcccagctggcgaaccctgggccatcctcacatgtgacaaagggccagcagtctacctgctcgttgcctgccactgagcagtctggggacggtttggtcagactataaataagataggtttgagggcataaaatgtatgaccactggggccggagtatctatttctacatagtcagctacttctgaaactgcagcagtggcttagaaagtccaattccaaagccagaccagaagattctatcccccgcagcgctctcctttgagcaagccgagctctccttgttaccgtgttctgtctgtgtcttcaggagtctcatggcctgaacgaccacctcgacctgatgcagagccttctgaggagaggcaacaggaggcattctgtggccagccaaaaggtaccccgatggccaagcaattcctctgaacaaaatgtaaagccagccatgcattgttaatcatccatcacttcccattttatggaattgcttttaaaatacatttggcctctgcccttcagaagactcgtttttaaggtggaaactcctgtgtctgtgtatattacaagcctacatgacacagttggatttattctgccaaacctgtgtaggcattttataagctacatgttctaatttttaccgatgttaattattttgacaaatatttcatatattttcattgaaatgcacagatctgcttgatcaattcccttgaatagggaagtaacatttgccttaaattttttcgacctcgtctttctccatattgtcctgctcccctgtttgacgacagtgcatttgccttgtcacctgtgagctggagagaacccagatgttgtttattgaatctacaactctgaaagagaaatcaatgaagcaagtacaatgttaaccctaaattaataaaagagttaacatcccatggc

SEQ ID NO: 5808 - DNA, 1022 bp, Homo sapiens
aacacgtgttccggtggcagattgaacaagagctttggtaatctctgtgaaatactgcagagggacagatgaccaaagccaccacatttagaactttggctgcctttggaagtccagagctggatctctcagctcccgcccccagaggctcagcactttggacatggctcacaaacagttgttgattgactgcatgaatgcgtgtgcgtgcaagcatgaaccttgtttaaatcaagagcttacataattttaaccagttctgtcttcagctgtacatactcagtaaaatgtttaatgaaggggaagagattagtctcttctgtgtgaccatgttttccctttattcatcctaaaaagttccatgaattcttgatttcctttcagtggccctttcaacaatgtcttttttcccaagagcataactgttctcattttattgctagccatcttgatctgtgttttattgacatctcttttgagctaatcttcatttctaagataagagttgagattttgcaatctgtgttcgatggctcaatctatcctgtgcttgatgctagaaaggaagacagatttaaagcacatgccttctgtgccggctttcaagtttgtcactaaactctcatttctggaaagtgcaattatagagtatcactcccacttccttggaaacagagctgaagaacttggcacactctccaaacagtcaccatacacactgttgtcaaaaagttccatttttaaccccatttgcattaatattgcagtcaatctctttacctccttttctctttcacggggccgtgacagtgacgcctttccccaaaactctcctcgtttgagaaaaaaagaagtatgtatccccacttatctcggggagaaatgcaaccaactgctgctgtgcacatttatgaatcacagtattgtttagtcggttctgtatctccagtagaaagcataacaaaaagatgacctttgtctcacctcatagctaatttttgcaaataaaatactaaacattg

SEQ ID NO: 5809 - DNA, 524 bp, Homo sapiens
gaaggggtgtcatgaattccttaaaaggactctccaaatagcattagttgttattattaattgtgtgtcacaagaatttaaaacgcatgtgcagctatttaagaaaagtatcccggaagctcacagtgacattacggaagaaccctcaggtcacaagagtctggggtctcctatactctataactttggccacaccgagacaccacctataccaatatttactcatagttctctttaagccaggagcaatgacgtgtgcctatagtcgcagctactagggaagttgaggcaggaggattgcttgagcccaggaatttgagtctagcctggacaacacagcaggactccatctcttaaaaaaaaaattacttcccccactacttttttttgacataaaaaaatgtattttaaaaggaaactgtactacatctagttaatcataggtttgatatgtagttacgtattttttctaatgtgcattaaaacaaatccataattattaaaataaatgttgtttgtgtgcc

SEQ ID NO: 5810 - DNA, 127 bp, Homo sapiens
gatgggaagcagaatagcaaggtgctcacaccccattggtggactacgcgggacgtccctgcccatgtcgcgctcagcatgcatcctttgcactgtcgataatcagagaaaccatgttttgggttaa

SEQ ID NO: 5811 - DNA, 34 bp, Homo sapiens
taagttttgaaataagaaagtgcgagtcctccaa

SEQ ID NO: 5812 - DNA, 628 bp, Homo sapiens
ctgtggtgtgtgcttcagaaaggagcagggcttagaaaaagcccttttgtccgtaggagttgatgtggtgtgagtgatatatttctatgtttttaatgtacagcatctgtactttgtttgccttgataaaggtaagataaatgaaacgctgaactatgctaatctggaatttgtttttatttgcctgaaatatatttttttctgtgaaaaaattaaaacgtacttaagccaggagaatgaattatacagtgattgaaaatccatttaattcctatgacttttgttttgtattgcccaagtcaaactacatcacttgtatctccagcccaaatgtagtctgccttgaaaagtctttcagctgtgactgcaggaagtgggagtgtttttattgttagctaattgctgtgactgcaggaagtgggagtgtttctgttgttggctaattgaagttattaggctcagcttcagtcatgtgtaagttttgcagtgtaatacatatgtagtctggtctgtatatatgaaaatttgaattaaactgcagaatgtttatgtctagttatggtttaaattttcttagtagtatataaaaggtaagagtactgaaaaattaataaaattgcaagttaag

SEQ ID NO: 5813 - DNA, 829 bp, Homo sapiens
agtccttccctgatatttgcttctgtgtaactttgttttgacccttaaaaatgtatttttcttaacatgttagtacttctacgactttggagccactgatgggtccactcatggcctcagctgagaaaggagacgatgaacgtgtagctgacatgcacgaagtttaatttactcatgtccacgggggacgtttagagggcacgtgggaaattttccagcaatcaatgccttgagaaacttaaatggggaaatattattcatcgagaaagtgaaacaaaacactaggaaatgattatgaaatgttagtgattttcaaaagatgggcttcaaataaaagtctgcagagttttttttaaataggagggaaaatcttattttctaatatgtctcaggtatttttatgacttctactaaaattcacactgaaactttatcttctaaactggaatcattacttaattttaactaaccaacaaccacaaaagcagcagctactgctaaatattggattactgacaaaggaattcagttttgtggaatctggtgtttgcactataggttaagagttgccatttaaatgtttcttattcataattaggttttgttccgctttagaaaaaaataaattcccaaatgaattgcatcagtgtttccagcgtttcagctgtgggcttctaccaccactaagccgctcacctagagttgttacttttttgatgggatgacattccatggatttatgtactgaaatggatttcagattttaaagagaggaatgctctacgtgctcagaactgaattaaaatggcattatgtcaatagagaattc

SEQ ID NO: 5814 - DNA, 300 bp, Homo sapiens
gcctccagacaggacaaccctcttcatcactggtggctgagctttttcccagcaggaatgggtcctcgaatcatcgtgcctctttcacagaaaggacgttgtggtggcctcaccccaggcatgcccaacagtaactgtcagcataaacctgggggccctcaggactaggacagggtgagccagtgctccctcctttcatgtacttggcctgagactgacctctccctaggtccaaatgccctagtcacatggcagacccacggcctggcccactgtataaaataaacctgtttgcttctt

SEQ ID NO: 5815 - DNA, 65 bp, Homo sapiens
gcaaagggcctgcccagacaagattttttaattgtttaaaaaccgaataaatgttttatttctag

SEQ ID NO: 5816 - DNA, 105 bp, Homo sapiens
gcgccgcctccgggacccccaggacaggctgcggcccctcccccgtcctggaggttccccagccccacttaccgcgtaatgcgccaataaaccaatgaacgaagc

SEQ ID NO: 5817 - DNA, 60 bp, Homo sapiens
gccctgtgctgcgcaggccttggtctgtgcctgtcaataaacagaggcccgaaccatctg

SEQ ID NO: 5818 - DNA, 110 bp, Homo sapiens
gctggagcctcggtggccatgcttcttgccccttgggcctccccccagcccctcctccccttcctgcacccgtacccccgtggtctttgaataaagtctgagtgggcggc

SEQ ID NO: 5819 - DNA, 106 bp, Homo sapiens
gctggagcctcggtagccgttcctcctgcccgctgggcctcccaacgggccctcctcccctccttgcaccggcccttcctggtctttgaataaagtctgagtgggc

SEQ ID NO: 5820 - DNA, 70 bp, Homo sapiens
actgtgggtgggtggccgcgggatccccaggcgaccttccccgtgtttgagtaaagcctctcccaggagc

SEQ ID NO: 5821 - DNA, 1097 bp, Homo sapiens
aggcacgccagccagagcctgtggagagactccgcctgctgacactaaacgtcctgggaagtgggcccttccctgggtctctgcactgactcccccactcctgaccctggtgatggtcgccactgggcagcagcagccttaccagtcctccatgatcacacccagggacctgcatgggtgaggggacaccctgggcctctctcccgcccagcatcctccctgagtccccacacagggcctcactctgcaccccaccagggtcccgctcacaccaggcagccttcatagtggtctccctggccaccttgggcagagctgggtcatgcagcaccccatccttacccggtgccctctccttgccagcttctccccaggccagagcggccatcgcgtagaaagaaccagggtgtccccgggacaggccgtcccccaccccatcctgtagaagtccattccccttttccctcctgtgctctgtcccccaaggagtcatggaactcagggtactgggcctcaacgggaacctgagacagctccagcttcgcagcccttcccggagctacagggggatcctctagcatggggggtgtgacttggttcctttgaccaggtcctgtgaggaagcctggagcaagggtctcccccagcaggatgggtggggcctgctctggagctgagcccgtggccgctcacaggtgtccttagtggtgttgcagctgtctactggctgcatgtgctgtgaatatcccaaggaactggctgtggaatgcgtgtttgggtcagtctgtgccctctcagtagacactggagctgctctgtccctgaagaggccccgtgccccaggcatggcaagcgcctgcctctccccttccggtgctcacacgcccacgccgtgccacccgatgcaggactcacctctgtgccttgctgctcctgaggcccaagggcagccatggtgctctgtactgctcgggccgcccaggtcacagagcctgagcttcgtagccaaagcagcctgatgacccacccaccaaggaagaaagcagaataaacatttttgcactgcctgaaaaaccccggtggtcaggcgtgagcct

SEQ ID NO: 5822 - DNA, 189 bp, Homo sapiens
acccccagtccgtgtctcccctacctccctcagttgttgcacagggacccccaagcatccccagcaccccccgtgagtgaccagaccctcccctgctgcccctgctgcccctgctgcccctgctctgtcccgggaccccctggcctggcgctgtcccctgagctgtcccattaaacatggccctgtctc

SEQ ID NO: 5823 - DNA, 96 bp, Homo sapiens
ctgcccccgtgtcacccccgccatcactgctggacaggagccacccccttgggtaccagagggagctgtgcattgtgaataaagagtgagcttggt

SEQ ID NO: 5824 - DNA, 411 bp, Homo sapiens
ggctcaagctgcccttaccaccccatcccccacgcaggaccaactacctccgtcagcaagaacccaagcccacatccaaacctgcctgtcccaaaccacttacttccctgttcacctctgccccaccccagcccagaggagtttgagccaccaacttcagtgcctttctgtaccccaagccagcacaagattggaccaatcctttttgcaccaaagtgccggacaacctttgtggtgggggggggtcttcacattatcataacctctcctctaaaggggaggcattaaaattcactgtgcccagcacatgggtggtacactaattatgacttcccccagctctgaggtagaaatgacgcctttatgcaagttgtaaggagttgaacagtaaagaggaagttttgcacaccc

SEQ ID NO: 5825 - DNA, 597 bp, Homo sapiens
gaatcttccggccgctgcttcctgccgcctcactcagccaggtggagagcaccaatctgaaccagcaatgcctgcagcccagcccctcctctgaacactcagctattactgcgctttccctccccacggccccaactccagggcaggagcaactggacagtgggcctggcccgtggagctgccacgcaggtgcctgagggccaggtgccacgcaggtgtctgaggaccaggtgccacgcaggtggtgggggtacagacaagatgctgggatgtcccctgccccatggtcaagggtgtcctgcctgcctgggtccagggcctgagggagccacatggatcccgagacttgtgttctcttggctgaaaacactgaggtgctcccatctgtgcgtggcccatgagctgggatggtcctccagctgcccacaaggtccgcccctctgtctctgcaccacctgtttgcataaacacactttgctacaatcttgctagtgcgttttcttaaaagataatctatttactgtaaaaataaattggactttgcaaaagcttttagaaggaaaagaaagaggattaaagagaattgctggtgatcct

SEQ ID NO: 5826 - DNA, 1641 bp, Homo sapiens
aggcaggaaggtccagcctgagctggattcgggactccaacaccctggagtggttccgtcagaccatgaggagccaagaccagcaggtcccacagccgacagtgcccagagcatgcagggaaccctcgtgcagctgagctggggccgccaaagaccggggctgccaaaggggcagagggtggtggagaggagagggagaaagggaagtcccagggcccggggtccacagaggatgagggttgtggcagggccgtccatcagcgctgaccttccgggggcccagagcttcccagccctgagtcaagctggccatgaacgcgtacacttcagttcagcaggatgggctggagagcctctctgtgcagcggtgtggggtgagccctgctgtggcctccttgtggtggtccctcttcccacgtgcagccctgttgggaagaaaggaagaaaacaggtccctccaggggtgctgctgcctaagccacccacataagtacgctggtgccgtgtcacccatgttgagccgctcctgatggctgacgggctcccagaccctcacctcggacatggtggtgggggaaggacgggtgggcaaggctggtgcgttccccagctctccctacgctgctcgggccattgcccagccagatgtggtcacctcagtccagctctggggcctccaggccatgtggctgttcccacggcccagtcctcgctgcagtaacccctgggggctctgaccacctatgggggccgggcaggagcctctggggcctccactccgacatcaggacctgagatgaccgctgtgtggcgctctctccctgggcagggtggatgccacaggcccctctggctcccaggtgctgcttctccacaggtgcggcctggcccggcctcctaaaggccacaccctccccacgcacttcccaggccagaatccaaacatcgggaaccctgttttcttctgggtgtgtctcacttagaaatcgtggttcttccccgagggtgcatgttgcaggagggagagggcagggaagactcacagcagagcaggagggggcctgtgcttctcggggtctgcaccccaggcacagcggtgtcaccccgcaggaccgcgggcctgccccaacccccagcattcccgggtgggcccagaccccatcaccaagactggccacccgctgcgtgtgtgtgcgcgcgcgtgtacgtgtggccccacatccgccgccttccacgctaggatgtaagaggtcgcctcctattgtacatttggggaaagccttgggtgtaaatcagtgtaaacttggaggagagatttttctatcatgtagagtaggtattttttatagattgaaggttgatcaattttttaatactttcaagagaaaactgtgtatacacatgaaatatatatatatatatatatatatatatgtataatatataaagactggcaccctgcctctctgtgcccaggcccagccctggtgacatggcaccactcagcagtgctgtcactgtaagcatggactcccaggagacagtgtgggaaacgctcctgctttaattccccgagaaacggctcttcctgcctggatgcaggagggcaggggccaccacagattaaagctgttactgcac

SEQ ID NO: 5827 - DNA, 1118 bp, Homo sapiens
ccaccatgcctggggcaggggctgtgcacagacggaccccccacccccacacgcactttatgagggagaccccgacagaggacgcttgagccagaatctcaggaccccgcccagggagctgccagcccagggctcagcttcccatgggccccccgcccccctccttcccctccctgaaccccacagtccgcctggccaggcctcctggccgccacgcagaatacctcgaaccaggcgggctgtgaaccagccccgctcacctgccagccccaacacccgacgggggccgaggccaggctgcccctccctgtgggctcagggtctcctgcgggctaggcagccaggagctctgtccgcaaaaccaaatctgggtgtcagaggccaagaccctggggtgggatcagggaccacccctcacggggcataaggtcagttttcccccagagcccgggtccctgtcccccacagggcaggcggggtccctggagccctggtgtggagcggcgagtcccggggcggtgcctgtctcagaagaaggggcccttggccagccccccagcgacactatgcaaatcctggagtgcccgccaggatcgaagccatgactgggtgcaggcgggcgccaggcccgctgtgggtgggcaccagttctcagcaccgctcactgctgccgggcacactgggaccagcaggctcctcagccaaccctgtccctcggcccggccctgccagagagggaccccagcacatcgtgggcacgggcagggctcagccgctcccacctccccacagaagcccaggagtgtgtggacgtctgagcccagctttctgcgtgccctcctggcccctcactcccggcagcgggccggcctcgcccccactccccctcctaccccggcaggggcttccggggccttttcacctggagaaacattcccactcccctttggcctccctgtactctgagctgtgaatatttttaaccctgtaaatacggccagctcttgtgacacagagactattttatcaattgtcagtcccgttcctttaccataggattctccacagtggcttccgactcaggctccaatggaccaaataaaagcgttttgttttgt

SEQ ID NO: 5828 - DNA, 221 bp, Homo sapiens
cctgcagcgcctgaggtctgactgtctctgcctgcagcatgccggcccctctcctgcagcccctgcccctcacctgcctgggacctgccccgcctccgcatgcatgtggatagacccccacgggccgtggccaacgcttgtccctggggccacacagggacactggaggtcacagttatttattgatcacaattgtggacattaaaacagaaactgttcac

SEQ ID NO: 5829 - DNA, 1075 bp, Homo sapiens
cctgaggctgggttggagcagccctcctgtgcctgaggccagctcccaggcccttggatcaccgcgggaggaaccctcaggatgggtggagcctccaggctatgggcattgcctgcctgatgccagcaccacctgggctgggccctgggcttggctcgagttctcctgctggtgaggctccggatctcaggagcagccctgagtctgcttcccaggctgcccctgccaggcctgcagcctccccagccagggctgctctctgctgtccccattcagtgccctggcccctgcattcatgccccccacaccccctcaggccctgtgcctggactttggggctggcagctgaagccttgagatcctgggccagctgccggcacacagctaggcagactctcccaccaggtgcccctgcccaggcctcctaatcgggggcagacaggcagggagggtgtggctgggctgggctgggcggggcggcctggggcaggggtgtggcccctaaatgtccccaacctcagagggacctagagtcctgagcctccagtagcttctctgggcctggcagaggtaagggggaggcaaccctggagtgtctggaggcccatggctggctgaaccctggatgccttttcttccgcgtccccatgaatgaaagctgtctgggccttcattctgcagacagggacaaacagctccatgctgtttgtcctcccagtgcagccgtgctgggagggtctgggggagcttcctacaaggagagactcctgctgctttggaaaactgagaaaaaataggggtctaaccctctcctcccattttacaagtggggaaatgaggcgtgaaaggagaggcgtctgggttactccgtgggtctggggtccagggaagggcctgtatgggggagggagctgggaggggacggtgtctggctctacccctgtggggtggggaggtggggctcccctgtatcacaggacatcccccctgagaggtccctcatatgtctgggtcctgtgggtgggggactaactgcgcaatgtagttaggtgctcaataaacggagttgccgctg

SEQ ID NO: 5830 - DNA, 1073 bp, Homo sapiens
gggaactgctggctcgcctggcaccaccacacggccacagccagccatctgctctgccagggtggcaccagctcagctggcgcatgtcctgtgctttgtggacgctgctgtgtgctcctgaacacggcaggccctgctatcacaccttgggcttggaggtcattgggagtgagcagatgtgggggtggccagccaggctggccgcactccatcactggcactgcctgccttgggacccgcttcccacctgctgcggtcaccatggtggcgagcacagcaaccccaggtgtccagagcactgccccatgcccaccctgtgtacccaggtccagagggtccgtccaccacagcagccccaggtggagggctggtctccctgggggctccccagtggctctgccctggctgtgggggtggagggaccttgccaggatgaaccccccagtcccaggcaccctctagctccctcagccgaacagcaccctgcatctgggggattgaagcagtcgctgacccccgtccccagcgggcccgggccctcactccctgaaccacacggggtttatttgcggatgttccctggagaggtcgctttgtgaagaaaccatcagcaggctgtgagcatcgccaggctgctgtgggggcgggagcagcctcagtgtcaagggcccgcccactgacccagccgtacctattcgtccacggtgccccgtagcagcaggtcctgcggccaaatctgtctcccttcatgggcctcccagggaaggaggaagccctgctgtgcagacacctctgtggccccccaggagtgtgagtggcctggggagggggccgtggcactgaggccgaaagtgcctgccagacggcacggtctgggtgcgggtgttccctgtgagcccgagtccgcttcaggaggggagcctgcaggtgccggctggtgaggggatgacgcgctgtgggtgggaggaggcagcgcccatctcagcagcaccaggactgcctgggactccctggcaacccagcaccggggaagccgtcagctgctgtgacaataaaacctgccccgtgtctgg

SEQ ID NO: 5831 - DNA, 1650 bp, Homo sapiens
cggggatgggcggggccgcctgtgcagatgccaggagggctcgagctggacactcctggctggacgccaggccagtgccgcctacgtggagactgtccacacagctgcctcagaagcgccgggctttcctcacacctgagccgggtgcgaggaggagcatgcacggaccaagcgcggcaggcgggaggagggggcgcggctgggctgctggtgcttccgggaatcttggtcggaaacaagccgggcctccccagctgcctgggcttgaccggcggggagcctggttggcctttcttatttatatagagaacacttcacttttttgtacatttttaaggggccttcagggaagcctgggtgtggcccggtggtggtgcactggtgacttcatggccacgccagctgcggggacgcacttgggactcctcgagaggggactcgcggccgcgatggcaaggcatcctgtgaattcatgcgctgcgagtggcggggctgcccagaggccgggggagcagacagggccggtgctccctctggaagcttgggtgaccggggccctggctcccacgggatggagggtgtggtcctgtggtcagagcccaagcagcactcaggagaggggagaaaggaggtgcacctggcagcccacatttttgttgctccccaaatccctccccacgtggggatgagaaccttcctgctgtgatgtgacaccttcggggacattgaccactcaaaactcagatcatctcgcccaccctggagagtgcagagctatctgtagacttaggaatacttgatgggcagcggtgcagaccccgggcacctgcgtgcagcctcctgttctcggcagcttctgtcgctggccctggggtccccacagctgcagctctcctgtgaggttgcacggcatcagaaccatcctgaccttcttagggacgtgcctggaaccacctcgtccacgtccacgtccacctgggggcctcgggaggctaggcccctcctcaaaggcccaccagcccggcgctcatgctgagccccaggcacgcagggccggccacctctctcctgaagccattggccgctcctccacccagtgcttctgcccatgcctgccccagcagcccctctgcacggtcaccatcgcctgggcctgcccacagcactggtgctcacctctacctcctgtcctcaggccgtgcggcacgacatggccagcacgcagaaggagccctcccgggacccaggaccccccgtggtggactccgcggcacatgcttcccaaggtggtcccacggagggtgttactgggcaccagtggactcgccccatggcccgttcctgggagatgagggccgtggcctgcatgaactaccagatgagtaagggaaccccaggcaggcggccctgccacagcccccaaagacactggcctcctgctccagcttccctgtcctggccccacctgtcctgttgctgccagcagggcccttgtttgggattatgaacaaacctcacagactttgaggacctggatggtcctgcattcacggcatcaacactacccgcgctgctgttagacactccgccattcctggttctctccgaaccgttctttgtacagtaaatgtaattcagctgtggtcccca

SEQ ID NO: 5832 - DNA, 59 bp, Homo sapiens
cccccgcaggggcctgcgccaccccgtcctggtgaataaacgcactccctgtgcctcag

SEQ ID NO: 5833 - DNA, 284 bp, Homo sapiens
tggctgctgggagggggcgctgctacacggccgacctgtcgccaggagagaagcatggcgccctgcccacccactgcgcctggctgggtgccggccacacctgaagtgccagcatttggacttttgcacctttttttcccttggcccggctgtcccaaccaagctgccatggccaagggccgaacccgtctgacctcagccctgctcactgtgcccagggaccagcgaccagcccctggggctggcagggaggagctccaggctaataaagtggagaaactgtc

SEQ ID NO: 5834 - DNA, 240 bp, Homo sapiens
gatgcagcagggactgtggtggtgggcatcacgcctggtcatgccaggcacctggacacaggcttggcagaggcgccaggttgtcaatggcctcatgctgggacaggccaggattcacgtaaatcgcctggagcaagctgttgtaaatttggcgccctgtgaatactttcatacctgttgcccttttgcctaagaaatctttaatgtttctatcttgtaataaacatgggcatttattgc

SEQ ID NO: 5835 - DNA, 564 bp, Homo sapiens
ggcccctggtacccaagccccctcccctgacctgggtgtgcctcgctgctggggctctgcaggggcagcacagctggggtgcaggccaggctgccactccgggaacgcctttgcgccgggactttttgtttctgaaggcagtcgatctgcagcggggccttatgctgccatgcactgccctggctcctgccggacccccagggtgggccgtggcaggtggctgagcaggagctcccaagtgccggccaccgctgtcagggattgcccacccctgggcatcatgtgtgtggggccggggagcacaggtgtgggagctggtgaccccagacccagaattctcagggctctacccccctttcctggtcctaggtggccagtgggtatgaggagggctggaaggcagagctttgggccaaaagcaggcgttggggggtcccccctcaagtttggagccgtttccgtggttgtagcagaggaccggaggttgggttcctgattaaacttcactgtgtgttttctatctcggatcccagtctctgaagacaacttgctttgattcaacct

SEQ ID NO: 5836 - DNA, 215 bp, Homo sapiens
ccggctacctgaggctgcacaggccagggctcgggcatgtggtggccgcccaccaggggccttcacgtctgccctttgtgaacggacgtctcagggctgctgtgccccttgggtgtgggtggcctcaaaggaggccctgtcccagccacccaccccccactcccaggacttgcggtctgagcctttttggataattaataaatattttacacagc

SEQ ID NO: 5837 - DNA, 278 bp, Homo sapiens
ggttccctgccctacctggcgtcctggtccaggggagccctgggcagaagcccccggcccctatacatagtttatgttcctggccaccccgaccgcttcccccaagttctgctgttggactctggactgtttcccctctcagcatcgcttttgctgggccgtgatcgtccccctttgtgggctggaaaagcaggtgagggtgggctgggctgaggccattgccgccactatctgtgtaataaaatccgtgagcacgaggtgggacgtgctggtgtgtg

SEQ ID NO: 5838 - DNA, 91 bp, Homo sapiens
ggggctgggtgctggggaggggctggtaggagggagggtgggcccactgctttggaggtgatgggactatcaataagaactctgttcacgc

SEQ ID NO: 5839 - DNA, 32 bp, Homo sapiens
gtattagacacgataaagactctgtgggttct

SEQ ID NO: 5840 - DNA, 547 bp, Homo sapiens
gtgagcatctctggcttgggggaggctgctcattaagtgcctgcctgcccgcccacccctcggcgccatgctcccgcgtgggcagcgggccctgcgcctcactgcacccctccctgcagagaggagccggtgcgcaagttcacgggcaaggcggtccccgccgacgtcctggaggcgctatgcaaggagcgggcgcgcttcgaacaggcgggcgagccgcggcagccacaggcgcgggccctccttgcgctgcagtgggggctcctgagtgcagccccacacgactgagccacccagaccctcacagggctggggcctgcgtccctcctcgtgacctcggccagctggacccacatgagggccacctctggaaccttcttcgaggccctggccagccatctgcccagcctcggagggtgggcaacctggtgcttcccgggtggacacacaggaccactcagtggggcctgtgtgggcgccgagacctgggtgtctgggaagtggggcacacggggcctccgaactatgaataaagctttgaaaggcc

SEQ ID NO: 5841 - DNA, 132 bp, Homo sapiens
gggccccactcccttgctggccccagccctgctggggatccccgcctggccaggagcaggcacgggtggtccccgttccaccccaagagaactcgcgctcagtaaacgggaacatgccccctgcagacacgt

SEQ ID NO: 5842 - DNA, 97 bp, Homo sapiens
ttctctgagccgcggacatgccctcgcattgcttcccgcagagtgcagagacaggaagctggagatgtctttataaagtcacacctttacagactgt

SEQ ID NO: 5843 - DNA, 1592 bp, Homo sapiens
gggcccagccgcggggagggactcgcaggcgtcagggggcagccttgtcccggcccagtgtgtgtgaccagggcgggaggggccccagtggctgagctccaagtgcctgctgaagtctgcagggaaacacgcttgctgcccgtggccctcggcctccagatggccacacctctgccgacgacggaccagctccctctcccttctatctttctttttgaggtggtgggattattccacaaagaagggctgccgtttggtccctcttccgtgaggactggcggcaccagcaccttcgctttgcatctcggtagaggagaaacggcagcacagcccaaggaccaaaggagggggtggcaggggccttgcagggcgctgtgaggtccaggccggtcttggcgccgagagcccctgcactcaaggccacattccctcgacaacggctgcacgggctgtccgggatccggggtgtctgtccgcagactgggatgagtctactcgagcatctccgggacctgcctgtcagatctgaggtgtctccttgctggcagagtgcgctcacgcgagggctggctgtgatgaacacatctctcttttatttttatgtttttgataatttttatttttgaagcttaaatgtgtttcttctgaaagctgttaaagatgtatttatgttctgtgttattttatctttaattaatgaggtaattcgggcaaagagtagaatttaagacaaaacggaagctgggaagcttcccttgagggcaggcaggaggtggagttgcagctgttggccggcatcacgttgctcgttgctcggcttatgggaggccgccctggagggcccggaggtcccaaggtccctgggaggactgggcccctcatgcctcgagcttggcaaccgaaaacccgagggaggagaagggacctgccttgtgacatctctgatcaggttggggtgccccagcacccagtaccagtttggggtttgggaagcaggactccgtccctgtccccgactgtgccacgtggtaggacacataggacacaggaattcctgggtccttgcccatgactgtgccatgtggtaggacacaggacacaggaattcctggaaagtggtggcttcagaagtgatcttggctcgcaggcaccagtgccacctaccaagctgtgaaactaaaccttctccactaaacgtcgttagggcctcagttctagacgagtcatacctgattcacctgcactgcttcccctgtgtgctgagcatagagcatacaatagcgcctacttcacggaaacttgtgcctttaaactttgtaaacttaaacacagccgagaagttgcttctttgtactttttctacttttcctacttttttgtagaaaaaaaagataatgcctctgcttctatttctctgggggtgggggtgggggccgggagccgtcgcagacccgtttcatgcagcgtctcccttggcaccgcgttcggaggacgcaccctcactcccctgctgccttcactcctttctgaccaagcaacgctaacttttgtacagatcgatttgataaaattaaacaaagtgctttttatgg

SEQ ID NO: 5844 - DNA, 777 bp, Homo sapiens
ctcggggcttggtgccgcccacggctttggccctggggtctgggggccccgctggggtggaggcccaggcagaaccctgcatggaccctgacttgggtcccgtcgtgagcagaaaggcccggggaggatgacggcccaggccctggttctctgcccagcgaagcaggagtagctgccgggccccacgagcctccgtccgttctggttcgggtttctccgagttttgctaccagccgaggctgtgcgggcaactgggtcagcctcccgtcaggagagaagccgcgtctgtgggacgaagaccgggcacccgccagagaggggaaggtaccaggttgcgtcctttcaggccccgcgttgttacaggacactcgctgggggccctgtgcccttgccggcggcaggttgcagccaccgcggcccaatgtcaccttcactcacagtctgagttcttgtccgcctgtcacgccctcaccaccctccccttccagccaccaccctttccgttccgctcgggccttcccagaagcgtcctgtgactctgggagaggtgacacctcactaaggggccgaccccatggagtaacgcgcccggccccgatgcgaatcaggcctcccctacatctgggggcgttggccgcgagattcccattgacacctttgtttcgtgtgcttttaaattcaggttaaatgttgcaataatctgatgcagaagactcagcttctcaagggagagggagggggcggagcggaataaatagtaacttatttaagaaatgc

SEQ ID NO: 5845 - DNA, 313 bp, Homo sapiens
gtcaggcctgggttggccacctgggtcactggaggaccaacccctgctgtccaaaacaccactgcttcctacccaggtggcgactgccccccacaccttccctgccccgtcctgagtgccccttcctgtcctaagccccctgctctcttctgagccccttcccctgtcctgaggacccttccctatcctgagcccccttccctgtcctaagcctgacgcctgcaccgggccctccagccctcccctgcccagatagctggtggtgggcgctaatcctcctgagtgctggacctcattaaagtgcatggaaatc

SEQ ID NO: 5846 - DNA, 117 bp, Homo sapiens
ctgcaggcgggcgtggtcagctgggaggagagctgtgcccagcccaaccggcctggcatctacacccgtgtcacctactacttggactggatccaccactatgtccccaagaagccc

SEQ ID NO: 5847 - DNA, 596 bp, Homo sapiens
gcagcgaccttgtggcatcgtcaaaaggaagggattggtttggcaagaacttgtttacaacatttttgcaaatctaaagttgctccatacaatgactagtcacctgggggggttgggcgggcgccatcttccattgccgccgcgggtgtgcggtctcgattcgctgaattgcccgtttccatacagggtctcttccttcggtcttttgtatttttgattgttatgtaaaactcgcttttattttaatattgatgtcagtatttcaactgctgtaaaattataaacttttatacttgggtaagtcccccaggggcgagttcctcgctctgggatgcaggcatgcttctcaccgtgcagagctgcacttggcctcagctggctgtatggaaatgcaccctccctcctgccgctcctctctagaaccttctagaacctgggctgtgctgcttttgagcctcagaccccaggtcagcatctcggttctgcgccacttcctttgtgtttatatggcgttttgtctgtgttgctgtttagagtaaataaactgtttatataaaggttttggttgcattattatcattgaaagtgagaggagg

SEQ ID NO: 5848 - DNA, 959 bp, Homo sapiens
gtccatcagctgccagccccggccctggcccccaccccaagttccctgaagcatcctccagctcactgtggccagctttgtgcaaccagggcccacggcgcccctcctgtgctgtgacgtgtgtgtcgtggctggccccgcggcgcctaccgccctggccgtgtctgtctggtgtgtgctgtgaacccctgcacccaaccccacatctgggtggccaacttggcaggacttggccagcagctgcccaggacacagtgcaggccagagcgggcttgaccacctggtgggcctccctgcccgcttccttgggctccccggccctgggtgggcggtgggcagctggtctccagggactcagtgagtggctgtgctctctgcacaacgggcaatgtgcagacgcatttttggtaatcacagctggggagtgaaaagggtgccactggcaccactgggtggatggtccagagcctccacccacagaggggatgcaaagggcaggtgagtcaagaaccgcataggtctccagtccccacggggctcccaggccggggaaaggttcccctgaggtcactctgaggccagggacgtcacccaaggctggtggtcagtgtgaagggctccgtgccaactggtcagctgtccttcacgcacatatccgtggccacctgagacctgctccacgacccttccaggcagagccgagagttcgccccaacccttccccaggcccagtgtgaaaaacagactcacaaggggcttcttggcctgcagcttcatttgcgagagcgccgaggcaggacacagagcacagctgtgctggaagtgtggggagaacccggacagctcagtcctgccagcagccgcaaagagccgaggctgccaggcccatttatgtccctcatgtctctagattttctcgtcacccagcctcaaaaatatatgtgtctgcaaccctcagt

SEQ ID NO: 5849 - DNA, 259 bp, Homo sapiens
ccttgtggtgggagagcagaggtggacgcggccgagagccctacagagaagctggctggtaggacccgcagggaccagctgaccaggcttgtgctcagagaagcagacaaaacaaagattcaaggttttaattaattcccatactgataaaaataactccatgaattctgtaaaccattgcataaatgctatagtgtaaaaaaatttaaacaagtgttaactttaaacagttcgctacaagtaaatgattataaatact

SEQ ID NO: 5850 - DNA, 518 bp, Homo sapiens
tccctggaggcctccccaggaccaccctcgccgacagcaaggcaggcggctgagcagcggcctggagcagcagagccaggctttgtagcgaggccaggtcttcggccgcatccggtacggagagtgcagatgcaggaaggcccggcctgccgctatttatagtgcagccagtccgctaaaaatacactgggcctgggcactgcccgccgggacatggcagcctggacgtggggctggggctgtgggcgctgctggcggggttgactcttccagtgagggcagaaccaggctggcaggaggggaggacggtgtacctgctgctcagagcccccaaggctctcctctgagagccaccaagcaggacagagcagctcttgtcccaggtccctcgggctgagcgccgtgtcaccaggagaatagtgctcacagcccaggcagggtgtgtggctcctggatgggctcgtggggcgggatgggacagggcacgggctctcagaaaataaactgctttattggaa

SEQ ID NO: 5851 - DNA, 216 bp, Homo sapiens
gtcgcccttctcagcgctccatcaacgcacacctgctatcgtggaacagcctagaaaccaagggactccaccaccaagtcacttcccctgctcgtgcagaggcacgggatgagtctgggtgacctctgcgccatgcgtgcgagacacgtgtgcgtttactgttatgtcggtcatatgtctgtacgtgtcgtgggccaacctcgttctgcctccagc

SEQ ID NO: 5852 - DNA, 471 bp, Homo sapiens
ctaaggccaccttgcagccgctttccagggccaccaagggctctgctccagcctctcagagaaacagaggcctgggctcggttcccgggccctgcaggggcaggcccaggcagcgtcagccggagagcttctccccgaccagcccagccccaggatgtgtcgcaccagcagctctgcctggttggcctgcagtgccgtggtctgcgtgctctgcagctgtgagacgggggcggcctgggctctcttcccatccatgttgcctacctgtgcccctggcagccgcgtgtccacacagttagcggagcgcgggacttctgcagtcctcaggtgaccccgggcctccagcaccctgggtcgctgtcatctgtgtttagctcggggagtgccccctaagggggcgaactgacctcaggcatgttttgtaactgtagaggcgcctgccattaaacgtgtccgctgctgtggcgacag

SEQ ID NO: 5853 - DNA, 3861 bp, Homo sapiens
ccacacgtcctggtggcggatgaagccctcttcgagctagagaaaaatagataagcccagcagccccagaagatggtctgaacagaggcatctccgcacccaagactgtgcaacgggcaggaacgtggtcacagagctgcttccccacgagcagcaggcaacggcgtccaaggagactaggatgagttcttggcaagggccagcgttagaaatcactgtggtactagagccgttcttcaccacgcctgggcccatgttagggtctgcataatgatcccatttcagcctgtgctctgcctcgattgttgtgttggacattccggtggcatttccttctgagacaagggagtatgtgtgccttggtgtagttgctgtgcactaggagctgtgatctccctctctgcagggaggccccagcccctgctgcttgctttctgccaaacctgtgctatgcatcagctgtgccctctgtggactgtaacgggcaggacagttgggtgtggcctgggctcatgcctggtggtgtcacatcccaaggcagcaagagcatggataccgatcacagggctgctgcggagtcgtggggccctgggctggtgcctcccctccctagaggttttgttcgtactcttaacagggagtgggggcaggaagagtcctgtactatgcaggttgtgtggactttacatgggaccctgctaagctggttgaaaatgtttttcttgtgttttaagaattaggagacatggaagaggaagaacaaagtcccctctgtagttggtttccttcctgtgtccctttgcaagcttccaggcgatctaaggtgtcatttctccctcctggggtgacccttaggcgctaatatgattacagcgaagactttcctgataagttctcaaactcgatgtgtgactgtttggcacttgagacaaacctgcctttgcagggaaagtgtctctcacgggcattggtgtgggcgtgcctgacatacgtgttcagtcccttgcatacctttgccttgagacttctgtgtctccttcccatttgggacacccaggtgagggcccagacatctggatgtggtcagacctcaccaaatatatgccttcgtggtggtctccctccttgcgccctcttgggtggccagcgttcctactgcagacggcccaacatccagtctttccccaggacagagctaacaagggcccctttgccttctcatcctcaggagttccaggcacatgagtcaccgtccatccacatccagtgtggcctggagctgctacagaggtgttgggcaggccatgcctgtgccgccatctctcccttcctgcctcatttcatcccccgcagcagccgggattgattgtgctttcctaacccccttggacctactctccctcctccccaccattcctcttcccccacatgtgtggcacgctgcagccctcaaggccagccctggcccctccactgcttctctccccatccacaatggagaaggtgaaaagaggagggaaaggcctttggtgtggacaagcatgtggacgccctccgtcctgcagtcttgccagcccaccacagccactgtagaccacaggcaggccgtgtactgcaccactgggaggacgtggagaggacagtgaacttccaggcaagagcttccttcttttgtctcacgagtttttcttagagctcttgcctgagctggcttccctccttcagacattgacatgagatcttaagcaaacagtcccaaacctcttaggggtgaaaaaagaaacatgccacttgattaggagagagacagcagtgtttgaactacagcatctttacactagcttgtgttttgtgctacgtataccagcttccaaaattagcatctcattgagccagagaagacaaggagatctccctctgggcatctggctttgctgcgtctctagagggttaggataccaggccgagttcaggccactgctagctttctcatactcccacaggctagaccagagatgccaagtcccaacagcactgagctgtgtgcactgtgccagggacaggagggtttgtgaactgcctgtcagggtacctgttagcccctgacaactcagtggggtgaagttttggaggtcagagtctgctttcgtaggctctttagacagcacctaccacttggttctccagcgtagactcctgggagcagccaactgcagccattgccatccagtggggagatgggttagggaggaggacgggctgactcctctcctgtaataaagctgacaagagttctagaggattctgcttctctagtaactagacaggtgatacgcatttgcttgccacattaagggaaaatggtgtcatttgttgcagaaaaacaatggatacattttcttctggcctaaatgaatatttatgtgcaaacataggcaactgttaaaggctggaattttcaaaagatccaaacagagacttcctgcatcttctgcctttccaacagaagcggtgatcgtctaagtatgagcctgtggcttcctttgtgcatttgagcatgctgtaattaagatgagatcagtttcttagaaaaagctttcctgaatccctctgacgttgcctgggatctttctgttgattcgtcttttctggagattgggacagagcatctgtggtccagggaagttagtcctctggcctcaattctgttgtggatgtgcagtgataagcgggcattgcgtgcctcgggggatgcctagttcgtggcttcctggctgttttgtccttctgtgtcttgtagctgtagggtgccagctcagggagtggggtgttggcggcgtttccgcggttggcctccttgctttgccgcacctccaggttctgggcatgagaggccgtggcctcatttctggtggataacctttttagtttaatagcatctttaattagatcacagcattgaattcaaaatttcttctgcaaagaaagttgtggggcataagacaccgggaatgagggaggaggaagacagttgtgttttctctttaaaccttgagctctagccgatgcatttgtcaggaaatacagcactttgtcttaagaaaacaaggaaggaggccgggcgcagtggctcacgcctgtaatcccagcactttgggaggccgaggcgggcggatcacctgaggtggggagtatgagaccaccctgactaacatggagagaccctgtctctactaaaagtacagaattagccgggcgtggtggcgcatgcccataatcccagctactgaggagacttgaggtaggagaatcacttgaacctcagcggcggaggttgcagtgagtcgagatcgcgccagtgcactccagcctgggcaagaagagcgaaactgggtctcaagttaaaaaaagaaagcaaggaaagagtaatttacaacgaaggaaaaaaacccacagcacacccttcgcggctgtcagcgctctcctgatgtcacagtggctgcgtgtccttggggtgggtgaggtgtggggagcccagcccctggccctgcctcccgcgccccgctccccttctctctcttactcggttaagccatagcgaggcctccgctcgtttcagatatgaatttgttttatagattataaatatgcatatacagtgtatgtataaagcagaatgcctgcctttcctggttattttttgtaccatattgtaaattatattatttattctttaccaattttgggaataaaaggtgttttggttatttaatataataagagctgttaaacttctgtttaaatttccagttcaacttgtaaatgtttttattgtgcataaatacatactaatgttgatct

SEQ ID NO: 5854 - DNA, 3073 bp, Homo sapiens
gagaagccactgctccacccggagccagaccagaaactcaagagatagggtagccatgttttcatttccttttgcccaaatgagcggggtgggaagagggttagtcttatgtgagcctggctgctcagcgtctcctggccgtcatgacagctgcttggagacccgtgccttccagatggctgggagatgcctctgtggggatgaaatggggcacccctggccatcactcatgtgtagtccaggtttgagaggaactggaaggggggtgagggtggggaggtggggcagggcatggtccttggatcaacagcccgccagctgattggatgtctaggaatgactgaaagaaaccaaaacagcctgtccactgctgctgtgggatggaggaggcgtaagcagaaacactaacagtatattgacctcttagcagaaccgcttccattctggagatcacggctgctaaatccagcatccccacttcattttacccccagcatattgttctgtagtcttttcttgaaacatcttgattgcttttcctcggcagctttcaaaaaaccaaataataatagttatccgtcttctacttcatggaagattgttttggtgccctgaccctctgaagtgcccagttcctgccatctgaaacctcggcctgatctgatctcatgttggaatctgcctgtctttcacacagggctggtcttggtcctttacatgccagttttgcttgtgaattcttgcttttttcctctcatcagccttaagtttaggcgtttgttgttctccagtgatgtagacagttcccttcacaagtcacagttcttcccataaatgaggcccgctgacctctgcgggactttaaaaatctattcagatatttccgagtaagtggcttgtttaaattcttcctgtgtctttctttattccttaattggttggtggaaagaagagatgcttgggaaccttgggttcttaggtttggattctttaataatatctaaaaagctaaattttaaataccagctttacataaatgattgttgactctggtctgtttctgacacctttccagaaaaaagtcaattgttcaggtacaccaaagaggaagaagagctgtggaggccaccctctacaaagctttatagaacttctggatctaactcacaaacaagcttccagaagagactagagaccttaggccaggagatgaaggagttcagtagcaaagtcacacctgtccaattccctgagctttgctcactcagctaatgggatggcaaaggtggtggtgctttcatcttcaggcagaagcctctgcccatccccctcaagggctgcaggcccagttctcatgctgcccttgggtgggcatctgttaacagaggagaacgtctgggtggcggcagcagctttgctctgagtgcctacaaagctaatgcttggtgctagaaacatcatcattattaaacttcagaaaagcagcagccatgttcagtcaggctcatgctgcctcactgcttaagtgcctgcaggagccgcctgccaagctccccttcctacacctggcacactggggtctgcacaaggctttgtcaaccaaagacagcttcccccttttgattgcctgtagactttggagccaagaaacactctgtgtgactctacacacacttcaggtggtttgtgcttcaaagtcattgatgcaacttgaaaggaaacagtttaatggtggaaatgaactaccatttataacttctgtttttttattgagaaaatgattcacgaattccaaatcagattgccaggaagaaataggacgtgacggtactgggccctgtgattctcccagcccttgcagtccgctaggtgagaggaaaagctctttacttccgcccctggcagggacttctgggttatgggagaaaccagagatgggaatgaggaaaatatgaactacagcagaagcccctgggcagctgtgatggagcccctgacattactcttcttgcatctgtcctgccttctttccctctgcgaggcagtggggtgggattcagagtgcttagtctgctcactgggagaagaagagttcctgcgcatgcaagccctgctgtgtggctgtcgtttacatttgggaggtgtcctgtatgtctgtacgttggggactgcctgtatttggaagatttaaaaacctagcatcctgttctcaccctctaagctgcattgagaaatgactcgtctctgtatttgtattaagccttaacacttttcttaagtgcattcggtgccaacattttttagagctgtaccaaaacaaaaagcctgtactcacatcacaatgtcattttgataggagcgttttgttatttttacaaggcagaatggggtgtaacagttgaattaaacttagcaatcacgtgctcagagcttttgcctgtcagttgtgtgtgtcccttatagtcccttcccccacagctcttgctgaaagagtttgccttgttttgttttgttgttttgtatttagccagaggatgccaaaattagtcttctcaaagctttgagtagagtaagtgtgggaataagccagtttttttttttctgtttctgtaacttaaatgaacgggtttttttcccttgtatgccacttgtcctaacatgtccttaaggtgtttaacctgcctctgacctggcttgcaatgcataggtgaggagaagcagagagcttgtcatatgcaagtcctgtcaagaaaacaggtgggcatggtggctcaggtctgtagtctttgggtctttgggaggccagggtgggaggatcacttgagctcaggagtttgagaccagcctagacaacatactacgaccctgtctatacaaaaaaaaacttctctaaattagccggatgtggtggtgcatgcctgtagtcccagctactcgggaggctgagtgaggcaggaggatcacttgagaccaggaggttgtggctgtagtgagtgatgatcatgccactgcacttcagcctggaccacagagcaagaccctgtgtaaaaaaataaaataaaaaacagattgg

SEQ ID NO: 5855 - DNA, 1492 bp, Homo sapiens
agctgctgccctgcctggcccgacctgtacataggacccccgaccacctgacccccgcccggcccgcggggtagccagccaggcgccgccgcccctcttctaacctctcaacctgcagctttcacctgagtctggcccctccagcgggcagggagtgcggggatgcggatcagctgggaggaggaggggaggggaacttccacccgaggggaagatgctctcgggacagtttcccgggcagctcctggccagcttccagcccagagtcctcaagtccagggcaccttgggcccagcgcaggcagaatccgaggtggtcctggctctaccctgggcctcctactccccagcacccctggaggaggcaggggctccccgccgccgaggctgcctgccctgggcccacctctgcatgctgctcatggggccaccctgcctcctgggccctcactctgcctaggggagctgggccaggcactagcctttgcccagggaggtgggcctcaggctgcccaggtgcctgcaccccagccggccttctctggggcctccccgtcgtcaagcctctatcctgtctgtccccaccccagctgtcccctgcccagggagctggcataaaagcacgaggcccggctccctggggcagctgcttgagaacagagactgctaccccatcctgcccatgcaggcaggctcttgccagccccgttctgacccgtgtccccccaggctctgcctgggcagaagactcaccttggaggagtgggccctggagtcctgtccctcccagaagcccccagggtgggatttctcaggctgccagggcaggcccaggcctcaggaagaaggggaggcccctggcctctccgggatcagtcctaggacacaggctcagcctcaggttgatgggggatgatgtgctcccggggcctgcctcctgcacggggctccacggagcccagctcccagacacgctactaagtgcctagggttgcccgctgtggcctgcttccagggagcaacagagaggccaccaagcagaggcccgtggggctgaggatggagccgcccccagccgactccaagcccgcagagggcagacgccaccctggactgctctccctgcccagctgggcctctctggcctattcctaccttccaggcccactgcactcctgtctgggaggcccttatgagggcagcccagcccccgcacccacccccaaccagagaagcacagatcttggggagctgccccacaagccccgctggccaccgagggctgcagccgctgcgctgccggcttctccccaccaccctgccacctccactgtgatgtatgtccgctccctcgtctgttcccccaggatctcgaagtgactccgggctgagcagtggggcggctgggggaggggtgacgattctcctcaggctttggccctgcaagcaaacccacatatctgctctgtatgtaataaatgtcttaacgtcgt

SEQ ID NO: 5856 - DNA, 1003 bp, Homo sapiens
gttatttcttaacaagtttcgagagagaagggagcaagacaagagcaagcaacggctattaaatgtcacaatcctttaattagaaaccatttattggccggacgcggtggctcacgcctgtaatcgcagcactttgggaggccgaggcgggcggctcacgacgtcaggagatccagaccatcttggctaacagggtgaaaccccgtctctactaaaaatacaaaaaattagccgggcgtggtggcgggcgcctgtagtcccagctactctggaggctgaggcaggagaatcaattgaacccgggaggcggagcttacagtgagctgagattgcgccactgtactcctgggcaacagcgagactccgtctcaaaaaaaaaaaaaaaaaaagaaaccatttattttaaaaatgattagattgctatgcctcaactcatagaagatgaacccttcaagaaaacgtgaagtagaacgggtgggccagaaatgaaaacaggcaagtaaagtatttcttcggaaaacattttatcaaaccaaatgttaaaaagactttccttttgtaaaactggattagagaagacttttcagtgggttatctctaggatgatcagtagttcagcacttaaaaactgcagagaaaactgaaagttatgttccagataactttccgttgtttaccaaattttcttagatttggtcatcatcaggaagcatttgtaaaaataaaaatctccacaaattactggcccatctcggacttgctgaatcaatttgataggattaatctccagtgaagctgtgtttacagggcattccaagtgattcttatcaggaaatgtgaaaaacactcctgtacataatcggttaatttaaaattttacttaataagtgaacaagtaatgaagatttcacctgtttacttagggtatctacccagacccatcgattctgagttcgggagatgattttgaaattactgttttccaaataaaggtgctcccttc

SEQ ID NO: 5857 - DNA, 910 bp, Homo sapiens
cccaaagtctcctcagcaacacttcctgtgagactacaggaatgaagggtgcctgtgtgatcagtcagatcaatcagcacatggaaactgagaaagacagatttaaagtccaaggagtttttgttgcaagttgtgcacatgttagatgcttcatttacaatataaccacagctggaactgaaaagaaacaaagacaatgataaaatgtgatgccctaagctacaaatttcatctgtagcagaaaaagaattgtcactaaaaactctacgacagtgtgtggaaaacttactgagtgttcagtgctatgcggtctacaagacagtcgtaaaaaacagtaaaacacactttctacgcagccattctcaggagtcatctgaaactgcgtacaccagtcctctgcctgccctccttccctccctctgccaagccctcgaggtccatcccagtctcatttccttgctggggccctcccttctcgtatcccagcctgcagcctttctctcttggaacagcagcagagtgcacgcctcaggactgactggtgctgttgcatcagctccttattctcacctccctggctgggagttctgagggcaggaactgtgtcttgtgcctggaaagcacgagttcaacagctgctcactggatgggcctgcacggggccttctctacaaatacagaaagccttgcaaggctggccgggtagcacccagatgctattaacactgctggtgatacactctcctctctttcagtgatttatgctattccatatttctgaagcaagccttactttagcaattttaaacagggaaactaattcaaatttctcaaataggggaaatgaactgaagatagtggtttcttatctagccacagatcacttggtctagcaaattttagatgcttt

SEQ ID NO: 5858 - DNA, 69 bp, Homo sapiens
ggcagctgtgggtgcccctgctgtgtggctctgtatgactgttgctgaaatataaagccctgcaacctg

SEQ ID NO: 5859 - DNA, 65 bp, Homo sapiens
ccggtccggcctctctccagtccatcctgaacccctggaaaacccataaaggccgctctcctggc

SEQ ID NO: 5860 - DNA, 1719 bp, Homo sapiens
agggtggtcagccagagctcatgggacagctagccaggcatggttggataggggcagggcactcattaaagtgcatcacagccagagcctgttgtgtctcagttgggtggtccccaggacactgcctgtggggacctgccctgcccctcttaggtttggagcagaagtggaggtgcccacagcaggtacccactggccccctcctcagtggagaccccaaggagctgcagctgaactgcaggggagggaaggaggagcagcctgggctgccccttgacattcaggatgtagcttcctgcccaccgcataccctggcgcctcactcctcacacgggaagacagcgggcctggctgggcatccctgtgcctgtccctggcggccaggccattgccttcccactatgcagccagggatgcccctgccccccatggctctgtgctgctcactttagggggctcaattctccactctgctcagtccctacagggaaagctcaggtcgggtctttctgagggtccaccagccatcctaccctctccctgcctggcacatgcctgccagcgttgtgtcatgcctgtccacaggggattcgtggggctcacttcatcagagtttgaagcccaaatgaaacgctgaagtgactgagaacctggcttcagtatattttctgctggggcttaataaagcagtagacagggcttgttccatccctctgtgctcagctgcatttcctgctggggtcctggttcctcaggagagagagaccacagggtgagagtgagccaggaacagcaaggacgttgattggttggggcaggggggccagagtagctgatgtaggagtactgggaggccagacggcacgaggtctccaaggccccagcaaagccatggcttctacccctagttcccctgacaggaagttcttggcgggtttggagccaggggatggcatggagtgatgtggctttgaagggtcctctggctgctgagctgggatgaggcaggtaagggtggaacaggaggggtggggaggaagccggggcagtcaccgagtgaccaccaagaggaagacccaccccacggcggggacagatgcggggtacgttaaagggagagccagagaactcatggggtgaggatggagtccgaggagactgctgggagccgccgtgtgggtcagagatggagaaggctgagtgcagcaaggtggggggtgactgggacccagcctttgggcctccccagccagagcagcccagcaacagtgtgtcctgtggtcataaaactccagggacctctatcctccaggagtctcagcctttccctgggcgcaggcccaccttggcatggccgcctcaggcctccatggagggagctgctatgtccccaccagattggccccgtgcggctgctggcttctgtagaggctgcccagaggggccaggtggcacaaataagagaggggagatggggggcagccaggagaggaggtgtcccttcctcgcccagacacagcgcgcttctctctggcctttcccgaggcctgtgagtgcctcaggaagcagctgggccctctgggaaggctgtgttcagcttaggaacataccgcctgtatctgctgtccctcccctgcccccctgccccccccaccgccttccctttttccctgtcttccttaaagtttcactcctgaataaaacttcactttgccttag

SEQ ID NO: 5861 - DNA, 1202 bp, Homo sapiens
cggctggcaggcacagaccagggctccaaggccaccccaccaacgcaggccccagggtctccgggacctcccttgggtccttccagctcagtgccgcggacagagtaggtggccgctttgcgccatccggggccaagagggggtggacccgcgtgtctgggctgcccctgccaagttcccccagtccctcagcacctggccccaggactgaggtcctgagaaggggatagcactgcccaggacgtgtgtccctagcctggaatggactggcctggggaaggctttcccctcttgggccacacctgctcactctggggttgggggtccagctgccctctacgatcaggtgcaggggctgcccaggacaaagcgggggcaggggaaagacaccaccctcgccccaagactggggatcctggccactgttcccatcccatgtccctgtgggtagtgactgtctcgtttctgtcatggtggtgcgtcccgtccggagccactctccactttctctcacaggctgctagaacagcccagccctgtcagtgttgtgatcatggtccagtcttcgggtttcacctcctagtactccacaagctgctcctctctctgtggccccggcccctgcccaggtgtgggtggttctggccaggaaggcacaaggtagctgtgggccaagacaccagccctgtcctagcccttcagtaagaccttgccaggagaggagaaggatgcctgggtgccaggcaagacaagcccctcagcaggagagaggcccagaggctccagctggccaccgtgccccacaagatggcccctgtgtggttccctttaccttggcttcctggcccagtccctgcctctccacctgcaccctgcttcctggcccagtcccaggttggagtccctctgcatagctgactactcatgcattgctcaaagctggcttttcacattaagtcaacaccaaacgtggttgccacatttcatcagacagacacctccctctggagatgcagttgagtgacaaccttgttacattgtagcctagaccaattctgtgtggatatttaagtgaacatgtttacaatttttgtatatatcactctctccctctcctgaaagaccagagattgtgtattttcagtgtcccatgttccgactgcaccttctttacaataaagactgtaactgagctgactgtg

SEQ ID NO: 5862 - DNA, 498 bp, Homo sapiens
gccccttcctgcctgtctcgggaccctgggacccctcccgcacggaccttgggcctcagcctgccccgagctcccccagcctcagtggactggagggtggtcctgccattgcccagaaatcagccccagccccggtgagcccccatcctgcccctgcccaccaggtactgggggcctgtggcagcaagatagggggagagagacccagagatgtgagagagagtcagagacagagacagagagagagagagagagacacagagagagacagagagagagcgagcgagcgcgcggcagccgcggggcgagggcctttgctgctctgccggggcctgctgactgaaaggaatttgtgtttttgctttttttccaaaaagatctccagctccacacatgtttccacttaataccagagacccccccccttcccctcccccttcccctcccccttgggacgcgctctaaataattgcaataaaacaaacctttctctgcaaa

SEQ ID NO: 5863 - DNA, 101 bp, Homo sapiens
ggccggggccctccctcctgcactggccttggacggtattgcctgtcagtgaaataaataaagtcctgaccccagtgcacagacatagaggcacagattgc

SEQ ID NO: 5864 - DNA, 718 bp, Homo sapiens
acctggctgagctcagtcctctggaggaagccgtccagtccctagaaggctggacagagggtctccaggcccttctgactttgttgcccagtggccaacgcccgagtgtctgttttcaggagccccaggtcaagccttgtcccttcctcctcccagcaacagtcccaacaagcaggcttctgagagcccgtggccgcacactggccgccacggaaaagcagtcttctgcacgggacggggagcggcaagtggacagactttgccacggtgctctgctgccccctcctgggcacgtccaggtgagggagggctggggctggcaccacgcacagtgcctaaccctagaaaagccatgtcttcagccgcacatgctcaggcagctaagggaggacgcctgcccacgcctgggacagaaggcttcactgctaatcacatcgtgcatctgtgtgtcctgggagctgcctgctcccggcccaccctctaggaggctctggctcaaacagcaatagggtcttcctcactgaccttggaggatgcctgtggccttgtgataaaatgtgggaaatcacagaaaacaccagaaacaacaactgccagcccggcctggccacaggtgaggtctgtgatttccgagcacgctccaccttgcactcaacttggccttttgattgcacaagcctttgttttcagtcctagtgaataaagttgtgttttctgg

SEQ ID NO: 5865 - DNA, 1554 bp, Homo sapiens
caggatccaggccaggctgtggtttcccctgaaccagccctggacctttctgagccaggctggccacatggggtggtctcggggtttctgcctgccccgtgggcataggtggacaggctctggcagccgggcagtgccctccccgtcccatgctcggcgagcctccctctactcggcactgtccttgctgcccagcccctctctgggtgccaggtacgacgcttgccccggcccaccctccatccccaccctccatccccaccctagatggagcgagggcctttttactcaccttttctaccgtttttagactgtatgtagatttggttacctcctggttgaaataaatgctccacagactgtggctgtgagtggggacagctcctcgggacaagggggctgtgtgtggccttgaggttggtgtgcacaggcactggctgctgtgagtgggggggcatggggcagtttcctttggtggaccccaggacttcggcccactccggggcctcccctccctgctaggaggcaactcgtcacacccaagctgctggcctccagtcccatctcccccaacacatgtgcccccaaaaagtgagccaggcacctctgtttcctgctgtttattgacagccgacggcagcgccttgcccagacctcccctgcccacctgctggagcccagcctgtgccgccctctgaggagaggcctggggggacagctgggcacgtccactcgcagggaaacacggggtgagacagcaggaaggggccctgcacgccgggacgccacctccgccagccgcctccacccgccccacaccacaatcgctggttttcggcattttttaaattttttttttaagaaacgtcaaagttgtgcccaacactgtggatcagcaaacacgatagaggagaccagtcagtacttcttggagggggcaggaggagagaggaaaagggagggcgagaatgaccacacaacacagccttggaccatgagcagaagcgtccgtgggaactccactggggtggatgggctgcctgcacagcccctggagagggggccaggcacaccctcagaggagctgcaagcccgtggcctggcctgctacatgccctgcttccacgtggctgccacgctgacacacccacattcaccaaacccacccgcgccctgggacgcagccacgccaggaggaggacacggccgccgagagcaaggcacaacctcgagttcttggggcgcagagaacttaggagagaagcacggaggagcccccggcagagcacccgcccccgggccccagccttccacctgtgctagcagcctggggcctccactctggccggaggaaggaccgcaggcagacagcctgggcctctaacagcttttgtccggagctagacttcgtgtcctttcagttggtaaatggttttctatagaatcaataatatttctttctttaaatatatatttgttaaagttatacctttttgtttctctggggaaatccgcctcagctcattcccaataaattaatactcttgatagctt

SEQ ID NO: 5866 - DNA, 539 bp, Homo sapiens
cctgtgacccctcgggactgcctggtgcaggtggtggcagctggagggacccatgcagcacccaggtcagagcagaccctcccctgccggcctgcgccagctggacctgatggccccctgtggcgccttgacctgctgggccaggctgccctgggactctcagcccccagttgcttatccagatgtgacagagctcgacccaagccaggctgcacactcctggactgggctagcctgcactgcctgggaaagtcggccgagggcccaaagctgctgaggggtctgaggctggtgcccacccccaagctagtgtgttctctgcccctccctgcccgcgtttcagggcctcggtccatagagaacaccaccaccatggccaggtggaagggtttattagtccctgccagcagctgtcctccctggtgcaggtggcctggccagcccactggattggggacgggccaggctgggccaggtcgggggctcagtctgggaggtaataaaagcagaccgacacgcagatgttgctcgggaagcag

SEQ ID NO: 5867 - DNA, 169 bp, Homo sapiens
catgaggtctgcggggtcctggccgggcagggacagggcagaggactctgagcgccccacccatgcctgcctggcctggtagagaagatggcacaggatggaggcgccccaagacggacagtgtacataagagtttcttgttgctttacaataaaacatgagaacctgc

SEQ ID NO: 5868 - DNA, 292 bp, Homo sapiens
ctcgaggcctggctggggcatgccacctgcagaccctggctctgaggaatggcccaacagtggccccttcagggtggcagccacccttcagtgaggccccaaggcagagtcggctgggcgtggaccaggggccatggacacgtgatgtgctgctctgtacctccgttccccatctgtgggacgggctgcatccagcgacctcatggggtgttgtgagccccatgaggggtgcagggggcactgcccggcagatgtctgctcaataaatgagctgctcccggtcgggccccac

SEQ ID NO: 5869 - DNA, 1838 bp, Homo sapiens
gtgtgtcagcacatttgccgcagtggatgtgtactgagggggctggaggcgaagggtgggagcatagcataggaacgctgcatagaccatggaggcctttgcgcagagagcagagaggatgacttgcggccaccaagtttctgtctccgcgggagtcccgtgcaagccatcagaatgttgaaatgagggtgaagagctcagatccctctctttggaaagtttagcctggaagcagttggccacactgtgtggagggcacctctctgtcccttccgtgtctcactgtctctggaagcttcagcccatgtgtgtcctggtgttcccagccccaccagagccccgtgccgggagctgacagctttcacgcttaaggcacgtgtgacctgggtagtcagacaccacttgagcccctgcccacatctgctggtttggggcttcagtggggagctgacagctgtgagcacaccactgtcccctcatccacctcggcctgcatggggcacccacttccttctgggtggggcttccatggtaagggggcctgcgtccctgcacactgcgaggactgccttggccacaggcccactccctacgacacgtgactcgttttagagctctgtcccagaggcgttcgtatgtgacccacagatggcgtcaatgtgaacacctctctttgtgctgaatttctgggccattcttttcctgtcttatttctaaatttccttcttccaagatgaaaacaaaagaaaaacttaaaacagaaggtattaaaaaaacaagagattcccaccattatttaggttcacctgcaaaacaaaaatcttactccagcccctcaatgccatcctgacacactttatgcaaaaagaattttcccagataggctagccagaaaaaacttcaagtcctctgtaacatctgaggtgaccaagaggcagaagagcagagcagtcgggggccgtgtcctggctgatcccaactgcagctctgctgtgggggcccgtgggagggaggcagacccctgggctttcctgctggccacggagactctgctcctgcatggaaagggagcctgggagccagcagcccacgcctggggagcctgcctggggccatgtgaccatggcctctccctgggaacgggctgaccacaacacaccctgctgccatccacttctgtttactctgcaaatgtaagaaagaaccacttggccagaagtgtcccccagatgcttttttttttttttttttggagacagttttgctcttgtctccccggctggagtgcagtggcatgatctcaactctcaactcactgtaacctccgcctcccggatactcctgcctcagcctcctgggtagctgggattacaagcacccaaccacgcccagctaatttttgtattttcggtagagacgggatttcaccatgttggccaggctagtctcgaactcatgacctcaagtgatccgcccacttcggtctcccaaagtgctgggattacaggcatgagccacggcgcctggcccccaaatgctcttgaaccggaaacccagggatgggagatgctcactgagctgctgcttttatgtgtgctggtgctatgtgtgttcatgtccgcggcagctgtctttttgctactataagggaattctggccaccctgggtggggtgtggtcggggtgagaacccaagcgttggaactgtagacccgtcctgtcgactgtgtgcccctgggcatgtgtgagcctcagtttcctcatctgtaaggggggcaatgatacctacctcacaggggtgttgtgaggattaaatgtgaggaggatagtggcagatg

SEQ ID NO: 5870 - DNA, 294 bp, Homo sapiens
gcctttcccatgctgccctcggcctgttcagatggggattgggggtgtcttccctggcactgtgctcggggacccagagatgcctgtgcttccctgggaaacctggtgaactggaccaggtggcctcactggctcttctcaggacaactaagcctgctggtcagggctggctttcagccttcctaaggctcctggactccagaggccagcggggagcctttcctggctccctctgttttctctcactgtagaccaaagagccgcttgtgtgatattaaagccactttagaaagc

SEQ ID NO: 5871 - DNA, 39 bp, Homo sapiens
gcccgccggctgggcagggcggccgctgctcccacatct

SEQ ID NO: 5872 - DNA, 472 bp, Homo sapiens
accctctccgagcccaccagccacagaatattatgtaaagaccacccctcctcattccagaacgaacagcctgacacatacgcacggggccgccgcccccagtagttggtcttgtacatgcgcagtgtcctagtgcccatcgtctgtttccccggccttgcccccgcccgccccgtgccgtggacatctgggcccactcatcgcccctccaggcccccggcgccccaccccctagagtgctctgtgtatgcggatgatttagaattgtcatttctctttactggatgtttatttataaagatctggcctgttcctgcgtctgcggagcggcccttgtctcccagctatctataaccttagctagagtgtcgccttgtgggttcctgttgctgagacttcctggatggagccgccctcaccgccgggcccgtggccctgcgcggagctgtgtccaataaagttcttggatgtg

SEQ ID NO: 5873 - DNA, 167 bp, Homo sapiens
caaggacctcggctgagaggacacctggccgcagcgggatgccatcagggccgggtggttggggagctggtctccagggagtgagtcgggagccctgctggattgatgcccagggcctgtgcggccgccctggaggcggtggctgggataaacgtgcacccagcagg

SEQ ID NO: 5874 - DNA, 5420 bp, Homo sapiens
cgtggcctgcggccgggctgcccttcgctgccaggacacctgccccagcgcggcttggccgccatccgggacgcttccagaccacctgccagccatcacaaggggaacgcagaggcggaaaccttgcagcatttttatttaaaagaaaagaagaaaaaaaacacccaaccacacaaagaacaaaaccagtaacaaacacaaaggaattcagggtcgctttgcttgctctctgtgctccgtggaggcctccgtgtgccctcgttgccgtggggacccagctccatgcacgtcaacccagtcccgcccagactagtggacagacctggtgtcaccagtttttcctagcatcagtccgaaccatgcgcccgccctgccccaactgtgtgctggtcctgctgtggccgaggggaccgggtgtgtttggctctttatgcccctcccgctgtggtcctggaactcttcaccagggagggagccctgcgggggccgcagctttgtggagggagccgccgtgcttctgtcacctgctccctttcttgcgtctccctgtgatgggcccttaggcctggctgggcccattacatatccctgtggtggctctggtggcagctttctgtggcccctgctgtgttggcaggcaggtttgcgtggtgaggagcgggaggggttggagtggtgcgggagcaggctgccgagtggagggtgccatcgagggctccggatcccttatcctacttagcagtgttggtctctggggctggaagccgagcgcatgctgggagcggtactgtcagaagtgagcccagttagtaccccgctggctcactgcacgagagagtcctgccccgagccctaggtggggccaggaggtgccttggagaagccagccagagcagagagggctgctgacttccgtgtggagcagagaggcctgagggcctcctaaaaggtttaaatgtccacgcctctccagttgctgaagtagggtctgagagaaccctggcatcagcagacccagggtgcttctgtctcctgcagaccacgccagggagtgcagacaccaccgtcacacacgccccttttgtgttttggttcaagtttctcagagcccctcagagcttctacatctgtgcatcagaaatctcacagccttctcatgctgccggctcatctgggcccatagagtgggctttgccagttgctgttgcacaggaggcgagaacagcacacttcaaccccagcttgctggtcggctttcctctagagagagccggttttggggccatttccctttgatgctttggtggccttgccccgctctgcagcacagacaggccagatgcatttgtcctttgcctagctactccccaggtagagagtgctcctggtggcctggcaggtctgggcccttctctccctgcccaggttgtccctggagggcagccctcactccctttgggggagaggcagacattgctgcccacagacctgcctctgactcaactgtgtccaccctccctggtccctacccccaagtcacaggtgactcagcagtgaccctgtgtgccaggccagatccaaactgagagggaaggtgtcgtttttacactgctaatgacgagagtggctctttttagctaggcgagtacagacggggcctgggagggggcagagatgttccccaggccctgcctgtggttcctgcctgggccttggctgctgctgtgtgagagctgcatgtgagcctgtgaccgtgagctggggtgagctgggccgcacctaccctggggccccagggagcaggacgctccggggcccagcacgttgccctgggcctgtggccggagtcggagtcctctctcctcctcctggcttttggaaaggcttggctgtgttggggagtctctcttagccctttcaggaatttctgttcaggcttcctcctcctcatcagctattttacccatctcagaacgtcctgtgtctccatgtaggagagtggctctctcagatctctcagggcgtctggttatagggaaacaagtggagcagggacgtggctttaattggagcactcggctgggctgcttggggagactcttccgtgcgttcttcctctggatagaaccaccacctcctgggcgtcactgacaagctccatcttaacctccaaagccacagaactaggggctcagagccagagctggcagccgccagccaaaatgatgccattgcctgagctgacagccaagcccttctgtgggtcacctttctcctcacccagccccttgctcttcccttttgaaaggcccgtgtgttttctttccttaccctgtgcttgctcatgtctactccggttttctctaccacatccttagagccatcacctggcacgcaggcgccttacattctacggtagaacgtggggtactgtgtgtgcacatagacacacttacgtggaattacagttgtgggtttatccaagatgaggaagatttcacctgctgtttaatagacttggggccatgtgcctccccacacatgggcaaggacaggtggaatgtcgggaccacactgtgcggcttctcggcacaaagcggagggaggctgtggtcgctgccggcctaggtgtcccaggtgccccgcctttctctgggacacagttgggggctggcttctgagggattcctttctcccctctttgtgtggccccagccagggcggtgggcagtcctggtgtagagcacaagcctctccaccctagagaaatgcctctgtaccacggctaccatgtggaaccttaacttgcagaaggcttgttaacaattgttttgagagagatggctggtcatgccacagctgctggggactccgcctactccagccctcttgggacacactgtgggatttgtggcccttccccagaggaattgtggagactgtcccatggaacaaaccctcaggcaccagcacagggctctgggtgactcagtaaaactaacgtttgtctctgacaagatcagctgtaggctcaccggccagagaagaccactgtgagcattttgccgtatatcctgccctgccatttgttcactttttaaactaaaataggaacatccgacacacaccgtttgcatcgtcttctcccttgatattttaagcattttcccatgtcatgagtttctcagaaacatgtttttaacaattgtactatttagtcattgtccatttactataatttatctgaccatttccctactgtaaaatacttaagacggtttctgatttttccactatttaaataatgctgtgatgaatatctttaaaatcttctgatttcttacttttttcccccttagatgcctggaagtggtattttgaggtgaaagagtttgttcattttgaagatatttctgtctctctctcgacctgatgtgtagacgctcacttccagtagcagaaccaccttagttgtgtcttacagattctgaacaaatcggtttctgataagccatgtgttccaaagaatgtctgaataagaccgctctttatttaaatgctaagaggatgtcactactgcaatccatctgtggccgattttttccaagagccaatttccttgttttggttgcaagaacctggctctgcctgcatgtcagctctctgccctccctgctgccgtggctttcaagcgcttggcagaatcttgtacttcgtgtccacaatggtactgaatttgcatctgcacagtcagcagagataacaagtgttgaactgaccttgccacatgcttagtgagtgatttgtaattaagtttatagactcagaaggtatattaggacatttggaatcagtagcagagcaaagcctctttgaaaaaaaccacgtagctgattgggttttacaagagtgcatttgtctcccccttccacccgtggggccccaccttcaggtcttagtggttcacaagagcccagcagccaggctggctttttcattgtagggcgtggttgtcccagctggtgtagatttcaggccgccccccccaactccctgcccacagtgttgcagattgcctggctggcagcaagtccagaccacccaaatttggttggattcttcatttctccactgtagttggggtccattgattgtgcaggggaacgtgcaggaggtttttctaggcaccgtgttcagtgctgcttcactctaccagagattatggccaaattgcacggaatttggtttcttgccctctgaagcctgagggcccccccttgcctggctggttgacagacccggggtggtcactgctgagacttcagagatcgcagctgctgtgagaatacggtgaaggtactttgttctggaagatgttgtcatacacttttccccagttattttcaaacttgacatgagcctatgttgactcactgggtgggggtcccttcttacgcagcacacgtggcaagtgcctgaatcggggctggaggcacttcagagcctctgaggggccaccacttctggcccaaaattgcagggttgtagatgaggctgcctgtggagaactggtgtgaggaggaagctgtttccaacaaagagcactttcatctgttgagatggctgtggtgagcaactgaacgagcctacgtgtgtacctgaattttccccgtaactcatttcttccatatgaagaaacaccaaactatgtacagagaactttttacaaaaggcagaccttttttaagctgtgtaacccacatagcctaaccacctggcagaatgactacgaataggggtcattgtgctggtaaaagcctctattacgactgtaagtaagttggatgttggcaaaattaaattgttacagtatttagagctgctgtagctgttccttcacaacataaaataggataaatgactagtacgtctttcaggtgggtggcaagcagaacatgcgtaatattctctacctggtctgtagctgtaactgtgatgtacagacaaagcaaaaattaaaagaacttatgaaaacaaatgcaatgatactaggatatacacttttgtatttttattcttatataaggttatttgctggctattgttggcctctagttcagtctgtgttatttaaattctaatatatgaattatttgaattgaattcatgttcggggccacgttgttgtatgtattgatgtacagccttgaatgtgaataattattgtaaactatattttacaactttttttctggctttattatataaattttctattgggtcagtgatttaatcatataatttaatgaatctgtttatcctttttttttttccaaatacttgtgctttaggtgtagttaccagatgatgaattttcctcgtatggtcagtagtcttgtaataaaaagcatgtagagtgt

SEQ ID NO: 5875 - DNA, 1703 bp, Homo sapiens
gggacacagtattgacagctgaagaaatgatttacgttttcccgagatgtaatgaactgccatgtccaggaagcttggctgtgagaagaaacctgcttttgatcatttttctagagatctgggtgtgaatccttttttgcctctgaggtgggtggtgagagacgggcccagctgtccaaggccagacgtccccaagttgggggagcacggcggccgggtgggcgctgcctcttgggggggcctcgctctgttttttccaagtgccacgtgggactgaggcagacactcccagtcagcccgctcgatcctgaagatcgtgtgaaggaagcgttcttggtgctacacacagtctggaaaagcagcctgggcttcactggcaggaagcggccgcagccgcgtcagtgtccagcacgtcgtggcctctggtccgaccaccaggccctagtctcggtcagggagtctgctctgcctcccaggcgggatcgctggtttctctcgacctcgcagagctcctgacaaaggcggcttctgcgtcgtcactgcttcccggcgccattccgaggccgggccttcttctgacacgggctccaaccccacctgaccaagcccgggacagtcaaggcttctcaatttgtattttccaggcaagagaactttgtaccccttctctgtgtggatagactccccagcgtttttcctctggaaatgcccacagggcttgccgcgtggagactgatctgttccatccgttagcgcgaggtagcagtgtcgcctcgcccctcccactgcgggctcacggggagctggcgtctgtcagtgccttgtcacgcctggcatagaggttgggctggaggcctgtccactggcttctggagctgaaggtctgcgtcacggtgaaaattcgggatgtttacagagcatcacaaatgcctctctctcgccgctctctcattttctttgtataactatgcagccttccctctctttctgggatgtttgggacttcactcgacctgcacgggctctgcccgacatgccgtgggagctgctgggattcctttagaaaccgctgcccgcatgctttgaaaacagacctttctcagctggctgtggggacctgtcagagtctggggactcggcgtgcagggcgggctccaagcgctttgcttccggaactccggcttcccaaggggtactgtgcagactgaccaccggcctcccgcctgcaggtcagaggctctgacactgtctggtttccaatgcttctggagacttcctgcctaggcctcatcctcctctttgccagtcacctgattaaccaattctccagcattaggacttacctccttctttttgtaaggtctcttgtatgttgttaaatgtttggcttaaacaatttataaaagcctttctagaaggcagacttagccccagcagagcctgggaggaaggcggccgctggggctcctgggcatcctctctggggagctgctggccgcttagcgttgtttgatttttgaccttgacatagtagataggcttgtggtttttttaatttaaagatattaagacttaattcactaaaatttattctaaggggatatttatacttttatacttttttaggtatcgtattttatcagcttacagtttaatgcctaagtttcccctggaaatagcaaataaaattgtgtatttatgaa

SEQ ID NO: 5876 - DNA, 543 bp, Homo sapiens
attgtctttgggggattccaccacacccaatgctctggagccacaaggagtgtcccttcttccccagcagagccgtgggagggtccttgtctgctctcctttgaaccttggcagcccttggatggagggctccctttccctccccttttttttttctttgttcctgtgaaatgttaatctccgtgagttcttcctggttcatgtgttctggggggtttggggtgggagggaatgcagatgggagttgggggaggggaggatacagttcaggataccccagcctggagtcagggccagggaggcatggccccacttgtatccagaagttcccaggggtgattgtgatggtggttgggactggaggttgtataaggtgttcttggaaggaaggggcaggagttggaattagttggtccctactgtcccccatgaggttgtgaacccctccccccaacttttcatgtttcttaaaggcattttggttttttaaaatctgtacagcaagagcaactttttctgtcaaataaaaatgagaaatgcagg

SEQ ID NO: 5877 - DNA, 110 bp, Homo sapiens
gcctacctgagcccatgcagcctggggccactgccaagtcaggccctggttctcttctgtcttgtttggtaataaacacattccagttgatgccttgcagggcattcttc

SEQ ID NO: 5878 - DNA, 124 bp, Homo sapiens
ggtggggtatggggccatccgagctgaggccatctgggtggtggtggctgatggtactggagtaactgagtcgggacgctgaatctgaatccaccaataaataaaggttctgcagaatcagtgc

SEQ ID NO: 5879 - DNA, 205 bp, Homo sapiens
ccttgacaacaggcgcatcctcccaggccaccaacccagccataggctcttctctgtccgcagggcttctggggccaaatgggtgaatctttgcttttaacattgtgtgatttcttttctttttttttttttttttagatcaagtataagttacttttgtaagcagaaaaatactttcaaacaagaataaaagaagctgttcgct

SEQ ID NO: 5880 - DNA, 2480 bp, Homo sapiens
ggcgatgtgggcagaggagctccgagccgcccacccaaggtggcttcacatccacacaggcacttcccatccacctaggtttggcttagcagaaacttcttttcattcttccaaagcatcgatggtcttcgcgtctcctcaggaggtctcccaggaggaattcttggatggtgtcctcatgtcggcggagaacagtgctcagagctggcgcttgcagacgcagctgtcgtggggcagggcggtggcgccttcctgacctttggaagacatgacaaagctgcctggacacggacgcccctgctgtacggccacagcacccctgggtttgcagagcacgcagccttcctagggctttccacctggcgaggccccgctctgctcagcacggtgcaaagtgaatgctgctgtcttggagcctgggcacgtttggggaagttcctgcttcaaactgagctgccccgcataggccaggtcaacccacaccaatctcttctggacaggtgctgggtaggccttcctggtctctggccgcctgctgccagggtgtggccatccccagcaaccggagctggccaaaccagaggcctcgctccgcactccacactttcctttctgtgctccttccaagttaaattaaaccccctctccacgattcccacggcaggcgtcattcccgagatgggagccagtccaggggtcagcaggagccagcgctgggcacacgtgccctggctgaggccagcggcatcctgggtggcccaggtccatcctgggcagcaaaggcgtgtccccttctgtcagacagcttcacagagtgtggcttcaccagtcagagggagcagtccggagaggcaagatgaccccaccgggactgcagagcctcctccttactaacaaggacctgtccgcagccgcgaggtccttcactcccaccctgtaattgtggggggagtgccagcaacaggcctgtcccctggcaagttggccacggaacccaccatgcactgcaaggctgtgacagcctgggcacccctgcttctcctctgcttgtacggttcccccaataaatcctattttccatctcaccgtgtggagctggtacttgttcacatccctcttgcagcaacagttggccgccgtgaaaccacactccgtcacatctccatgccagtgcccagggggagacccctccccatgcctgggctgttacagtcacctggcccagacgtaacctggaccaagagtggacggagacacctggggttggggcctctggaagggctgctggggggccagctgcagcctgtggcctctcccaggcccggatatggcaggacatttgcgtcgtgttgctggaagaggcaggatgctctgttctcgccattagcctgcgttacgcctagactcatctgcataagcctgggcaagtggcacccctgggccaagggcagacttgcccacccgtccatcctttgcctatggcagaggacacacaacacagtggctgcgctttgggcactgttctcggccctgaagcatcctgccccgaggctgacctaactgcccccagctggactcatggccaaggctacagacccagtactccaatcccgactcccactgtgtggtccaaatgtgtacgcccacaggaggcagccatgcccgaggaaggtacttgctgaaagatggtccagttcatgccgccaccagctggacctctgatcaggccccctgcagaaggggaagctctccacatgcccaagatacgagagaaacgcccgggtcacagcagcctgagtcactgcagcctctgctacctgccaagcctgcgccctccacctgtgggctccttgcctctgtgatggggcctccacggccagcatcttcccgccatggtcacatgatgccatgccctgctctgggcacccctaagcgggtatgaggcgaatcagaggaagaatatcggcttctcttcccttttggatatttgcgtcattgaccgggactggcccactcttcctctgcctcacgcctgctttgaccttagaagacagacggcagctcgcgttgctgggctgagattctccaatggacgtgaatttagatgatgctgttgccttgggtggcttcatggccaccaacccgcaccctggtggccactcagccatgacaagggcctgacagccactaagtgagcttcagagccttccccttgcaaagttccagggccaccagatgtcgcctgcccagtcactgtcacagagttaaagcgtgcgggtgaacgctggccgcggagcgtgcagcccggcagcagctcagcggggcagctcctgcttccagccctgcctctgctggtgcttcgcccacaaaccctgctgtatgacatttgcaccacatggtgtgtgtccgtgccctttgacatgacagtgccaacaacatctcatgaaatttaaaataaatccccaaggcatcagaaacgt

SEQ ID NO: 5881 - DNA, 54 bp, Homo sapiens
ttgtatttgttatctaatggtgcatgaccaattacaacaaaacgtagtgggctt

SEQ ID NO: 5882 - DNA, 406 bp, Homo sapiens
gtgcctccagccagagctccctgcgctcgctcatctccgctctctgactctgggccccgagggtccgctgggcccgccgccggcgagatggacacctgagatgctgtgctgcgccctgcctcggccttgcgcctgtgtaggggcagctcggcctctggtcgccttggggagaccaaaagtcggacaggaaacatctggtgctattatctgggacttggcctgaccgtgggggtccagatggtccaggccctctccatggacctgtatgtgggggtggtctctggtttcggaggtctttgaacccctctgggggtggtcctggactgccgtcctcagtgagaggtcacaggtcagcaaaaacagtcaaaaaacccccacagattttgaataaaggatctactttggt

SEQ ID NO: 5883 - DNA, 1534 bp, Homo sapiens
gctgccatgccagcctgcccacagcagcctcctagagttagcaacaccaggtgttcctcccaactcgtctgcaaggggctggctccttggatgcttccagctcatgagatgtctcagcaggagccctgttcacccgttcttccctgtggactgacctcttccacccacgccgtggcgctccaacttccttccctgccttttccctccaagctcctattttactgtgtcagctggaaggaaacctttccctcttgggacctctttaccctctgtgacctgtggggttagaccagagagggactctggggtcacgtcttgctctgagagttcaagtcctgccaggccgccagcccagagcctcctcaccctatcctgttcctcccaccaggcctgtggccagtcttcctgatctccatctttctgccctgcataccagccctcccagcagccacaagcttgcccgccctggctccctctgcccagagactatggagtaaggcattcaggacaaaaggaccaagggggcgtggacccgtcttgtaccagctggccacaggcacaagggctgcagctgcttcttccaggaaactgacacagggagctcagcggcctcagatcctgggacccctgggccgtgcctgccctccaccttgagtgccatactcccaacagctccaggtacccaccgggggatgtgcctgctcaggaaacctctttgctccacacagcatggggcttcagctgctggcccaaggccaggagcgctgggttctgcagcagggctcagcctcaggggcgttaagaccctggatgacatcaataaagggacaggaagggccatgttgccacatgagcaagcttgggtgctcccaaggttcaaatactttttattagacacggccaggcagagaagaccatgggagttcccgaggggccccagctttcaagggcgacgggagagacacaggataaaaggttaaaagtgcagaggcagagtctggggctcaggttgggtctagggtgtcctcaaacaggctgaggaggttccgaggctcaaaggaggggaaggagccccgaggaggctctgagttgatgtcacttaggtccagggcatccctgggaggagagagtagtgacactcaggatccaaaagctagccctgcccaccccagcccctggacctgcttacctgggtgtgcacctgctccggggggtggaggtgctccccacagtccgggccaggacagcctcaggggagagtgaaggcctgcaggagggcaggcgagacaaggagggtgtccagggctagggagtgccggatgaaaccagctctgtccctgtgcaggctccaggctcccgcctgacaaacaggcagggagccacagtcagggacaataaaaacttggtgcactctgaaagcagcacttggacagccttcaaagtccttccatctggctgcactccaaggccccctctgtccttttcagaacacatggacttggaggcagatttgaaataaacttttagtaaatgt

SEQ ID NO: 5884 - DNA, 489 bp, Homo sapiens
ggcggaggtttcccctgggagcccactgctccccactgccccgccctttcgaccttggcctgatgaccagatgccctgctccatcacaacctccttccccaggaaaacccactttccaaaagcccaagctacacctggctgcagggctgggtcagctggcctggctgagctcttctcagtggggtcccctttgatgttctcccccaagttgggcagcctagaggtgttgggaaccctggcctgcccccacctccccagtaattgtttccttccgttgcccaggacactggctggccttccttctcttctgagccctcccctgccccaggaaccctggcctcaccaaaacagcagcagctcgttggctccaaaaccagggagcagaccatgccctcccaaccctggagttgtcagggagggcctgcccatcacctccctctccccaacatccccaccctcgagttggaaataaagagcatttgtaactgg

SEQ ID NO: 5885 - DNA, 554 bp, Homo sapiens
caatgtgccccctgccagccggggctcgcccactcatcattcattcatccattctagagccagtctctgcctcccagacgcggcgggagccaagctcctccaaccacaaggggggtggggggcggtgaatcacctctgaggcctgggcccagggttcaggggaaccttccaaggtgtctggttgccctgcctctggctccagaacagaaagggagcctcacgctggctcacacaaaacagctgacactgactaaggaactgcagcatttgcacaggggaggggggtgccctccttcctagaggccctgggggccaggctgacttggggggcagacttgacactaggccccactcactcagatgtcctgaaattccaccacgggggtcaccctggggggttagggacctatttttaacactagggggctggcccactaggagggctggccctaagatacagacccccccaactccccaaagcggggaggagatatttattttggggagagtttggaggggagggagaatttattaataaaagaatctttaacttt

SEQ ID NO: 5886 - DNA, 92 bp, Homo sapiens
tctctgacgacacccccagccagctcagggttttagagtgtttttcattttctttttttttttttttttacaataaagtttcaggctttttt

SEQ ID NO: 5887 - DNA, 1623 bp, Homo sapiens
tggggggagccatccagaccgaacagcgccctccacggccgagtcccccgccgctggacctggtcgggggttgtgaggcgctgcggaggccccttgtctgttcccacggacgggggctcgggcgcggactaagcaggggggatctcccgcgcaggggcggcggcggcggggaccggtcgcctggcgctgggctcagtctcctcagggtctgagaccccggcgctgccaccggaacccgccttcaggggcgcacgcgcgctgggaccatgcgtcggtcgtcgcccccgtcgttccctcccggctgccgccagggggcggtcggaccccgcctcccgagcccggggaggggcggggaggacaaggggcgggcccgcggcctcacccggagggacggcagccccggtcgcgcgctggccccgcaggaccttccttttccaggaagagccagcttttctcggagcgcagtcctgggactctccgcagccccgccccgcctggccactgcgtctggcattcctgggtcgttagaggacaggcctgactgcgaagctgtgccttgcccctctcccacccgcagtttctcaccccgttctgctcccacaaggcccccctacagtcactgccacactggtggggacctgggacccagacccggaaccagcccagatatcacccctgaggacccatgcgccacgtcctgggtggtggaatcagtggctggagggacgacccttgctctccaggctgttaaccttttccgttgctcccccgccacccacctcctcctccccaggccacccaacttgggcacctccctgggcccagaactgccttccattcaatggggaacccttctatccccaagaaccccttccctgcttgcaccctggagagaacagcttgactcccatcaactcaacgctggtggaaagacagggaccgaaccctggctcaggcctggtcattgcctcctcagcactccctcctgggaggccttagctctagagtgaggggtgggtggaacctgggggcacctcgttcaccctgtccccactccccacagttttaggatctaaatgattgcctctggaactattcttctagactatcccacatcagaatcactgggaaatttaagtttgcagatcccacactcaccctgaatcctcactcagggtggggtcaggaatctgcattttaactagtcgcggggattgtggggggcagtagctggctgtttcgtggcatttctgtggctctgcagtgttcctccaccccaggaccaatatgttcaggccacaccgatggcctgaaccccatgggtagagtcacttaggggccacttcctaagttgctgtccagcctcagtgaccccctagtgcttcctggagctgaggctgtgggcggctgtcccagcaaccatgcgaggggttgccccagttgctcatacaaacagatcagcatgaggacagaaggcaggagactttggtcagttacctgggaattctgggctgccaggaaacgatttgggcctctgtcagtttcttttccatgtatgaggagggggaaatttgtatattagaaacttattcatcccactcaggacaataaaaacgaatgtac

SEQ ID NO: 5888 - DNA, 311 bp, Homo sapiens
agatactgacaccacctttgccctccccgtcaccgcgcacccaccctgacccctccctcagctgtcctgtgccccgccctctcccgcacactcagtccccctgcctggcgttcctgccgcagctctgacctggtgctgtcgccctggcatcttaataaaacctgcttatacttccctggcaggggagataccatgatcgcggaggtgggtttcccagggcaaggctgatctgttgccgtattagtccgttttcacacagctataaagaatgcctgagactgggtgatgtataaagaaaagaagtttaactg

SEQ ID NO: 5889 - DNA, 190 bp, Homo sapiens
gaggccaggaaagggggagcggggcgcccagggccactggaacagccccactggagtcaaggctccgagggaggagagaggggctcgggaagggagctggggcggtgagggcatggggtgaggcatggcgatgggggagggcgagggcgagaaagggcaggcactctgcgaattaaaggccttggacttg

SEQ ID NO: 5890 - DNA, 1456 bp, Homo sapiens
gcagctggcttggccggaaacccgggggaggcccagccacggcacatcctgctttgttcaccactgggactctccttccatctgtggccacctcccgggctgtccgagggaccccagggtacctcacactcggagctcgcctgccctgcttggctctgaggacctgcccagcgctcaaagggaacggaagccttcccctcccgcccccgatcttgtcctctttcccccttctgcgcctagcgttcctcttcccctctagtttcctggagccccaacacattcctggcagggacagcagggtggcaaggactcaggtctaggtcccttcccagaagcccccgagcctcatttgactgtgtggctctttggcccccaccctgtggggtgggtccatgggtcaggcctctgccctaccaacctgtgcctttcagtgggcgtggaggactggccttggccccccagggggctgctggactttgggagagacagcccacacctgtgggaccgcgggtcttagtcacggcggcaggggctttctggccccctcccactcccgtttccaggccatgaccactctgccctgtcctggccatacggactcggcctgcctttgccctcggcctacttgccctagcatgaggctctgagagccacctgcccaccaatctggtgaggataatggtggctccagcgacaggaggccaaccctggagaccaagaacagggcgcctggctgccatcttttcctccagaggtggggctgcaccagactcagcactagcactccatcagcactagcacctcactccatcagcactagcacctcactccatcggccccggcaccctgctccatcggcactggcgccctgctccatcggcactaatgctccactcggcgccccactccatcggccccgctccatcggcactaatgccccactcggcgccccactccatcagcactaatgctccactccattggcactaacgccccaactccagcggcactaatgacccgctcctttgacattggtgccccactccatcagcactaacgccctgctccatcggcactggtgtcccactccattgtcactaacgtccggctccatcggcactaccaccccgctccatcatcactatgtccagctccgtcggcactaccaccctgctccatcatcactacgtccagctccaacggcactggtgccccattccatcggcactaacgccccgctccaccggcaccagtgcctcgctccattggcaccaacgcccagctccaccggtactggctccctgctccatcggcactaacgccctgcttcattggcactttgctgctgcctcctgagcactgccttccatgaacagggacagaccagaggccctgcaaggactccccctcagacctccaaagggcaacagaagagtattaataaacgtgaaaactt

SEQ ID NO: 5891 - DNA, 897 bp, Homo sapiens
taacagtggggtttctctttgccccaggtgaggtggcatattcagaggagcctgttggcaagagctggtattccctgcccagccgaccaaatgacctctgcattcttcaggtaatgggggctcattgtgagggaggtgcagaggcagcagaggattggcataaaactgaaaaggagttctgtctgcatgagaaaggatggcaagtctctgaggtgacctcagggtggaattctctgttaagtccaccctgccccagggtgctcctaccctcttggtctttttaaagccaaggtgcgatttgggcacctgactgtccagtttaccttaacaagtttgggaatccatgtgatgtttttgatacttcttcctcatttgggacattcagtaggagcatttgggcttccggggcccctgagaccaaagaagaggggccaagtaccctgggaaatcagctgaaggtcaacaaaagactggttgtgagttgcagctgtcccgaaggccccagttgggaagccatgggcagtccagatcaagccaccacgtgccctacgatggcctaacaggagtgcccattggcagattacacatgtaaatatgacctcagacaaaaaggaaccagaggcccaagggcaataataaggtggaatttgcaggtcagcccaggaattggcagaggaagtaggtgtctgataaccctttgtggagaatgagattccccccacctgtgtgagaaaaataaacagctctggagtcttgttcctgactccagaggaacgagagcattccaggaaagagagattccctggaaaattgaaaatgtgaatcctagggggaaattggggattgtgtctttccctgttgaaaatgtttggatgggaataaatatcttcaggaaac

SEQ ID NO: 5892 - DNA, 705 bp, Homo sapiens
agagaagcttgtccagtgtcctcattctgaagacattcaccaaatggagcttggcactaaaatttatgtaaaagaaaaatcacaaaccttgaaaaattttacatcagaaaatgggataaacatacatttcacagaaaataatcaagacttgctctgcagccactcagtagtcttctgtggtcacagaagtaaacattgttggctttgtattgatctctccagtcatttttgaacacatccaatagaaacattggcagcatggtcttccaaaacaaaaagcagtaacatgcatgtttaattgcataccattctcttcacagtagcaggcttaccaatttccatagtctcatgaggccgaaatgaattacaatgtaaagtgttccaggaaccaaattggattttctttcttttgtcattggacacggtttgcaaagttggacatcacttgagttccttcttaaacttttcggcaacttctcttggatcctgttatcacagttttttactgtgatgaaatcttgttaaccaccactagggaatctccagatgaactattaatgcactgtcttatgcctctcattggtgatgtttggaaaatagaagacatctctaatggaatcatgggggaaacgggttggaatttgtagccatggaatatatattagatgtaaagaattttctgcaataaaagaaactagacttgtt

SEQ ID NO: 5893 - DNA, 45 bp, Homo sapiens
gagaacactccttcgttatttattgcgtcttcatctctacatgcg

SEQ ID NO: 5894 - DNA, 443 bp, Homo sapiens
aaggagcactccatgctttagattcacacggaaggtgtttgtgtttctcctcccccttacttgcatgtaaatcacaaaaactgtgtgacttacaaggaaagcacgaggcccttgaggaatgatgatgcacattctgctgtgaggaggcccagaaaaggccaaccagggcccaaccgtgcatgatgacagggtgaagagaaggcaggtctgggcactggggcaaagagaacttaagtctctgcagagagcaaggagtaactactgagagagaatcaggacaatcctgcaggtggcccgcttactgttaaatcgtccctctgttgctttatcctctaaaatatgttaagggataaattctatatatatagttatgcatttgctgtcataccagacaattttttatcatgagcacacttctttaataaagatgagtgatctaccag

SEQ ID NO: 5895 - DNA, 54 bp, Homo sapiens
aatgctcctctgtttagaggggcctggtagaaataaaaacccaccctatatctt

SEQ ID NO: 5896 - DNA, 1497 bp, Homo sapiens
gctcttcagctcccctccctgcttctggaaacctctgcctgctgccctggccctgcccccctgcgcatgcaccgtccccagggctgacccagtgtggctgcattcactgggaggggcctgccctcactgggcctctcccactccgctgcctgttcttgcagctccttcctggaaagctggaggggactttctcctgcaagggaggaacgcaagtattatggacacacttgaccgtaaaggcacaggagcctcggaacaagggggcgcaataaagggaatggcccgtccccttccagaaccagcccaaagaagcctggggggtgaggagtggcccccactcctccatgaggggctgatgaggggtgggcagcctgggggaggctttcctcgcaagcacagagctctgaggctcagccccctggcacaggcggtcacgcatcaggacggttcctactcctcagcaccttccgtgcagttaccagtgccctgggaggtcacactgcccgtcggaccttggcatgctccattcagctgacctgctgaggacaggcatcgccgagactccttgggtcctccccgccctccctcatgctgccacaagctgctgctccaaggcctggccacatgcagacaggaggaagctgagctcgacattaggcctcaaggctgccatctgtcttgtagggcctggccttgtgggcagggggcagtcctgtgccttgtgggccctcagcctctgagggcagagatgctgtcagtgccgcaggtgcatcacatacttctagcatcctctccaccctgcattccaaatgctgcttgctgcctgccctgccctccgatgcaggggtggggtggggggcggagtcccgcccagcatagctgcagtgtcacaaagccatggcagagggtcctagcggcgccaccctgccccagcctgaggaggagggagagggaggaacaaccctgggcagacggggcctcagggacctgtgtccttccgcctccagagctgcccagccacgggctctcagggtgctggggcagccccaggtcccctcttgaactcagctggggccaggggccctcagaatgaaggcaggcaccaggcaggagcagcatccccctccttgacggtgctggcaggagggccgcgccatgctgactgcttgaacctctgctgacctgacagtgctggcgggagggccgcaccatgctgactgcctgaatctctgctgaggctgcctgcctgccgggcccagctcagcgccctctccactgcgaatcagtggcgatcatgtgatttctatttctgccccacagggtaagggacgagtcttctggaaggctctgccatggacatttgtcctcgggctcagaggccccaccctgccccacacctgcccctgatcactgcagtgtccagcccagtgttgaacagattgtagcgttctgtctcattacgagcaaataaatagactttcattggagttcgtcaca

SEQ ID NO: 5897 - DNA, 1398 bp, Homo sapiens
cccttttgccaagggaccctggcagattaaaaccctcagacttgtaggtaaatgggaacttagaaggttaggaaggtaacccctgttttgtttactaagctggctggactcatgatcactgaagcaatacttatttctgctttagcctcctatgtttgcattccatgaagcttaaataagaattgaagcaaatccctaagatttatttttttccaccttatttatcttctaaaacttgaggaatgcatgtgttcttagtgattcacatccacgggacaaaaactcaagaagaaataagagctgacgccacacaagtcttggctgcttttgttactatacattttctctgagactccagcagagttggggctggaacttggcactggggactcatgtttggaatcgtaggggaacatctggctgttaatcacttgcacagttgagaacatttcctatacatcggcttttaattctagctcttatttcattttgtaatcttattttctttcgtctgcatgttcacaataccaagcattaaatgtattttaataactaaacttttctgaaagaaggttagctaaagttaaatgaaaacttggtttctttgaaaatcaggcaatagagacaggctccagatgaggaatcctccattttctgtccgaagctgacattcctctggcagtccagttcaccttggattacagccaccttcatgtttccacggttggtactaaatctggaaactctggtgacctgggctgccctctcagaaactccagactcccatggcaatgacagccgggacacttttcttccctccagccagggtttctctaaaggagctttgttttgtctaaagtgtggcaagacatagtgcacaacacagggacaaaggcaggtttcctgcagctcgctacctaagtgtttctgtaggggaaggagccaattaagaaaaagtgttggtacagattcatgtttctgatttaaaaaaacaacaacacaggattgaattaagtagagtaatagcactagaagaatttttctgttgtgaaattagaagtggagttggtttttttcttttttcttcttctttttttttaatatgaaaagtacttagctgggagtggtggcaagcgcccttgggtccagctactcaggaggccaaggtgggaggatcacttgagcccaggagttttagactagcctggacaactaagtgagactccatctctacaaaaaattaaaaaattagccaggtgtggaggggcatgcctgtggtctcagctattcaggaggctgaggcaggagaatcacttgagaccaggaagttgaggctgcaatgagccgtgatcatgccactgcactccagcctgggtgacagagtgagaccctgtcttt

SEQ ID NO: 5898 - DNA, 141 bp, Homo sapiens
gcagcccctccccacaccagttgaactgcaggaagagaggacccatcctgccacaggacccagaaaaaaagcccaacacacactcgggttaagaaatacctttaaatttaggtaaataaagctcaaggaggtggggctgtc

SEQ ID NO: 5899 - DNA, 2073 bp, Homo sapiens
gcccatcctgcggacagttgtggtgcccccccggcagctcccggcactgcccccgacgaacggaaactcttctgtgaaatagcaataatgtcctactgcccgggcagccccagcccagcccgccgggagcaaggatggtgctaggtcattcatggctggcctcccagcccccgggtggggacctggcctgtcatgcagggagagctgtgctcctgggtgctgaagcctcgctcctgtctgtcccccaccacctggccctcagcttctgagaggctttcccctgcccgacctcctcccgtttccctctcccaccctggcacctccctcacctagtgaccacccatggcaagttgccctctcccagcagagggggtgggtggggtggcatctgccctccctgctagcaccaggctcccccttcctgagaggagcccccagggaccagaggcctgcccttccctcctaggcttacccagcccctgccctgggggctccttggacccctttccctctgaccctgcctccagagggaaagcaagacagatgcaggcccctgcaaagccccaggtagaagcatgccccccaggacaaggcgcctcccactagttaggaggaggcccgctctgcagccgccgtcctcaccccaggccaggcctgcagtaccagacgggatagctggccactccacccctgcaccccagggtctcctccctctaccttttggggcaccctgggagcgtgggaagcaggtccgagggcccctgagctggcaaggggaggtgccaggccagctgtggtgccaagatactgagtgacctgggccctggctcagggagcatgtggggccaggcccagcgccccgtcttcctccttctacccccgctgggcctggcctgggcagcgccccctgcagaggcctttgggtccttggtcctgtaacaggaagggggaggctggctggggacgaccgaccacaggctgggacacagctcctggtctgggggctccaagtgacagcatgcaggggagggggctcccagtcagtgctgtgttgggagctttctggaggctgtggactgaaggccttgagggaagcagtggctggaggagggtgctggacccatgacacgttgcttcctctggcttttccctgctgggccgctttctcagaggcacttccccacccctaacacccagtgggcccccccaggttctgtgccactcagagggaccctggcaggggccagaaccacttaagggtggtgctggagggccttgtgccccagtcccatcccaggacgccctgagggatggacgcagccatgcaccccccatctggggcctctccctgctccctctcccacctggcagctgggagttctggcttctaggcctgccctgtcaccaggcctctgagtggccaggcccttccacctccccatctgtaaaacgaggcagctgcccggacagccttggggtccttagtggccctgcaggtcctctggcagctctgctgaccccaccctctcccggactgcccttctgtcccagaggggtcaccctgacccggcccaccttgccactgggctttggactccagccctgacagggcccagccacactggctctgcccctcgaaggggctatgagcaaggtaggagggagctggtctcctttcttcgggccccacccaggccctgagcaccccccacccctgtgagggccccaggccttaagtccctggcggggtcatgggtttgcgacttgagcagagcggaggaacagggcactggaaggccgacgagctcagcatgcgactcggtgacggaccaggctcggcagggccggtgtactttttgtggttgtcattggtgtgttgttgcacattccaggacgtcagtattttaacaggttctaagtgcctttctatcgtagcttatgttttcctcctcttggctccattgctgttagcatagagttttaaaaaaagagataagctaatgactataacaatatattcctccatgggagaggaagtttataaagaaacaataaaagtgagttgcaaagatg

SEQ ID NO: 5900 - DNA, 629 bp, Homo sapiens
gccagagagagacagggcagctggggccgggctctcagccagtgagatggccagccccctcctgctgccacaccacgtaagttctcagtcccaacctcggggatgtgtgcagacagggctgtgtgaccacagctgggccctgttccctctggacctcggtctcctcatctgtgagatgctgtggcccagctgacgagccctaacgtccccagaaccgagtgcctatgaggacagtgtccgccctgccctccgcaacgtgcagtccctgggcacggcgggccctgccatgtgctggtaacgcatgcctgggccctgctgggctctcccactccaggcggaccctgggggccagtgaaggaagctcccggaaagagcagagggagagcgggtaggcggctgtgtgactctagtcttggccccaggaagcgaaggaacaaaagaaactggaaaggaagatgctttaggaacatgttttgcttttttaaaatatatatatatttataagagatcctttcccatttattctgggaagatgtttttcaaactcagagacaaggactttggtttttgtaagacaaacgatgatatgaaggccttttgtaagaaaaaataaaagatgaagtgtgttt

SEQ ID NO: 5901 - DNA, 1227 bp, Homo sapiens
gaaaaagatccactggaaactaggccgggaagcagcagcccctccaagggccagggcacctgggagacgggaggattccagaacagcagcactgagctcccacccgcagagcctctggacggccttggcaacagcaaaatcatgggacaacacctctctccacggaaaggtcacagtggacagcccgggcagtaggatgcagccccagaggctggtggcagtttcctgtccattggtaggtgacggcccctggctcaggcagagggagatggttagactcttgcagggctaaaactctaatttggaattgaatattgtggatatcttagttaaaggccatgcttacagcttagaaatgaagccttaagctgcatcaagttacgaagtgattaatttccttctcagcaaacctccgggaggttccagaatgagttcttcctgacaggttgtcttcactgggagcgtggggcccccaggccccaccagcaccgtcctcccctaatgaggggccctgccgaggcatcagctgctctgctcagttagtttttattcccggggtaccaagcagctgcacagtcggtgcctgggaggcacgtagaggcccagagagtccctgggggttctgctctgaccgtgtgggtggtgatccttgtcaggatgtacagtccttgctcccaccccatccgggatggccgcctgtccctgactattgagtcctgttgttgtaagccaggcatggagggctcctgcccttctgctgagccacagcccattgcagcactgtgctggccagacttcagctgccttgggaactgaagccctgccactgttgctagtcaggggcttggttctcccacttacactgttgacatctattttctgaagtgtgtttaaattattcagtgctaatcattgttttttcctttgtaaatgttgattcagaaaaggaaagcacaggctaagcagttgaaggttccccaccattcagtgagagcagaacccccattccccagcctctgctggtagcatgtcgcagtttccatgtgtttcaggatcttcgggctgtcgttagacaggttaatgaagaacacttctcaacagtttcctttttgttttcctttataattcactaaaataaagcatctattagtgtctgatttaggaatgtaaaatgattctgtattaatgtaaataagattatctattgcaaaaagatatttcaaacct

SEQ ID NO: 5902 - DNA, 590 bp, Homo sapiens
agcacccatcatgccacaccggtaccctcctcccgactgaccactggcctacccctttctccagccctgactaaactaccacctcaggtgactttttaaaaaatgctgggtttaagaaaggcaaccaataaaagccagatgctagagcctctgcctgacagcatcctctctatgggccatattccgcactgggcacaggccgtcaccctgggagcagtcggcacagtgcagcaagcctggcccccgacccagctctactccaggcttccacacttctgggccctaggctgcttccggtagtccctgtttttgcagtacatgggtgactatctcccctgttggaggtgagtggcctgtaagtccaagctgtgcgagggggccttgctggatgctgctgtacaacttctgggcctctcttggaccctgggagtgagggtgggtgtgggtggaagcctcagaggccttgggagctcatccctctcacccagaatccctctaaccccttgggtgcggtttgctcagccccagcttatctcctcctccgcgctgtgtaaatgctccagcactcaataaagtgggctttgcaagct

SEQ ID NO: 5903 - DNA, 2062 bp, Homo sapiens
gagcctggccgagctggcagcatggagccctcggctccccagactttgccgaggggctgctccggaccccgttgtgagccggcctcctgtctgcatgccccctgtggccaccaggctccgaggggccgtggtgactcttgatcaaagagcacagtgaactgtcccttctgagtctcccttttctacagttgatatatttgtaactggtacaagatgaaggacagcagctttccatccctagttcagagcccccgttccccagggtcctgtgggctgagcggctggggctggggctgcccacgtgtggcctccgctggctctgcctgctcctgcaacagtgcggtccctgcccggagaactcaggaggcctgcagaagagaactgattggtggtcgaagcaccatcttcacagatgttcaggggcagtggggggctccaggcacggtcaatgaaggaaacagtgcctgtccacccaccctgcgtgtcactgtggcggcctggctgtcgctgctttttgtcctctgccgtgtttgcgcggcctcagtgccctccctggtgcgtctgcgctggggccctcagtgctcggggccttggggtgcatgggtgccgccctgggcagctagagtgtctcagcccggtgctgggcctggccgaggggcggaggcacagctgcttccagcagccagcattcagtggccttgtcaccaagctccacacctcctcctggtgctggctttggtgacatcacaaggcccctccaggtgcaggggcttctgtttggcaggcccctgccagggaggacctggtggcctcctcattctcttttgccattggaatgtccccttgcagttctcttctctttttttttttttttgagatggagtttcactcttgctgcccaggctggagtgcagtggctcaatctcgggtcactgcaacctccgcctcccgggttcaagtgatcgtcctgccttaggctcctgagtagctggggattacaggtgcctaccagcatgctcggctaatttttttgtatttttagtagagaagggatttcaccatgttggccgggctggtctcaaactcctaaggtcatccacctgcctcggcctcccagagtgctgagattacaggcgtgagcctccgcgcccggcccccttgcagttctctctgatttggtttgttctgtctcaggcttctgtggcaggactggcccagggaggaggaagccagcagcacacctggggaatggggtcccggccgggaggcttggcctctgggcgacctcgtcctgttttttttgtttgtttgtttgtttttttaaaggtaaacctcctgggccgcagatggcaaagggagtgcctgggcctggtgacccagggctggatccacccctgcggagccctgggccaggcaggtgtctgctgctcacctggctctggagggctgccctgcagctgggcctggggacaggtcggctgtggggcagctcagtaccctccctgaggctcacggtggctccgagcatgaggtccgcctcctgggcgagacccagcagtggacagcatggtcctcacacccagctccctgcacacccaggccagccacccctcccgctcgtgcacaggcacgcagatgcgctcacacgtacacacacacaaatgcacgcccacttgcacatgctcacgcacatgttcacacatgcacactcacgctcacacatgctgtcacgcatacacacacgcacatactcctgcacatgttcccatgcatgtgtgtgcactcggaccgagcatctcccacgcacctctaccccaccccaagcacctctctccccccatgcacctctccccaacaacacacacagccccctgcaccgcccgccccccgcccccaccaaggccccagcctctggccatcagtcctggtgccagagctttgcgtgaagttcgggccgcagagtggcccgctgggactcccatgtgctgccgtctgatgtgctcagatgggctcatcgttggttcgtttttactgtatatttatagtaataaaatcatgcagc

SEQ ID NO: 5904 - DNA, 665 bp, Homo sapiens
gggctgcctgagctggtggcaccctcccctgggccggaagactgggaattcctgctaagtgtggcttctagagtgtttgtgtgtaccccgcttctgactgcctagggcgagtgggcatcctgtcatcatctccactgtcccaagcagtcactaggtggcggccgggccagctggaacccagcccatcctctcaggcagagcagggtggtccgggcacactgggcctgcctctccagcctcaggatgctcttgtttattctgggctcagaccctcctcttgtacgtctcatcacagctggtagagacccaggagtgcctgattgtcccacaggggtggcgcacagctctgggaccactcagaagatgggatgtgtgggtggaggatgccttgtctcggtcagctcattcctgcctccttcctgagccagttcagggcctgggggagagccagcttggggtaggaagttaataatactgttaatttgggttgttgttggatttactttgctagattttctctttcaccacgtgtgaactgtgggtgaggtttcaaagtagcttcaccccacgtggcttggttcccagggacagtcagggcctcgggggcccagctatgtacaacgaagctgtcgaaggagaagacaataaagtcgctccgcagctgc

SEQ ID NO: 5905 - DNA, 670 bp, Homo sapiens
gatgtgtcctgctgtctgccccgtgggaagagcagagaaatcatcaccaccttgggccccacggtgccacgggctcaggcagcacagtagggcgccgggcctttgggacagtgtcccagcttcccctggggttcacccctggctgccaggccactgaggatgggcaggggtctcttctcatcaagccttgtaccaggcaaaagacaggccctgcttggccgtggtcactggccgccaagatcagggctacagatgtctgctctctggaccccacgtgatctggccactggggacccccacccgaccccactcccaatgatgaggggcattttcattgcaagtcaaaggcaagacaggcttccataaagtcccaggaggtccctcctgtagggcacaaggccaggctgcctcccagcccccaggccctctcccacctacagagaccctcccctgccccctccactccggggcctgtgccgccagaaccgggctctgcccccatacgctgccctcgcagcctggcggcctccgctgtggctgcctagctgtcaagagcaaaggctttttttttcttcaaccccattttcttccatttctcccacctttttaatgccagtaacctcactgagaatgttttacagtgatggaaaataaactctgttccaagttc

SEQ ID NO: 5906 - DNA, 2224 bp, Homo sapiens
ccgcttcagaggcaaggcttgccacttgggtctgggtggaatcagaacgtgcaggtctcccaggatgtacactcactgcgccctttctgctgcttggtgttcttctggaggagcgtgagttctcagcggagcgcttctcggcacttctgatgtgcctcccatggagggagccgggcccttgctgctcaggaggtgcagactgccccgtgctctgggccttgcagctctgtcgctagacggttgttagaggggcagctctaggctggggcttgcgctgggccgtggtgggaggcacagtgtttacaggctctggtggcagagcagttggcacacctgtgggtgaatctgcctgatcccctggcatttggtcagagtacctcagagcaccccactgctcaggggctccttctggctgcagtaagctccctggatggtcacagtgccgccccatccccaggctgtgtgctcaaagcggacaaaactcaggccagagccacagctgggagacctgcactgtccctgcgaaatactaagaacacctagggtgtgctcactgtgggggccagtttctcctcggaacatgacaatgaagctcttttagagaaaagacctttgtagattcaacaattatgataggatttttacagacacctattttgggctcagttttcatcattaccattaaatgcattggatagaaggggactgttcttcacacatcatattataggaagacataattccagtgcctttatggtggagcagaattcgacaacacatgtccattcagccctctgaatggatctgagacgaagacctttttaaagatatgtctgtattgaagagaaagccagttttgagttttttacacttgcacatcattatctgtgccgtcctgactagaaggttgtctgggcccccaaattccaagtcccagtatagccagggctcccattttgtttttccagagttcgtggaggtggactgcagagcccagagcccttcatctctctgagggtcaaggataccaggggtcccaagtcacagatagacattccagtttgtattcttaggaatcattcttaggcagtgcggcagaagcaggcctctgtgaagtgtctgccgggtagaaataggccttgaagtcctggggctctccaggcagtggggttatgtgtcgactgaagggtgatgtgcagaagagcttggagagtggatcagagagactaggacagttactgcagagctcctaagtcaccactcaaccagtggctgtttcacaaggatttgagggcacttgcctgtcttgtgaggtctgtgccacaaggtgagtctgaactgactgctccagctaagtgatcaggcacgttgagagtatacggtgtcctcagcacatacacctgtgggaaaacggaccgctcttggctcctgactcccagggtacagcgcccagtaactcatccttcattcagaggtttgctggccttcccggtttcccaaggagcaagacctctgtccgccctttggcccggcctctgctctgtctcctttttttacataagaaccaatccgtgtttcacattgggctaagtggattccttatccctttgttatatatattttttgcaacttggatttccagtttgtttacagagtagtcttaggtagtagcaaaagagccaaagaagagatttgtattgctgagctcaaagccaagcagaggccggcagtggaggctgagcagggactctccaggcttctctgcccataaacacccgggtcccaggccctccttcctttccctttggtgctccctcctccccacgtaccattgcgcgtgcagctggagcagaataccctcatttttaggaatctagtgatgcctcttgcctcagggaaacgtttctttgatggggagtttgagatttcttttccttgtttatgctttatttgtggtaatgaaagagcgaatgactgaacagccatggcaaggcagacctacaggcgaggccgcagcagagggtggggcagagcagcctcggggtctgggggctgcaggggtttccctggcgcagcgaaagtctctgagcacttaccgggcgtgaccgtttcttaggtgtgagaggggctgtggcttttgtgcagcgactatgttggtgttaggggtggtgtggagattgttaatcttgtataaagcaattcaataaattgtttcaaggtttcc

SEQ ID NO: 5907 - DNA, 705 bp, Homo sapiens
ctcctgggccagaggctaaaaccccaggacccctgctgtccttcccgcagcttcttcttggagtctcagggcaaaccctttcgagcagcacctcccagtggccagaagctgaaatgacagcagtggtactgcctggtaaaagaattggttctgtgacccgggaagctttggttggccttgatttcttctctggaggcttggaaacgcttcctctcttcttctgttcttcacgccccatgcccctgctagcgtattactgttctgtgacttccctgtgacctctgcagaactcctcatcctgcgtttggtctccaggtgtcccctttctgccgtgttcctaacattttgattcctgtcttgaaaaaagcacctgctgcaccgtaagcccagggatgtggcagctgcagtgggcttggctttgtgaggaactgagtgtgtccacgttgggggaacatcatacttgatacacacgtttttatttgcacaaagaaaatgctatttttggagccagaattttcatgtctgatttatggtgattttcttaagaaccagaactgctggcagaaagggggcacccacacgcttagatagccgatgtcttattagagggcagtttgtggttcctgatttggaaattaacattctccaaacattccagtccaatgaaagttttatccgctttcccatataaaaattcttcccatg

SEQ ID NO: 5908 - DNA, 1873 bp, Homo sapiens
atgcttttgcacctttgactgatgccaagactaggagccatgctgatgatgtgggtctcgttctttcttcattgcaggctagtatataccgagggggatacaaccgttttgctccatactaaatgacaaaaccataaaaaccttccaatgtggggagaaaggaagctttccgaggcctgagtattgcaatacatgcagtagtacatcattttagcaactctaaaaaaaaaaaaaatacaaataaaaaggaaaaaaaattacattttttatcttatacctcagatattttgttctgtgtattttaatattgtgggtctttaatttctgaaggttccgtagtttggttgctggctgtaggagtttttgtggttgatctagacagatgctagataatgaataaaaactggtttagggccatatccagagtgctatattatgtaaatgaattatatatgctgaatattaagctactggggttatcagctatttgggaagagtgtaagtgactacagtagtcatttttttctgcacctgcattattttattttgcgaaaggggaggttgggaggggcttaggggattggaactggggtttggctgaaagaaaaaaaaaaaaatgtaactgatgaatctaaacgacccactgcaccaacaatcatttatcaatggttctaagttactcattgccagttcaagccaaaggtcatgttgttaagggggtgcttctagtagcacttgtgcatctgagttgaatgaagctgtgcaaacccaccctttaaaccattccacccggcagtattcagcttcttaaccagtcgctatttaggaaaaaaaacccactagttaggccatcaacaagcattctttttatatttcttccagtataataaattattgatatcactgctgacttttatattatgggagggaaaaaataacattaataaaaaggtgataaaaaagcactgtttctatttttttctttttttccaaaaaaagaaagtaataaaaacttaaattctttgtaccagttaaaaaaaatgtataaaatttacatctgtgcagtggagttgttaagttctagaaacagtctatgaagctttagttttagcctagtagaacaactgttagagacagacgtataatttttatggaattacatgataatcatattcggatttatagaagcattttacaagtattgcaatcattgagtagagataatcatggtattttcatcagcttggtactttttgaaacgtgactgcgttgtgtgaacaatctgcaatttttcagtccgtgagatcctgcccttccacctctttcccatacccccaaggattatctcaaaatgatctctttagttctgtctccaaggcccaggacacttgtcagaaggatgcaaaaaaagaaaaaagtacatccaccctcttaatcccaaaagaacaaagtctccccacctttctcggatgcagggccagagtgacacagccgaaaaattgcagtttgtctgtacttctgtttgaactttccacgttgtcctgtttacaagttaacttaagttggggtatccgtcacgggtcttcctgttttgtatttaaataaaaacaacagcagcaggctgtccctgagtagttttgctgccataggttaagtcctcatgtgtacagtgcaggccctgtggcccgcacttcagtaagttatcaactctcaccgctgtgaacctgccaatccgctgtaacaactctgctttaaaacaaaaccaaacaaaactttaaaaaaaaatgtgtgatccagctttctcttgccatcctatgtgcatgccgtaagatcagttggatattaaaccatcaataaagtttcacaagatttg

SEQ ID NO: 5909 - DNA, 77 bp, Homo sapiens
cccatcgcctccacaaggcgcggcgtctcgactgttcttagagtgtatttctagtaaaatcagaagctcaccaaagc

SEQ ID NO: 5910 - DNA, 3144 bp, Homo sapiens
agaagccatttccactacagtgagaaagcccggatcccaacagttgtcaaattgattagtttgcctaattcatgttttcacttaaaagtatcagaggtgaatgcacagtgaagggtgatttgtggggagggagcatttttggtggtcttgggggaggggaggggagggaagggctggtgttgattttcctccctgcagagccaatggtgcacattggtttaagcccagagatcctgcttgagccctggactcatcttgggaagggccatgggaggtcctggctagagttctgcccaaccttgaccaaccccagcaatttttccaaaagccagtcaagggcattacatttgttcctgggactggcagctgggcctcctgggtgccagtccatctcaagtgccatattctgtgatcacggatgttggctccccctcgccctatgcaagcaaacacactctcacctcctctcccagcctcccggagctctgagcacgccccacgcatggtgcaggagggactggacagatctgaggaaggccgtaaaatggggacaggaggattcagctcaggagtaagggaagaggtcctctggccccctgaagatgagaatcacccctctcagtgcacctggggatccccctaaactgtgaattctgccctggacagggctttgcccttggaggatccccaggtggccttacccgtgattcttactcggcatcctccattccccaaactccctcctccctgttaaatgtcaacctagacctggacctgggtgggaggaaactgtagcctgagtgtccacagggacacacgtgagccacagggctagaagcacaggcccgtcaccccaggaggaaaagcccagggtctggggcagcagagccatcgcatcatgtttcccagggcaacttgaggtctgacttttggctccctcgccctaagaggctcttcctctcttttgctcatccaccttcacaccacttgtgagctgacccccaggaacagcttggctgttccaccagagcagagggaatcattgctggactggatttcttctggagggaagcaccatgaattaaaggtgccagagctccatgcatggaaaagtggcctgttggttcaacgtggtttccttgtacttgatcctcctgaaatgagagattttcctgagatgactgagtatggagattaccaggcagatgataccgaaatgcttaaaggggctgtggctgaggctgtagcatctctgctggaggtgagacactctgggaactgatttgacctcgaatgctcctaaaagagaacttgatagcctgacagcagagaagtattatttggtggggagtctgagaaagcctggcttgtattatctgtccaaaaggaagcctcttcatctcccggtgccttggttgactattttggaaataggcatatcaaggttcctgattcagcactttgctcttttaataacaaatcgtccaaagatctcaaagtaagggtttttttttttagcttccactcttccgcagacttggtcatcgacctatttttgttgaagaatgaaaggcaatgacaagtttaacatatacaaattcgtgaattcttgttcattttgcattcctgcagtcagtgctaatccgtcgttcttaatcaggagttctgccaggtttaaggtcacctgcactcccagccaagtggtgatgtatgcctcccactctctgcaaggttttcctcatttttatattcatttattcatcattcattcattcacctaactttcattaaatagctgcaccatcccaggccctgtgcggagcatcgggaatacaaagatgagataaaacattgtccctgcccccgggggctcacatgccactggaaacaacagactcttaaactaacaattcaagcaggcgccaagtgctatgacagaggtgtgaataaaagcatcaggaaatcggatggagaaccaccattcacccaagggtcagaggaggtttcaaagaaaaggtgtcattggagcagtgttttgcagaatgagccagagttcaccaagcaggcaaggcaaggaagggtgttgcagagagggaacagcatatgcaaaggcgtatcagttcatggcatcacatctttcactggggaagccagtttccacaggcagcatcccaaggttcaataaggccttatttaacaagcaagcaaaatgcaaaccaaaccattattcatttattggcttaagtatgctttctcctgaaaactttagcattgggtgcaaatattcagtatggttctcggagtccaaagggttttaagccagggcacaaccagaaaagtggctctctttggtagggagaggggctccaatatttcgttctctccccatggggcactgacagagaaatgaaatagttttatctggaaaattccagagctattatttactccttaccaagggaagttacttcttgtaaaaacttttaagccatttatcaacaagttcttgttgactcagggcataatgagttcctgagacatgctcttttgggggctggggctttagctagaagaatttcaaggaaaagaattctcagcagagctcaagattgtagaaactcagcagaagctggtaaaaacatggggagcccggaggacaggctgctgtccagggcagaggccatgaagaagtgcttccgtggccgacagtctggaaatgaatccatcatacattagtgccatagagtttagtaaccgtccagcaagtgtcatcacttttacagaaaacaaggtccagtaatagcaagtcttagtacatcctcacttttattataaatgggtgttttttcataatttttactgacgctcagtaaccatgcaaaattgtgtatagcattaatgtatctacatacctacacctatctatatataagctcatggtagaaaaccatagctaagtagcatcgcagacttaagcgtacaaagtgatcttgttcacaagtaatctgttgacagtgccaataaatgataaaaaaaaaattaacatgtcacaatgtaacggatgaccatatgcacaattccatgaattaaatctgtttcctgtgttagtcagtattcttaaataaaatttataattgaaacatg

SEQ ID NO: 5911 - DNA, 1501 bp, Homo sapiens
cgtgggagcgggaggggcggggtcccggctgacaagccagcatagggcattcggtggccagagccgagggtcctcccacacgtgctcacccacccgcagcctaggcaggctctgcatgctatgccaggcatgtgcagtctggacttccacctccagtgccagaaacttccagaaggaaggagaaaactcttgtcaagaatggcccagaggaatgcctcgcacaaaaggtcttccccacccacccccagccccctagtctaatacccaccctgatacgtgcaatcatgtagttttggcggaaatttccccatcattctaggatgatacagaaagaaaaactgtgcctggaccctccctcttggtgggtctgtggaaacataagcggtttttttaatgggcccctgcatcaataccaaacatgggggtttggtaatgagaaaccaggacaggccatctgcagtgacccagcccaggacgaagtttacaaacacctcctggaacgaagctcccgcctgcatgtcaccttgatgggggctgtgagtggggcagtgtgatacccagtgactagacgcactctgcgttttcccgtgtttggggctgaggcctgctggacagatggctggccaagtgggagcagaccctagggagtttgcacctcggctgggccggattcggaccggctctgtgttcactacactcagaatagcctggctgcttctctgtctccgagaccggaggtagtgggaaccaacagctgggctggagagttggtgctggcaaaacagtccttgccctggggccggttcttacccaggtccagagaaaccaacgcgggatgtcagacttcaccaaaaggactttctggttgcccctggctggcttcctggaggcgttcgcctctagtttctcagggatggagcgagagcccagccagagaacagtaagaggagctgctctcctatctgcactcacccaggccttcacccagactttaccacggaggcggctgagtgcagctacagctaggtccgcgtccctcactcttttcatcttctgcacgttcttcgtgaaactggaaggatcccgggtctcagctagaacacggtggaagagaactttcctaggaaacggttcatgtgtcacttttcaggatgtggaaacactgagccatacaccctccattgcttggtgctggggttgtgtggcctccactgggcacttgccgacctgagtctggggccaggggagcccaggctgccctgcactcctgcctcccagcccacagccaggtgctttcatcacagctaaacctggttccctccaaacctcccagccactcgggcttgtaactgtctgagccccggatccggtggggtgaaagcagccagctcatcccagtgactcacaggacacagccatccagcggcatctttccttgtcgaatgatactgtaatgaccttccaaagtgaagagtagcacattaaagtgattttattgttt

SEQ ID NO: 5912 - DNA, 2776 bp, Homo sapiens
actgcaaacattttcacacccaccatgctgcttgaaagccacttgatcctcaacatatactataattgcaaaggaaacatgaggccatcttcccttgttcactgtttaagacaagtgaattctatagtggttgccataaaaggaagttctaggtatttatagtagatgcctcttgtaattatggctttcttaaaactataatcctagcagaggacatcagatattgtgtagtcgttagcaagatcatcataggcaaacatatatccgttccaaggctaaaagtgaccttaactgtatttattctcaaagggaaaggaaatatcagatgtttatttggttatagaatgctttttttttttttgggtccatttcctgctgtgttgagtattttgcttcaacagtattgccaggttcctaaaattgtctaaaaacatgatttggcttccatttttgcagctgcactgtaccatgcacctggtttctatatagtaacagtgtgcaattctaattattggactgtgccctgtttttagttttcaaatcaatttctaattctggtgattgtgtgatgtaaagaggtgctatgatggtcatgcaattaatactaaatattgaatcaatgcccagagctttattggattcactttgtgtgtgttagtgctctaaagtagcagtattattattaaactgtccccagagtaaccctgtaggcctaaagtactcagttttaagacaaacactacttcccatgcggggtactttccttatggtaaatgtaaacatgtagactgcattcgaggtgacctaaagtagagaggtcatgaactttgagaatgggcttcctttttggttcagtattagtgagagggagagggagatggatggtggggtaggttttctagtctatcattttacatttttcatggagtccctgcttagtgcagtttccattggaatgggtggaagatgataaagctctcttttttatctactaataatgtgattgcaacttaaaatagcaaaacccaactctccctgtccctccaatccctctcctaaaaagttcagtttggaatctcattctggaaaagatggaatcgcatggagattctctagctgttaggtagacctaaataaaaagttctcaatagattcctcttttgagtaaatataagacctcttgtagctacaatgttttagagcatgtttcatcttcatttttaatatcctgaactgaatgatagtgtttttttagatgaagaactgatgtcagcctgccaggtactgtaatttattctatcatattattatattatatatcaagtaggacagtgaaaaatgtttccttgcaaacttgtagtccagtatcagttacttcctatttttatccttaaaagaccattgcaaatcagtgtaagggtttttccagtaattactcacagcactttgttaaagtttgcaatttcttcagccatttaataatatctttctgtgaagaaactttgctgagttaaccataaatgttcattcattgactgggtgggatgtgaatggaatgttagaaatgttgtgtgaattgaagttctgtattcattatagatgtagcccttatttaaaaaagtgaattccatactaaaactaggaatgaaagtgagagatttctaaacttttgcgaaagtgggtcattttttgtttgactataatagcaggaagaattatagcaatctgtcattttacctgaaacagacaagcctatgtattatgaatactttcaagcttccctttggaatatacaagacatgcgtttggagttacctttgtttttctatcgtaaatttagattctggaattggggtttggtggtgcaatgtgttgctcacaagtggccagaactcctattcctaaaaggattttgagatggaggaacacatatttaattcccctttatgccttggttcttgctcctctttccacgttggataacaattttttggttgttttgtttaagttggtgctctgaagcttaatctcagtaccctttactctgaattgtcaaattttgataaaacgtgccattttctttggtaagagaaagcaggtcttaatgtctgccagaacacaatttatatgccttattggcttcattaaacttttagaaaactttagcatttgttacttttttccattgcgtttactttcaaatgcacctaatgaatttgtcacccagtcgcaacttttcccttctctgtcccattgctttctcctttccccgacgcacagaataaacatgaagctcagcagtagaagcgtaatgatttccctcaggaaaaacttctgacagctaggtttttcaagggtttccctgtgctagctgagatgcaaaacaaatcatggaagattgcatacctgtgtggtattttaaaaacaagttgactttttcagtttcttgaacggttaagggtggatttaaaaactagacagtttagttttggggaacagaagctctcttcgtcttaagccagattctctgattcttttagacgtcatagctccttagttctgctcctgtcgccctaacttggcatgggcaagttgaagttcatccttagactgcagcgttctgagcatggctgaagtattaaaatgtttaatattttttagagcaaaattgttggaaagcatttggctgaatctaaagacctgcagtcagattcttcaatgtggtttacccaactggagtagtgataaacaccttaatcataaaatgaataaaaac

SEQ ID NO: 5913 - DNA, 1388 bp, Homo sapiens
aaggtgtttaataatgatatactactttttttttcatatttgtttgtttgcaatgttactgtaatactatttgccattgtaaaaggccagctcagattgtgagccctttctattgggacagtcctcttctatatgttttaagtggccagtaatttaatgaatttctggtttgtattaaatatgtccttccaatggataagttctaaaacatacgctatcattggcccatgttgctgaggtgcattgtgaacaatacctttagtgactgtggaactgctgcttctatcagaagacctaggatacaagcagccactgtttcctccgttaacaatcagcttttagtaacctgctgtggtcagcatagctacaggaaaagtcagcccttgactgagggccagatcatccctggagtgcacctctactaagattttatgaaaagatgacatgttgggctgcatgataaaagttaattataaaaattaaaagatttttttttttgagatggaatattgctctgttgcccaggctggagtacagtggtcactgcaacctccatctccctggttcaagcaattctcctatgtcagcctcccaagtagctgggactatagtcacttgccaccatgcccggctaatttatttttagtagagatgaggtttcaccttgttggtcaggctggtctcaaactcctgacctcaggggatccacccgcctcggcctcccgaagtgctgggattataggcgtaagccaccatgcctggccaaaaattaaaagattttatgaaacgaaatggcttcccattctttctattcagcttctaagtgggctattcatttgtgctctcctcttttttgttttgttttgcactttgtcaatcatttggggaaatagcctggaggtctttcctgaatctgtttgtagacataataaaatttgtgtgctgtgtacacaaaaacataatgtatcttatgaaagcattacccaacctgtttgagttgagaatgcatttgtccacctttgatttgaggctttagtttgctgatttcctaaatgctaccctttgatcatttcctggccaccatcacaatactaaggggctcagatgtgtcttgtgcccacctcttcctgagaagagatggaagtggagctgtgactagtacaagcagcccaagaaactctgaacggggcccaatggaggcaaacttgagcaaataattgggatgataagaaacaaaaataatcccaactgtttgaaagttcgaaagaggggcattcttttctggtacatggtgagagttcaggctccagagactcaaaacggaatggttttccttggcattttgtaaatgctctcacatctgtagcaataaagctgttattttctgc

SEQ ID NO: 5914 - DNA, 246 bp, Homo sapiens
aacgagagaatgttcaggaccaagcagttaccgagcgaggcactcactgggcagcacatccagccagacccgaccagctccgggatggggtgggtcacagcaaaaggaccagatgctggtgtggtccgaagccactttctcagagacactttaatcattgagtatttgtacacttttctttagaacatatataaagggcattctctacaaatgtgccgttttaagaataaaaccccctcaaatctc

SEQ ID NO: 5915 - DNA, 1105 bp, Homo sapiens
catgttctctgaggacactaaccacgctggaccttgaactgggtacttgtggacacagctcttctccaggctgtatcccatgagcctcagcatcctggcacccggcccctgctggttcagggttggcccctgcccggctgcggaatgaaccacatcttgctctgctgacagacacaggcccggctccaggctcctttagcgcccagttgggtggatgcctggtggcagctgcggtccacccaggagccccgaggccttctctgaaggacattgcggacagccacggccaggccagagggagtgacagaggcagccccattctgcctgcccaggcccctgccaccctggggagaaagtacttctttttttttatttttagacagagtctcactgttgcccaggctggcgtgcagtggtgcgatctgggttcactgcaacctccgcctcttgggttcaagcgattcttctgcttcagcctcccgagtagctgggactacaggcacccaccatcatgtctggctaatttttcatttttagtagagacagggttttgccatgttggccaggctggtctcaaactcttgacctcaggtgatccacccacctcagcctcccaaagtgctgggattacaagcgtgagccactgcaccgggccacagagaaagtacttctccaccctgctctccgaccagacaccttgacagggcacaccgggcactcagaagacactgatgggcaacccccagcctgctaattccccagattgcaacaggctgggcttcagtggcagctgcttttgtctatgggactcaatgcactgacattgttggccaaagccaaagctaggcctggccagatgcaccagcccttagcagggaaacagctaatgggacactaatggggcggtgagaggggaacagactggaagcacagcttcatttcctgtgtcttttttcactacattataaatgtctctttaatgtcacaggcaggtccagggtttgagttcataccctgttaccattttggggtacccactgctctggttatctaatatgtaacaagccaccccaaatcatagtggcttaaaacaacactcacattt

SEQ ID NO: 5916 - DNA, 3491 bp, Homo sapiens
gtcagtgccggggcctccctttgtgtgtgtggccccgctggtagggaccccagtgccgctgactggcaagacacactgggagcacccaccattctgtgcggcccccagcagccatctcaaccacctatccctgcgctcccttgaatgggaagaagccccacgttgtccttgaattcctttttcactttgcatctcttcacgtgcaggctgggaccagcggagacaccgcggcgaatgcagatgactgcaccggccactcagggagctgcctgggctccgtgtctctgagccccgggtggcaggacccaccggcacctctttcttcctctgtcatatggctcctctgtcaccagccccagtgtgcacagaagaattggaccaggtcactgtacgtagaaatttgtagaaaagcagacttagataaacatctcctttggatatttatttccgcttttggcagcaggtgaacatttatttttaaaacttctatttaaaagaagtccaaaaacatcaacactaaggtttgatgtcatgtgaaaagtgtaataataacagttaagatttcatgatcattttcactggacctttcctgatattttgtttcagagttcttagtgtggctttttccatttatttaagtgattctttgttactcactaactctgcaagcctgtggaataatgaagtaccttcctggaaagtttggattattttttaaacaaaaacaagggagatacatgtattctcaggtacacacagagctgagagggctgaatggttttctgctatagcagccgagaggcctcccatcatggaaagatttctccaggaaaaggaggaatgtagccagctccccactcaggacgcttcctcatttctcttcaccaaaaccaaacagagacagcttccagcaccttcttcagtgttaccatctctaagaaggaaccagttgggaccgtgaagactcccgaccctgtggccatgatggaaatcaaaggaagacaccctctacgtcacctgccctcgactgtgtgtgcccacatgtgccgagagatggcccagagccagttcccctccagctgcaagggcatggtgtccccagagctctgagtctgtcactctccctctgctactgctgctgatctgaatatggaaaccccatggttcccttccccattcggactgggtgtgtacaagcaaggacccagatgcatcagacacagcccccaagatgttcctttctactcggccagctcgggagccagacacagcactcacagcccaggccgtgatccaccctccccaagtccaccagggccagcggcccctcacctctctggtcactggtgagaccttccacaactttcctccagacctgccagcagatgtgcccaccaggggcattaggtatccgccggagcctggccatagggtagtctcgggagccgcgctgagatcttttgccacctgcattttagaagaacatggtctctgtctcctcggcccagccagctgtcccggcaaggcctgccgagggcagttttcaacctcatgaaggaaacacagtcctgccaaggagggggagtggcgcccatggggacaggcctcagtccttagaagccctctgggtagctgtgcccacccagccttcatggctgcaggtacaaggacctttgcttccatagagaaaacgcacagctcagaaagggggccacatgggcagaaacccaaaggaaggacaaaccacgaccaccgtggccatctgcagaatccctggaagagaaggaaggcagggtggagcggggggaagaccatcatggagagaaggaccacagcatcaggagacgggacacgccacacccagcaggcagcctgtgtgttgcttaattttttaagagcaagaggggtagagaggatcaagctggccctggctggagatggctagcccctgagacatgcacttctggttttgaaatgactctgtctgtggggcagcagaaactagagaaggcaagtggctgccccaccccaaggcgtgaccaggaggaacagcctgcagctcactccatgccacacgggtgggccaccagcctgctgtcagaagtctctgggctccaactggtcttgtaaccactgagcactgaaggagagaggtcttggtcagggctggacagcatgcccgggaggaccagcagaggattaaaggtgactgggaggaccagcggaggataaaagacactgctcagggcagggcttctaccctgcatccctggccaagaaaagggcagtccccatgtgggcttgcagggtcactctcaggggcctctttcagctggggctggcaacttgcgtctgggggacacctccaggtgtgtggggtgaggatttcctataaccagggctcccagaagctttgcttatgtaaggaggtctgggagccagcccattggaggccaccagccattttggcttcaaaggaccccacctcacccaggtctcagcggcagtgggcacagctatgtcttcaggagctcccgtcaaacctcatagctggggcgctcccagacaggccagtccagacaggacacgctgggcccctggcatccagaggaagagccaggagtgtgggaaggcccacagtgggggctgtggcttctgacactcaggtcatagcctcagaggtctgaggtcagcccccacagacccatccggcccgccccccaagtccctgcagagagcacttagagttatggcccaggccctggtccacccttcccctgtgcacctccggctgggtttgccaagtcagggagcagggctggccgcaggaactcccaaaccttggctttgaatattgttgtggaggtgtgctcgtccctttctggacgtgcaaggtacctgtcccagcaggtcagatggggccagctgaggcgctcccccaggcaggaagggccagccttcaccatcgcgtgggattgggaggaggggcctccgtgagcagcccctcctctgccgctgtcccagcccagtccctctcccggagccttggcagcctcccacaacccagacacttgcgttcacaagcaacctaaggggcaggtgaagaagcgcagccctgccagacgcgctagattcctctaaggtctctgagatgcaccgttttttaaaaaggcgtggggtgaactgattttgatcttcttgtctagatgcaataaataaatctgaagcatttaatgtagtcatcttgacattgggcctacactgtacgagttccttatgtttccttgagctaaaaatatgtaaataatttttgtcccagtgagaaccgagggttagaaaacctcgatgcctctgagcctcgggaccgctctagggaagtacctgctttcgccagcatgactcatgcttcgtgggtactgaacacgagggtggaaatgaaaactggaacttccttgtaaatttaaacttggcaataaaagagaaaaaaagtt

SEQ ID NO: 5917 - DNA, 970 bp, Homo sapiens
agtatgttggaactgtcgttaaaaacaaccaaaatcccgaaactatttagaagcttataatgatgtggatttcatggacacttttcaatgcgtatttttcaaatgcttctcagagagccttgctttggttgaccaaggagtccggatgtaggaatgtttaaatcctcggatacttcagtgacacagcctctgctgccccttgctttgcctgtgtttgctgatgaaaagcagatgcttgtgtttcattttccttcctggtttgtgtgtgttaattctctctctctctctcagacacagaagtctcatgttgcattttccaaattttatgagtgatgatactttttccattactgctgcgtccctgttttacaatgcaaaatttaagtacggtcgttgcccatggtgattaaagtgtggttatgggcaggaagacagactgtgtaaaaaaggaatgacatcctggctcctcatcttcttcatcagcaactaccataaccagtttgcgagtcaaatggcatttcctaacggcaggcatggcggcccctgaaagacaacagctccctttctgcttcggacaccactcaaacatttagacgcagctctatcccttttcctagctagagaaggtgatgccttcttccattactcagagatgttgagacgttttcagaatttcttgttgaaatgaaaaacatcaagataaaggacgcctttcaggcattagctaaacttccacttcataactttcggcgagacatggtgagcctcctggtgtagagttcttttgtctttgtatggaatgactttttgctgtgatggttttgaatgttgggtttctgctgtctgcttagtacccatgcctgaattttttgagattgtaaatatcaaaggagttagattgtgttctgacatggttgtagactttcacctggattattgatattctacctctaataaatttttaataggc

SEQ ID NO: 5918 - DNA, 2824 bp, Homo sapiens
gccaggatgcaaggctcctggtcctgtttgcagccggccaagaggcgctgggaggggcaaaaccatacggatgcgctgctgtctgagaggaagggctgacacttgctggcatggcctctgcgggcttcgtcatcgcatgcactgatgcccggggacctggctgtcctgggcttcccctcggcctccaggtgaggctgcccattgcaggcactgggcaggcctgaccttgctggggctcatggccctgtagcgcttttgttacttgaatgtctagctgagcctgtttttgatggagctactactgtaatgcgtgaactaacaaacctgtgaactgtaaataggcccctggaagcacgtgcttaagcccttttgctgatttttaaaaatatcatctagcgcacacgggactggtattctggctgtactaatgacaagctgagtcaagaccctggagggtcataggcttgtaaaggcccacgccacactcggcaggggtctctcatgtgtgtccatctgcgtgtatgtcaaggaagtgagatgccaatttggggtcttgaggctgaccagttggggtgcttgggtgatctctgcttcattagtcatgggtggaagaaaaaccacaccccccgcacccctccgttctttctgcatagactcacttgttaaatagcagttctgttgagagtggagttactgcagggaagctaccggacctgcctgggagccagtgaagggcgagtcagggcacgcgtcctggaggctgccagcgtccttgtagcagagcagtttcttgccgcttgggtcttcagcacgccaagccccccaccaaccctccaccccgagtgaaggcttcgctgaaattgctttggtcctcatagagcctgtggtggctacttttggtctgaaacccacttggcccaggaaagagaaaaggttgtatgttttgtgttggtgtttcctattttctgcactggaggggaggggactgttgaggttctgtcttttttcttcttttcctcttccctcttcacatcacttggcttcctttcctctctgatgaccgtccgcctatggggttctgacttcactttcctcagcgggtctccagtcccctgacccagctctaaaggcacttaggacccagggaacatttctcacgtgcacattcccctaagagccaccagactgcttcctgccagcctgtgcttgcggcagggagccggggcagggcagaggtgaacttgaagttcaggacttgactctcccacaggtggtgagctggtggctctctggtgagctagtgtctccacagcctgtctccaaggcctcccctatgtacatttcagtgagctcactttgatttttaatcccaccacaagcacatactaattttatttatgattcaaatgtgactcgtgcctgcccatccctgtaatagatggaaggtcagccccggcttaaccacagagcactggcccttcatggctgagctcagagctctggcctcctgctcagactaaaggcacctcctctggcctcacccaagcctcttctaaaaaccatgttgaatgaatccacgttctggaaccccgaggcgggagaagtagggagctgttcgtttaagcagcatacacctaaattgggggtttaaacattaagtaggagcttggggtggaagagggacagccggctgggccacctgagcagaaggtggtaatgaaacacctcagctgggctcttgggagaccttaggaagcaggagaggcaacacctctggctactgatggtgtggcaagttcagaagaggtggtggtggggtaggcgtgatgtcagcagaagccctgcaggctgggtgggcaggacacgtggtgggggccactgaaaccaggcctaggagggagaacaagttccaaaggtgccgactggaagaagggggtaaaagtttgctttggtgagtgagaaaaggctggggcgtgtgatccatcccctcacgtttcagaacttccaggctttctacctcgactctcaccacagccagcacatacacctaggctgtttttccttcctccacacctgagggacgcagcaacagctaggatctgcattttcaggttccgagcctgacccctggaactgaccagcgctcgattgtcagccttggcctggggttttgaccttgccagtgaagtttcggttttgaagtgattaaatgtcacttcctcatcagtttcacttctggaggttttcttatcctactccctggtgccagggacgtacctgggagtttgaatcaggcccatttgagcgtggcagccgtgttgggtgaaggtccggggctcggtgaggcactgggggggttttcgggaggaaaatgaaaatgcttctagaatgagtgaaccacatcatagctctcactgttttttcaatagctactttttttagcagacaccagagccacactcaaatggctaagtaggttatgacctctctggattatttttgaatgcccaactgttgcattcaagttttctgactaataagaaattaagcattcatccttcgtatcactgcagaagcaacagtgggggcacagggagggaactcttgacactgagccactaaaatatggactaattttttggacaaatcttcaaacggactgtgctactgtatttgtctcaaagctaccaagtttgtgcaataagtggaagggatgtcatccttcttcaataaatgctgaatgacattcaagctgattttctagaccactgagaaaatctttatttacaataaatttcaataaaatttgcataaatatattccc

SEQ ID NO: 5919 - DNA, 220 bp, Homo sapiens
ttaaccatttcgactcgagcagtgccactttaaaaatcttttgtcagaatagatgatgtgtcagatctctttaggatgactgtatttttcagttgccgatacagctttttgtcctctaactgtggaaactctttatgttagatatatttctctaggttactgttgggagcttaatggtagaaacttccttggtttcatgattaaactcttttttttcctg

SEQ ID NO: 5920 - DNA, 1058 bp, Homo sapiens
gtttgtgtgtaaggtggagtctcaccgtcccccaggctggagtgccgtggcgtgatctcagctcactgcaacctccacctcccgggttcaagctattctcctgcctcagcctcccgagtagctgggattacaggcacctgtcaccacacccagctaatttttgtatttttagtagagatggggtttcaccatattggccaggctggtctcaaactcctgacctcaagtgatctgcctgccttggcctcccaaattgctaggtttacaggcatgagccaccacgcccagccttcccttgcacttttaatgagggggttaagttcactgttttctctttctatggtattgggtaaaataggtctgcaagctttatatttgcccagggtatcattcattcttcaggtgttgatttaggagtgttatttggaaggagtattatttgctcttcccctgagaactgaaagaggggaaaggagtacatttgagggcacttaatacaaagttaatgtcagaatgtgtgccttgaaattcttgctttatacatacatctgtcattttcatttcacagggttcacagggtttcacagtctgatgagactgtgcctgttattgttttttatttttactctggattttccttgcatctgacttgccactagcacaggaagctcaggacgaaggcagcgttaggagaatagttgtggtatggtgacttctgtgtttatctgcaggggtgtgaatagccgtaacttgcctgcacctgctgccttaacagtggagttggccaggcgcagtggctcacacctgtaatcccagcactttgggacaccaaggtgggtggatcacctgaggtcaggagttctagaccagcctgaccaacatggtgaaaccccttctctacgtataaaaaaatacaaaattagccaggcatggtggtgcatgcctgtaactccagatacttgggatgctgaggcaggagaatcgcttgaatatgagaggcggagccaagatgatgccattgcactccagcctgggcaacaagagagaaggtccttctc

SEQ ID NO: 5921 - DNA, 5328 bp, Homo sapiens
cgtcacagatttcttttctgagagttgatgaggtttaagaacatgaagattctaaaaggtcagtttttagagatagatctatagttgcattgttgcaatcaaaatatgttgtcacagaaagaataggtggaaggtcatagcctggaacccaagtttgaaaacatttcattgtgttcagtagtgaatttctacagtttaacatagcacagggccttctgaaaatcgcacttgtcaaagacgactcatctatttctccagacttcagtaaagaatgaaaagtacctttagataaaaacaaagaagagtaatatatgcagcacagtgacgttaggattctggtaattaactacatttaaatctctggtcactttaagaccctaaataaaaggcagacagctccactcaaaaactaaggctgatgtgagggaggtgagaggtcactgcacttggtacttcctagagacggccggagccaggcccaagacacagcagaggtcaaaggcagtggagagccttggccagttcagtgacagcttctggctgaagacttttggttctattcagaaacctgtgtcgtttttttggtgttgtagtttattttgtgattttttggaatcgtactttatatttccaaatttaaatttaaatgcaagatctttcaacataaacagaagatacctacaaaatactgtcagaagtccaggtatactgataacactgaaaattctattagcaaccttctgggttggttagattgattttaatgtatatattagacatttgtatgtatgctctgacattgtgatttgtacagcctacgctggggtaaggaaatgggtatccaaggtcctacttttttaatagctcgaatatttctagagtacttgagccacatgtatttctgtatttaaagaattgctgactaactttcaggtaaccagacccatctcaaagaaccaagaaaaggctttagcatgaaatatctttctgagctggcgagttagaagaatggaaggtaaggggaaggtctgtcatctacccaggacattcccatgatgagtacaggtcagattgtgccacaaggtgggcctccacgtccctgccctggccctctttcttctgtcactaaccctggttatcattttacaggcttgtaactggatattctaccagagctctcactatattgtcaagcctaagattgaaaaactggaggctttattagtgtttttatatagaaaacagttattacatatgtgttaagtcatttcttaagaattttctaaaatgccaactatcacaggattatttcaagctagtcattgaggtatatgacaaaatgtaaataacaaaaaactgaaatctaccaaaagagcatggagatttttcttaaataataatattgtgctctccacctcacccttgtgtaaaccctcaggtcaggttggttcccctgggtcacaaaatggtaaatgttccatactgacatgccggaggcagcctgacccgttatttggaaagaatttgtgaattatttctgggtttgtgttttgcctaagagctgatcttatttctgatttgtgtgtgtgtggtttataaattttactacgtgtaacaaaagtctgcttttccagcatgagcacactggagccctctgctcactggcacttcctgactcaaaggcactaacagtgctcatgtgccttccagacggttcaaggcagaggccactgtgctcagtgtagtctgtgatgaatagtttaagtgttcagaaattggtaaaccaacacacgggatacaataactctctgttaaccagaacaccgtcatttgaccaagccctacaagagtttaccacactagatgttctgtgaatcctcgagtcagttccattgagaggggcctgtctccagggccaggctatttacttgggaaagtatttttcttacagttcttggccacagtttttttgctgagggtttctgtctgggcctatcaggtccatacttagaccctgagcatcttcttcattcagatttgaatggcttattaaattagcaccaaatatcagtgggactgtagaaggtaaccgaacactagtaccattgactctcgttgaataactttatatttccataatcctgaattgtgtagatagttttctagctctcgggtccctttattgctttttaaaatagggtttgaaacatgccacaggaaggttgctctccaaaaatacacagtgcagtgcaagaaaatgctatctcattggcctactctcctatgaattgctaaagtgcccacttcacatatgtgtttaaacctttataaaccagtatttcacttttaaaaagacaaggcatctctacccattaactctgcaagccactccacttgcaccattccgcttgaccctcctctctcctggcttgggtcaccagccaggcacctgtgacacgagtgctgctctccaggatctccactacatgttccaggttggagtgaggacgcgctatgtgctcacactcatgtgacatgaccaaagatgatactctgtaaacaaggcccttctgaccggactcagtgcgtgtgatggtgagtgcaatgaggaagggtggatattgactaaagactggttgttgttgttgtttaggttagtgtcacagccattacagcacaagtcaaagtcgccagttgaattttcattatgcacgtgtgtggtttaagcagtggtactgttgtatatcatattgtaaagtatcatactgccaagaaaataactcctagaaaggcattatctcacatccccatcttactttcctacatgttctcaaaacacagtagtaccagccttacctttctgctgtatgtagatagtcagatcatcctactgggggtgggatgaatttaaaagttataccaaaatttctgtaaagtctttgaaagtctaggagtaggtggtcatcttgtacatttcagcaaagcatccactaggaaacctcataggacagtgttagtggttcacgttctagtgtttttcctgaaatgtgcaatctactgtatagtattgccacataattgtacatagatgtattctgaatttgtggaatttcttgcttagatactattgtgtttgtttcatatgaatatttttgtaattctaaaagagatcttatttaaatttcctttttaaaagccgcatggttctgtgatccatgtaactgacactttttggctttcagtgctgtttagaaacagtggcaaaggcagggtggtgctgcctgcaagctgctgcctatggaaggcaaagtcatagtaatgagatagcacctctgaactgtgcagtcagcataccctgagtgatggctcaggggcgcactacctattttgtcaccagagctgactcaggcttcctggaccctcaaccccagatcattccaggcagcatagctttcttcacagtcctttcagaattcccaggctgaaatcagccatagcagttgacaaaacagctatccccacaagtgatgagatagtccctttactgtcctcaaatggacttggccttagagacgtggtaaagcactttggcagggtttaaaatatttgtgagaagcccacatttcagtatacatcctcactggcttccatgcacccacctgacggtagcctcacagaagtcctggctgtcactcaggtggggagctcatggtgccgctggggactttttagagaaatgtaaagagaatagctattcagtgtctactagcagagcaacatgtgtcaatttaaccaaattcacaaataaccctccatttttcaatatctgctactgtaaacatgaatattgaatactgacaagagaatacccatacaaatcgtcccaccgccctagaggccacagaattagcccaaaattatcaaagaacattaactggaaggtcaggtttttcaaggaacatagcttacaaatgcatcagtgtgtatctggagagcatcctaactgcatttcaactcatcttttaagtgatttcagtcaaaactggaaaacaactaagatgtagtaatttttttttcctggttcaaaccttcaataacttgctcattcagcagtctctctgagctacatttttatttgtaaagtgactctgtctgcatggcaatgagcaggtgcgtgttttttccacattcgccctttcttgcagtatccagggaaacacatcattacaaagggtttctacctgaaatctttcatggaaggcctacaattcgaaaagctgcacatgtttacagaagagctcttaccctccatgcaaacactttgctctgtggtgtcacagctttgtgacaataagatggcaatctcggatctacaaggtgctgtcgggaatcaaataaaatatgttatcagagatatcatcacatctatagtgtttaacagagctttatgccaactactaagacaaagctttaacaaagtttatagaatactgaaactcgtaacaattacctctctacgtgatgctgtaaggaatcttgctaatttggtaggaagaggaagcatttaggaaagggtttagtatctaccaaaagtacttgacctcaagtaaccaatagtaatgcaaacttgctttaaaggaaccaaaggcattgccaagtatttgccaaaaggaggcactttttatttaaaatttgagactaatgagatctcaaaaatcagccccaaaaaggtattatccatttaaggttataattttcactaagatgtagatatttctcttattgttttcatgtaaaatagtatagagttgttttgttggtttaagagtaacattcagtagtaatacaaagttttttttctatgtagaaattagttttcttttcttgcttgcaatagaaatgcaatgtgataggtgtttctcttcttattttcattgtcacattatgtcttagcatctcactttatgaaaaaaaggagaaagataccaatctacagagccctgcttgttgaagcactagtttaatcaacaaaaaattatggcaatcgggggtccattcatctattgcctttatgttgttttttaaaagaaaaaccatgatgcctttgtatttgctgtttgcacccctgaaatcaattccatatcatgtttgaatgccatacattttgcacatgtactgtacataagtaatgcatactgtatttttatatgtgtgcacatttatcatcagatcttttgtacatagtggcagtattgtagctgatcgggaaatgtttgatatctcagcaattttgcatttttgtgtctcaaataaaagacattttgatgt

SEQ ID NO: 5922 - DNA, 1008 bp, Homo sapiens
ctggcactgcccaggctgagactcttcaagtcccgctgacgtctgagctttgatgcttaagaggggtgaggcagggagcggacttcctattttctaccctcagtaaaacaaggtgctgctttgtatatcaaaagctccaaccatgtcctctccccctcagcctgtgggtggcacgagcaaggactgacatccgcacagggaggattgtctgtttggctgacacagcagcagcccttcccacccagccaccttcctcacagggactaggaggctcagtccccaacggctggcaagactcagggtcctcagtggacatggtgtgggtgacatcagaagggtgccacatcagtcccctccccaacctcagtgactgacagaggatccggatctcagagcctgagaccaggtttattggggcctggcctgtcctctaagtcaagtttaggaaaacaaggataagattctgtcataggcatagagagttgcacataaaaaataccgaagaaaacccaaaattcaatcaacaattctgtcttattgaagagttgctaggattcagagtaaaactcaaaggattcagtttgagcctagaatgatggttagacttgtagtcactgggcttttgttttgctttatggaaatcattgaaggtctggatccctttctctgaatggagagattgagagggatgtcgggcagttcccattagatttagtggccttcatgttattcagaattgttttggtgatacctcacccctgtaatcccagcactttgggtgggtgaggcaggcggatcacttgaagccaggacttcaagaccagcttggccaacatggtgaaacctcatctctactaaaaatacaaaaattagccaagtgtgatggcacatacctgtaatcccagctacttggaattggaaatcgcctgaacccaggaggcggaggttgcagggagggagactgcaccactgcacttcagcctgggtgacagagggagactctgtctt

SEQ ID NO: 5923 - DNA, 49 bp, Homo sapiens
ggaagaataaataaataatataaaaataaaatgaatactgcagtcctta

SEQ ID NO: 5924 - DNA, 511 bp, Homo sapiens
ggaggaaggggacagttgcagtctcacttgggacaggccacagccaggggtccggccactacccgcccgtgggataaaagccaaaagcatgcgtcagctaacttcagcctgtgctgctgggcccgcaccccatgtcccttgtcactgtggcatcctgcacccatcctcacccctccgtagagcccctcgtgcaatgcaatgaatggaccctcctgtcactctgctgaacagaatttattttctgagtcaaatataatttattattatttttgtcaaagaagtatttaagctgtgctgtggtgtgagaatgtcattcttgatcttcagccttcgtttgcaaggagagttccagttgacgtggtgtttggttccatggcggggtaccctagggattcatctgttttcttcacttccctttgcatctgagatcctgctggaaaccacagcaacctgtatccactattaggaggtaaaaatcaataaaatggcccattcatttgtgttgtagctc

SEQ ID NO: 5925 - DNA, 2054 bp, Homo sapiens
gactcattgtgtggtttgagactgtactgagtattgtttcagggaagatgaagttctattggaaatgtgaactgtgccacatactaatataaattactgttgtttgtgcttcactgggattttggcacaaatatgtgcctgaaaggtaggctttctaggaggggagtcagcttgtctaacttcatgtacatgtagaaccacgtttgctgtcctactacgacttttccctaagttaccataaacacattttattcacaaaaaacacttcgaatttcaagtgtctaccagtagcacccttgctctttctaaacataagcctaagtatatgaggttgcccgtggcaactttttggtaaaacagcttttcattagcactctccaggttctctgcaacacttcacagaggcgagactggctgtatcctttgctgtcggtctttagtacgatcaagttgcaatatacagtgggactgctagacttgaaggagagcagtgattgtgggattgtaaataagagcatcagaagccctccccagctactgctcttcgtggagacttagtaaggactgtgtctacttgagctgtggcaaggctgctgtctgggactgtcctctgccacaaggccatttctcccattatataccgtttgtaaagagaaactgtaaagtctcctcctgaccatatatttttaaatactggcaaagcttttaaaattggcacacaagtacagactgtgctcatttctgtttagtatctgaaaacctgatagatgctacccttaagagcttgctcttccgtgtgctacgtagcacccacctggttaaaatctgaaaacaagtacccctttgacctgtctcccactgaagcttctactgccctggcagctcgcctgggcccaactcagaaacaggagccagcagagcactctctcacgctgatccagccgggcaccctgcttaagtcagtagaagctcgctggcactgcccgttcctacttttccgaagtactgcgtcactttgtcgtaagtaatggcccctgtgccttcttaatccagcagtcaagcttttgggagacctgaaaatgggaaaattcacactgggtttctggactgtagtattggaagccttagttatagtatattaagcctataattatactctgatttgatgggatttttgacatttacacttgtcaaaatgcagggggttttttttggtgcagatgattaaacagtcttccctatttggtgcaatgaagtatagcagataaaatgggggaggggtaaattatcaccttcaagaaaattacatgtttttatatatatttggaattgttaaattggttttgctgaaacatttcacccttgagatattatttgaatgttggtttcaataaaggttcttgaaattgttaccagtgaattcagtttataaatcttattacaaaagacttacccacgtacctgaaatagctgccgatagaccagtgagaggtaggttctcctctgcccgttattaccgaccaaaaaaaaaactggacatcaattttttagtaaaccaaaaaataagtctcaacaaatgcctttgccaaaataaggttttattttgaaagtcatttgatgaaagtcatttgaaagacactgaggagggaaggaggcctaagacccaacagatgtaggatccagatctggattcgtgccagccccaccaatggtctgtcaggccaagaaggtgctttctttggtaattcatgttttttaacttcctggagaagagatcttttcccacaagccatcttcattttttttgtagagtagggctttatttccagaaaacagtgtgtgagctggagatgggtgtttttttaaaaacatcaaggtagatctaatatgttcaacaaagtggggtggctcagccagaggcgaagtggaaagattctgaaaacacaagatggtgggcattagagaagccaaccttactgtcccctgctgtgataaagatgtcaaagtatctttgttcttggacacaaatatatataataaaatacgttaagaaa

SEQ ID NO: 5926 - DNA, 1650 bp, Homo sapiens
cggcacattcaagtcagctttcaccattttatatacaaaggggaccagtgccacagaagggtacccgaagaaatgagaagtcaaggactctcttaaagggaccacattttttacctaaaatgcacagaattgcctgcagacaaaatatttgatgtgccaattatgcacttcattttgaggaattactactatttatagacccactttttaaaaaattatcaatgattatttttgaattgtattcagacttttttcctgttctagtctgaaatattacttctctaatattttggttaatatgaataatagtggcaaaatggcattttagaattattaatatttctaatattttaacacaagtttcaggaaacttggttttgattgttcacatttctattctaaaatctcaggttatctcctgaacacttttgggcagatgaagttttataccaaaaaatagttcttagagtgaattttaatttacatagaactcaatcgaaatgaagatttaataaccagatttctttctccaaaacatacacaatttgttattttagtaaatacctttttttttttttttttttttgtggtggagtcttgctgtctccccggctggagcgcagtggcacgatcgcggctcactgcagcctccatcctctgggttcaagcaattctcctgcctcaggctcctgagtagctgggattacaggcacgtgacaccaggcccagctgatttttgtatttttgttcatttgcttttgtttttgacacagagtctcgctctgtcgcccaggctggaatgcagttgtgagatctcggctcactgcaagctccgcctcccgggttcacgccattctgcgtcagcctcccaagtagctgggactacaggcacctgccacgatgcctagctaattttttgtatttttagtagagatgaagtttcaccgtgttggccaggatggtcttgatctcctgaccgcataatccacccacctcggcctcccaaagtgctgggattacaggcgtgagccaccacaaccgacttttttttttttttttttttgagacagagactcgctctgtcacccaggctggagtgcagtggcatgatttcggctcactgcaacctctgtctcctgggttcaaacgatcctactgcctcatccttcggagtagctgggattacaggcaggtgccaccatgcctggctcatttttgtatttttagtagagagggcgttttgccatgttggctaggctggtctctgtccgtcctctgagctcaagctaagccatcatatcccagtgacctgcacatatacatccagatggcctgaagttactgaagatccacagaagtgaaaatagccttaactgatgacattgcaccattgtgatatgttactgccccaccctaactgatcaatgtactttgtaatcctcccacccttaagaaggttctttttaattctccccacccttgagaatgtactttgtgagatccacccctgcccgcaaaacattgctccaaactccaccacctatccccaaacctgtaagaactaatgataatccaccaccctttgctgactccttttttggactcagcccgcctgcactcaggtgaaataaacagccatgttgctcatac

SEQ ID NO: 5927 - DNA, 1231 bp, Homo sapiens
cccccacgtggggtgccctgggccatggggacccccccccaccctcttgtctttatagcccccatttcaccggggcccaagagctctccaaggcagaaggggttgaaggcaagcccgtgactgtcaccagaggccatgggcacggcaggcgggcctggccaccctgtacagagtgtagcagtagggagtctctcaccgtcgcatggtcctccccagagcatgccgaacccaggagtctgtctcactgtttatccaaacaccaggaaaggtcctccctcaaaaaagcatatctccacttctctctagctgtatctaacccaccgtgtgaatgaactgggagaggggcatgctccccagctgtgtgtagtcgtgacttctcaacaatctagcaccatgtcggacacgttccccatccaccctcctagctctgctctcagagctaggcacatgggcacaggtcccctcccgtctgtcctctcccagcaactgtgccctggagggctccacatggcccccgtgtctctcgggcaccacccatatagcagtcccagagggcccatctgtaaagatcgagcttgtgtgtggtgtcgtggtcacatctcccgcttccccccatcctgtgtctgggcacagttcacatcaggacagcgtccattgtgctctcagtctgcctcaggtgtgtgcctggagggggcctggactggcatggatccagtgtgcagaagagccagcagggaaccggaagctctgatgtcaaggccagagcagttgagaatgggacccagagtagatgctgacctgggcactccaccattccggggccaccacagagatgccagcaggatgccactttgccagcccgacacacggacctttgtaaagaacagcaacaggcaggagaggcagcgtgtgaccagattgtgtcccgtcattgggtggcatatgttaactagctgccaaacaacttcaacccgtgtaattcatgtacatttgcaacagccagcccggtacagcctgtgtgacttctctgtatgtgtgtgtgtgtcgtgaccagcctaagtagttagcataactcaagatgctgatgtgcagtcacccatcagagaaaataaaaatggaaaccacgttcacagcattttaaaagtttttactttttttcttgattatggaagtaatccatgtacatagtaaatcattttaaaagtacaaaaagtatgaagaagtttgtctt

SEQ ID NO: 5928 - DNA, 881 bp, Homo sapiens
agcctgttcttggtcttttccagtttatcataagcggccgccttctcctcgtactgctgggtgaggttctcgatctccttctggaacctcttcttcccctcttccagagcttccacggtgctggcaaagtcctgcagcttcttcttcgagtcggagagctacaaggacagcgtccagggtagggtgagagggggaccatgagtggcccctgtccctggccccacagactctgagaagcgaagaccatgtctcctcgttggagaaacccaatagcaggggaagctggggggtcaagcaccatcgcaccaacactccaccgcgatctgcctgcgggggatctcagcgcagagaagttgagaggacccatgaaggaagcaaggacacggggcaggcacctggatgttgagagtggagatgtggcgctccaggttctgcttggcctccatctcctcgtccagctggtcttgcaggctgttccgctcctcctccagctggcgcagcttcgtagacacgttgagcttctgccgggtttcttcttgaagcagctcctgcaaaagggatgcaaagaggtcccagggacctgccccgaggaaggccaccccccaggtcccctggatgatgtggcaggacactcacctgggtgtcctggagctgggaactgagggacgccacgtccttggccagcttaatggccttcccctcggcctcgttaagcatccctgtgacgctctcaacttcattctaagggtgccaagagactggttagtcaaagcctctagaaggggatcctcgttgaaaggagccctttttactcaaaacacatgggctagtacttgaggtgttcactgattgagaaaatacccgtgaggtatgggactctg

SEQ ID NO: 5929 - DNA, 1792 bp, Homo sapiens
gccccagagctggcatatctggtcagaactgcagggcctatatgccagcgcccagggaggagtcagtacccctggtaaaccaagcctcccacactgaaaccaaaacataaaaaccaaacccagacaaccaaaacatattcaaagcagcagccaccgccatccggtcccctgcctggaactggctgtgaagacccaggagagacagagatgcgaaccacccaaaacacgcacaccctgcccctggtgccctgagacagacacacagcctcacgcccccaggaatgcaagtggtttcctggtgcttcccacggaggagttttggcagccagacttctggaggaattggttgtatagaagatcctagtgaccaaattcagcctactgcctcggatctctccagccgaagtctgtggactgcaagtctttgagatgcttctggctcccatcacctctaacatccttgtctgggtctaccaggaacgcttcatttccttggggctgcagttttgtggttgaggggcctggagaaaatcattttctccccttggcagtgtcccagggccctggatggtcctcttaccaacatctggtcttccaggcactcaaaagctgggaaccagcatctcagcgccagctctaccagttctcgttttgggccagaggcagcctctgcactcccacgcctgtcctcctggaagggacctggttggactaacggctaacctggacctggaactgtagggccaggggattgtctcagggccgacgttccacctggggcttccctccccacccaccccgactccaggctttcccttttttcttttgttcaacattgtaagaacaatcaatgctgttattactgttcccaccatgattgatgtggggtaaatattaaggagatggcctcatgggaatttgaccttgactagaaatagagactgagagtgagcaaccagctggaaggtactatgccagtcctagcagaaaaatgtgttaggggcctggcccaaagcagtgttggttgcttacagtgttgattgattttgttcttttttcttaccacctcttttctttccctctcatggtacctgctcatggttatgaagctttcaaagtaaagaacacgaaatacctcccaagtattaccagtgggtaccaaaaaaatgtccccttgagtcttttccttgtttttagatgttaattctctcccttggcatccggttagccccccagggggggcagcattgtggagaacttgatatttagttactgatgctcttccaggacacgaaaagaacccatctttgaatatcaatgattttttttttttaagtactgttccggggagaaaaacagtctcaaaacttgaacttcttgggaatagaagtgttgggctgagaagtaacattcccaggaaatagtgagaagctcgccctgtgtttgaaaccgtgttggtctctgtgttcctggaagaaaacagggaagcagcatcttttaaagcctgttctttaaggtgtctcgttagagcccaaagtggaatccggaaggcagccagagctgaggctgccccaagactcagacttgctaagaattacgccgccgacttcaaacccagagagcatctttcttttaggcgaaaacgcatatatttattttttgtaagttataccattctttcacattagataaactaagttttgggggatccttttgtaatgacttacactggaaatgcgaacatttgcagtaaaaaaatatatatatatctatatattttatttctttctaa

SEQ ID NO: 5930 - DNA, 511 bp, Homo sapiens
ggaggaaggggacagttgcagtctcacttgggacaggccacagccaggggtccggccactacccgcccgtgggataaaagccaaaagcatgcgtcagctaacttcagcctgtgctgctgggcccgcaccccatgtcccttgtcactgtggcatcctgcacccatcctcacccctccgtagagcccctcgtgcaatgcaatgaatggaccctcctgtcactctgctgaacagaatttattttctgagtcaaatataatttattattatttttgtcaaagaagtatttaagctgtgctgtggtgtgagaatgtcattcttgatcttcagccttcgtttgcaagaagagttccagttgatgtggtgtttggttccatggcggggtaccctagggattcatctgttttcttcacttccctttgcatctgagatcctgctggaaaccacggcaacctgtatccactattaggaggtaaaaatcaataaaatggcccattcatttgtgttgtagctc

SEQ ID NO: 5931 - DNA, 1332 bp, Homo sapiens
ctagactgagcgtgaagatggtgctgcctgttgcttctaagctgacctagtgattctgctgagcctacagagtctacctgggttttgagtggacatttaaaaatatatttttcttgagtttaggcttttccatatgtgcagctgtgtttacctaacccagcccttaattagggcttcagtgacttagaaaagcaggggaaacccaaggctttgcctgcagaccggccactctgtgacaactctaccaaaaaccaacaagccattcaagcttttacaagaatgaaagagcggagacggtagtttagtatttgagccacgagtttatgtgcacaagtgttttgggttgtggactgaagctcagcctgttaatcagaccagcccatgagtgtataacaaacagaattggaggctggtttcttaaacacacacgtccacattttttagggttgttttcctgtgcttacaatttttaatgcatgtgcctttatttcacaaaacatgtggctgggcgcagcggctcacgcctgttatcccaacactttgggaggccgaggcaggcggagcacctaagttggggagttcaagaccagcctgaccaacgtggagaaactccgtctccactaaaatacaaaattagctgggtgtggtggcacatgcctgtaatatcagctactcaggaggctgaggcaggagaattgcttgaacccaggaggtggagtttgcagtgagctgagatcacaccattgcactccagcctgggcaaaaagagcaaaactctccctaaaaaaaaaatgtagaatatctcttaagatttccgttatggtaaaaaccatatgcaataaatacctcattgtaagcttacccaaaattgatagatgtcaaccttttaacagaagaacagaagtttaagttattgtttaatgtaatcagttttcattttaatatctttgaaatctttttcaaaggactgtagttttgtaatggacttttcaagccttccttccattgtttttcttccgttcactggctccacacgtttcctggggagtagcctggaatttaaagttgggtgcaggttttagaaagctgttgctgttaacaataattctcccggccatctccactccactactcaaaaatgcctgaatccttgctcagaggagcaaaggtatcttctcgtccctttcttacagccattttcttgcttttccacaaagatattatttaaagtggaatatttttgtaactgggataccaatgagcttttcggtcttttcctgacttggtaaggtttatgggtttctaaatctaataactacagtcataccaccc

SEQ ID NO: 5932 - DNA, 1870 bp, Homo sapiens
agtgtgtccagttttgcctgtctataaaagatgatagtaatttaccaagtgacatttgcagagaaacaggtgtacagttatcgttgtacttttgtacaatgtgaattttgttaataaattataaggtttgtttttttttttttaaactctgcagtgttgatttttctctgggttgttttttctgccatgagaccaacaggtcaccagccttgttcaagttacagcaaacgaagctgggccttgtttggtctcatacttaattttcttttatatacatgtttttcttttacatgcatatatatatattttattttattttatgttttttggagacagggcctcgctcttttgtccaggccgggtcacaactcactgcagcctggacctcctagcctcaagcaatccacccacctcagccttccaagtagctgggactacaggtgtgcaccaccacagctggctaattctatttttttatagaggcgaagtctcactatgtcgccaggctggtctctaactcctgggctcagtgatcctcccgtttcgacttcccaaagtgctgggattacaggtgtgagccacttcaccaggcccattttctcctaaaacttcaaggacaaatcattaataatgtaacaggaatctttaggagaaaaaacaatttggtttactgataacaaaagataattggaaacatgagagtatttgagattggccaagcagaactatgaagtccatcaagtaagtcaaagatcatcgtttctgttttgaattgtgggtgataatgggtgggagagtgctacagtctgtatgtctgtgtctccctagaattcatacgatgaaatcttcactctcaagttgatagaaggtggggcccttgggaagtgtgaggtcatgagagtggagccctcatgaatgggatcagtgccttatgaaaggccctagagagatacctcatcctctccacagtgtgagacttcaaggggaagtatgagacttctctgaggaagcagacccttcacaagcaaaatcagccagcactttgatcacggacttcccagcctctaggactgtgagcaataaatgtttgatgtttataagccacccagactgtggtattttgttatagcagcctgaacagactaagacgggggtgttgcttccatcaaaggatgtactaagttgtggattatttgtgaaattgaattacaaccttttccttaaggtcttttaccacctcccccccaaaaaaatcccccaaaactgattcagattttcatactttaatgaaatattttataatttgcaaatttttaagtaatttatgaaaaacctagatcagtggatctcctctctggctgcccattagaatgtcctgtggagattaaacttttttttttcagtttatggaccaagagttttgatttatttagggtggagttcaggatcagaatggtttcagaagctcccaggtgattccggagtgagttggagctgcaagcccctgagctagattataagatgcttctgggaaagaaccacattttaggaatttgcttcccacccagtgccctgcatttaatcagcacctgatgacttggcaggacttgccccaccagggtctggctttgaagggtagtggacaccaggatcctttggattaatcctctgccacctctctcttttcctcaaccgagagtgaatttatgtaattgagtgaaagtctacgaatcataattgtaataaattaaggctgggcatttgtttgaaattagataggataaagccaaaggtttgaacaagttgtggatggtttgtaaaaattaatcttacaaaataaatgctgtgtgtgaacacgttgattaaattc

SEQ ID NO: 5933 - DNA, 5561 bp, Homo sapiens
accctgacagcacccccacctgaccaaatgctcctaaagcctttcccactgggtgggggtgggaatggcggtgaagccagttaaatgcaagattgcagaaggcattggaaaatttggtggctgccacaagctttagtggcttaaatatcaccttctcgcttcacagtccagtataatatgacatcttcacacccactagagtgtcctgggcaaaccatgggaagacatccaacaggagacccaagaattggttcaaatattgttctgtgtagacggattctgtagaaggatgtggcttttagagaagtccagtagaagaagcaagaactagctgcagggaaagttccttctgtcggtttttagacacagatctctctgcccaaattaaaaaaaaacaaaacaaaacactaaagtttttgacacaattacttgctaggtactgggttcctgattgtctttaaaaagaaaaatctgaatctttatttgcaactggaattgaagttctattttaggggctaatgtttagaggaacataatttccactgttcaaattaatattaatgtatttttaaaatggtgcaatcacaggtgtttgacaagattgtcaacaagttaagtcacatagatggaaaggcaatcgagagttggttagagaagcttccagagaaaatagcactttatattgatcaattcactcattttgtggtaattgctagcaccaagcattgcatctgaaagggaagccagttatatttattattaaatgtacaaccttgaaaagcagccagcatgcttgcctaactaacatcgccgcaggccacaagctgggatatgtacctgtccgtcaacatccattcattaaactacctactaccagccagagatgtctggaaccaaagtagcaaccaaatacatattcaagacaacactggtgaaggcataaaacatgttggctttggagaaagatgtgttttaggctttgcctgtaaaggtgtttctccaaggctggctgctggctggagacagaaaacttttttgttttaaggtttttagcaaactccttcacaaagagatttctttctgagcttaatgagctaatgaagaggaaatgcctgctgcttagcatgtggtttgtgctgggtctctaaccattgatggttcttccttgtccaggcagtcttacgtggtccaagagacctgttgattcagcacaggtcttgcaaaacatttcacttatagttcagtatcttgggctctgtgcttgaagatcagttactccctggtcgtgggcagaggagacaaattaggaaaagagcaagggagacagcccttgacggcagtctgtctcttttctctttaggtgtcagtatcaccaggttgggtgtattttgcagctgggaggagccggtcctggaattcttccttgttctcccaaatttataacagtcctcaattgcagtttaagttcagcatggcccctcatctgcttgcctgattggaaatgcagccagtccaagtgttacaaattgggatttttttgttttctaaataaaaacatgtacttcctcagactcttaaagctaaaatttggaagacagaaatgcctatgtgaatagaatcattgttgaagttctgagctcttttgagggaactctataagccttctttctttaggggatccacttgcctgctgtgggaaatcatagtgagtgatttacaggaatccttctcctccaagctgcattggcttcttatatcctttgcgaccttgggctgaaagagaaacagctgcaaatgttgtgctgtctctttgaggttgtcttggggacagttccccgcaaaggtcattcctagcttttgaggtcaatgttgggtcataaggtactgcattgtgcaaagaagtcagtctgctaactttatgcaaagatagaaactgcacggtattttttaaaattagtttttaaaataaatgccaagagtagatcttatatatatatatatgtatacatattttatatatatatatatttccatactcaaccacaacttcctctgtactcattgtttactacagtgggggacatcaagggttggaaggattataaagctttaaggctgggcgtggtggctcacgcctgtaatcccagcactttgggaggcgaggtgggcggatcacctgaggtcaggagttcaagaccagcctagccaacatagtgaaactctgtctctactaaaaaatacaaaaattagctgggcgtggtggcgggcgcctgtaatcccagatactcgggaggctaaggcaggagaatcacttgaacccgggaggtgaaggttgcagagagccaagatcacaccactgcactccagcctgggtgaccgagcgagactccgtctcaaaaaaaaaaaaaaaaagctttaaaaagctgaattttagaaatatttctagcagtgtcagtgagttcctcttttaatagtgttttaaagtataaatctggtaacatactgttcttgtagttttttgttagttttgtttttcaggttaattacccaaagcctcatccatcctcaaggtttttaaattttatttttttaaaataaattgtgcattgtatttgtgaatttttaaaatattactgttttatttaaatgccatgctgagcaattgttctctgtacatggtaaccaaaacttagagatttcgatcaattttgatcaatgtttagtaaaccaaaacatgtactgtgtacaacggaaataatatggcatattagccaggcatgatggttgcccaagacagttaaattaagctcaattctgtattttattagggctctgttatgtccttcatctgaaatgtacacatttttggtgtatgcttggtactggagattcatatatgcaaatattctcatgcaagaagttccacagtaacaacagcaaaaagaaaaaattagttgtccagccagtgctggaggaaaatgtttctggggaagatgactcagtcattttgtggcgagacaccctttggtaactcccactgaccagtcttgggagccttcctggaatgatcgtgggctgagcggagatgttttttgcaaaatgaaactgaagctgaaagaaaggagaattcgagtgaaccaagagaaatccaaagacctggggaaggaggacttaagatgaaagtgaagcaagagagggaaggggaaatgaagtgaaaatggcgtgagggtgtgagagaggtttgggttaggaaacatgtttttagtgctatttccaaccaggggtcgcaaactcagcagcctgtagaaacaggggtgggaggtgggggggaagctgtgcccacctttaaagagggggccattgctcagccatgcagaaaaaaatggggcaacaagctggaaatcaggttttttttttttaaagtgaaacttgatgatttttaaacaagtaattaaaaaaatgtccaaaacaccatgtgggccaaacatttgtttgagcctgggggccaccagtttgcgaccactgccttacgtagttaacaccctgagtatgtatacagtcatattttttgttttggatatggtagtgttatatatacttgggggcgtgatatttgaagtcatctttatctctcagagttaagctttattgtagaagaaaaaaaaaaaagttaacacagccatagataacacttaactcacagttcccaggaggacacttgatctcgaagctgctctttttgagtcagatcctacatcaaaccacttagggccagtttttggcatttccttcctggtgatttggggtaaacttctttgctctgtcggagtttgcagatgagtaatcagaaggattgcagaataacttgtttctttgtattttattcttacatttaaattaattttggggggttagtggtatcctagctcgtgcctttacagggatgattggtggctagatttggggtgcaagcttcttaggctcataccatttcaactaccaagaacacaggtttttgtttttgttttttgagacagggtctcagtctgttgcccaggctggagtgcagtggcaagattgcagctcattgcagccttgacctcctgggctcaagcgatcctcctgcctcggcctcccaactagctgggaccacaggtatgtgccactacacccagcgaatttttaaattatttgtagagtcagggtctccctatgttgcccaggctggtcttgaactactggactcaagccatcctcccacctcggcctcccaaagtgttgggattataggcgcgagccaccacacctggcctaaaagcgtcgttctgatcagacttcacccctgaatgtttctatcattttcttttctttttttttttttttcgagacagagttttgctcttgttttacaggctggggtgcggtgggatgatcttggctcactgcaatctcctcctcccaggttcaagtgattcttgggccttagcctcccgagtagctgggattacaggcacctgccaccacgcctggctaatatatatatatatatatatatattttttttttttttttttagtagagatggggtttcatcatgttggccaggctggtctcgaactcctgacctcaggtgatctacctgcctcggcctcccaaagtgcagggattacaggtgtgagtgagccaccgcggccggcctctatcattttctgactcagcagctccaccaaaattgacatcctagcaaacactgtgaaggaattaacctaagtgcttccagagcatctcatgtaacctctatggagtaagtcactttttctgtaacatgtggcttttgaccttgatgaagactttgacttctcatccctgtctacatggaggaagatgattcagtggtggggaaaatgaacctcggtaacatttccaatgtccttcaagagggaaacaagttcagtgttatcatcgtggcattcgttagtttttttttttttaaatcacttgtttagatacaactttatttttttatacctacatagcacatgactggggggataaagcatgtataagttgggagagggtaaagaatgtgtgactatgtatacagaaaatagactaaaatgtgcagcaaaatgatatatactgtaatctggtttttgaagtatctactattctggaatattgttaaacaactttttgcttttgaaaaaaaaaggtgccttgattcagttgcgtgacttagaacattcatcctattttattgtgatttttaatgtcttctgaccccaaactgtgtttttggttgcagtctggcggctgcaggcatagcgtcggttttgttccaataacagagaccaaagagttaatcagatatggttcagctgctacaattgtatgattcaaaggcaatttaatcaccccaaatttccatggcccccacagtcaagacctgccattcgttttctcttgcaggttggagtaaatttgcactttgaatcatgtgggtcatttggggaccttgttcttttctattttgctttattaataaaggaacttgtagaaac

SEQ ID NO: 5934 - DNA, 155 bp, Homo sapiens
gggctgcagggaaggcagctttcatttgtttaaaaaaaaaaaaaaaagacggaaaaaaatgtgtcacatactattacatccacacctgcatacacactcgcaacatgtctacacacgtccacacacacagacacacagataccccaaatcctctc

SEQ ID NO: 5935 - DNA, 790 bp, Homo sapiens
tgactcttttggtaaccagacaccaatcaaataaggggaggagacgaaaatggaatgatttcttccatgccacctgtgcctttaggaactgcccagaagaaaatccaaggctttagccaggagcggaaactgactaccatgtaattatcaaagtaaaattgggcattccatgctatttttaatacctggattgctgatttttcaagacaaaatacttggggttttccaataaagattgttgtaatattgaaatgagcctacaaaaacctaggaagagataactagggaataatgtatattatcttcaagaagtgtgtgcaggaatgattggttcttagaaatctctcctgccagacttcccagacctggcaaaggtttagaaactgttgctaagaaaagtggtccatcctgaataaacatgtaatactccagcagggatatgaagcctctgaattgtagaacctgcatttatttgtgactttgaactaaagacatcccccatgtcccaaaggtggaatacaaccagaggtctcatctctgaactttcttgcgtactgattacatgagtctttggagtcggggatggaggaggttctgcccctgtgaggtgttatacatgaccatcaaagtcctacgtcaagctagctttgcagtggcagtaccgtagccaatgagatttatccgagacgcgattattgctaattggaaattttcccaataccccaccgtgatgacttgaaatataatcagcgctggcaatttttgacagtctctacggagactgaataag

SEQ ID NO: 5936 - DNA, 2133 bp, Homo sapiens
aatggggggaaggattattattcatgttattttccctgcccaagactttatttaaccctggactccgtttacacagacaaagtgacatcagaaggctgagcacttatctggatcatttggtcagtttggtaattcctgctccacacccctattttcctcttaataatacgtttgggtgaagacaaattagtgtttagtaattgcatcatctctgtgcttacctatacaaacataagtttattttatatgcccagatgtctacagagaccctttttgtaaatgtcaaggacatttggatttacttttacagaatattgaaaagataagacaaattataaataagttctaaaacataaatttaattcatctctgcatagtgatttttgaatttgattcaaagggaaattattgcagaagaatgcctttccctcattttataactttaaaaacttggattaaccactcaatgtccactttctttgacttacagtataaccatgtagccaattgtggcccactaaaatctacagaagttaatgtgggtcaccattttggtcagaagcatacattcctgtcagacaactagttgtctgacagaaatgttaggcttcatgtatgttaccccagtactgttagaaacatttgtactaggttataagatctttctgtgacaggtaacaaatttggggaagacagcacaatcttcttgaatgtagctcttgggaatgcattattacatccatttctgtaacataataatatgttgcatgcagttatattttctatttagtctgtatattttgttcttcatagtctgttttttctagcatgcttgatttaggagagaataaagggctatataataataaatccagatttccggataagaatattgcctggttaaaattctgcattgcttaaagacacccatgtttaagatttttcatcactaacatatccattaaaagtatcaactggccaggcagggtggctcacgcctgtactcccagcattttgtgaggccaaggtgggtggatcacctgaggtcaggagtttgagaccagcctgaccaaacatggcgaaaccccatctgtactgaaaatacaaaaattaggcatggtggtgcatgcctgtagttccagctacttgggaggctgagacaggcgaattgcttgaacctgggaggcagaggttgcagtgagctgagactgtgccattgcactccagtcgggttaacagagcaagacactgtctcaaaaaaaaaaaaaaaaaaaagtatcaaccaacaaatgttaccaagataacgtgacttcatgagggagaatgtcactattaatttatcataccatttccaaaaagggctttgtgcttttcacataaaattgagacagtgtatatttaatctaatttaaattttaaagagatactggtattttgaaaatgcaacctatatatattcttaatatccttttaagaatatggagatgaagattgttttctccaattttctgtgccattttaaatttaactttgacatccagctatagacagaaataataagccaccctgggtgtaaacttgattttctttattgagatgtatcatgtattgaatgagtgaaccagaaaattagaagatggtcaaaaaaagtccaagttaccaattttttaaaatttataggcaaagtatcaaattgtcttcttaatatgataaactgtgctttatcattctgaaaactcaggatacagcttattcatagcattgtgggtctctccagtaagaaagatgctaaaagttttgtgcactttttgtgtgtgtaatgcaaattagttaaaacaaatagttttggagaaagttaaaactagctttagagtaaggatgagaaacttgagtgtttttaatttaaagataaaagcctgtgttttacacattcttttttggtgttcatagcttcttctcatacaggtgccagacactgtttgtgcttttgatggatttttatttatatactttttttgcttatttttactttgagtggaatgttcattaatgtaaattgtatttatttttatacttttattttcactagttttgcttctaggcaaaaagcaaaataaacttttcatcttaaag

SEQ ID NO: 5937 - DNA, 646 bp, Homo sapiens
cccccgggcccatccccaggctcagggactctggtgccaaatccagaaagatctgctctgctgccctgaactcttacggcaatttaggtttctcatttttcttttctttttacatatgtacaaattgttttaagctttggcctctatccaggttattctgacaatgaagaaatgggagttgtcagagcattaaaatgcaatcttcactaagaagcagtctctgtgttgtctttgcacaagtggccttcggtctactcagcccgatctgatgggcctttttagcaagagagaaacaagaatgcaagtaacatctttcttctctggaaggtgtttgttttttcatagtttagaaataaggactttaaaagtggactgcttttcaaagtgccactgttccagacccattccattccagactttgtaccttaaagttagagcacacccaaagtctggaactgtgttacctgaacccctatggaggatttataaaaggcagaaatagcactccattaactctttttcctatcaaaagcagctcttgattggacttagaatctgtgttggtggatcaaaggagaaagcgaggtcaaatttgagattctctgtggcttcagtatacagtaactgaataaatgtcctgaaggag

SEQ ID NO: 5938 - DNA, 987 bp, Homo sapiens
ccatagctaagacgtatctttgcccattcgagcacaagttaccttgtgcaaggaaaatgtccaaatgatgctctctctcttgtgatttctttaacaagacttggaacatgtgcaaatggaatcttttctgtacaagataggattcattgcaaacaagctttaatgcaaatagtttagaaaagaaaggaccagtcttcactttctgcattatccccacattttattcattcatccagattacttcttcagtgcctcaggagtattcttctacaccagctgctgttaaaatgtacaatgaactctagtcccaaggaatacagaagtgctcttattaccagttttcccacttgtggccgcctttgcaaagatccatattctaatttaagtccccaacctctgaatttggttttaagtttacctagtgactgactactctctttataaaaaagaccttatacttaatgatcatttccaaaggagaccactccttaacttttactgcaaacccaacaagatgagacacttaaacccagacagatgtaacaaaggatttttgttgtctaagtcccaaagtattatatagaaagttcctgcttttatgggtaaacttattaccttaatatgttctgtggtttgctgttaaccaagattctcccatttaaaatgccacagaccgaccctcaaggcagatccgaaagcctagtagttagttgcactgggttgttttgacaagctaccacacgtcttaagtaaatagtaaagcctttatttttgtgttaagaacagcattttgaaaataaaacctatctgcccatggtttacagccttttaaatttgtaatatttatatagtcgtttatggtacatattgattgtcttgaaatttctttaacttcttttttataagtatgcaacagtcagccgggggaagataaaggtacattataaaacacacattaatgcatttaataaatatatattatctatc

SEQ ID NO: 5939 - DNA, 529 bp, Homo sapiens
ggtgcaccccaggaaggccccgtagacctccgaagactccacaagaaactaatggatcactggtcagtccccatggggagcatcatctcttcgaccctaaagatgtcaaaggtgtgcagcttccaaacggcatccccaggatcactgggcaatgctggaaagagcaaaagaatatcattggccctgatcacatagatgctgcgccgcctagcaaatgcttggtggttcgacttctccctctgtctgggggcaggctcagcatctgcccactggtctcactaagagctttcagatttccctccataggacaggttaccatagacttggggcacttgtgggtactcattttctgccagtgggaatgtaaaggcttcatcctttgtatgtaaccatttggcaaaagtatgcaggaacataaaataaaatatcctttagctcagaaattctatcttcgggagtcaccacaaaagaaaaaaatcaaaatgcagaaaatgtgtggtgcactaagatgatcacacagcattaaaac

SEQ ID NO: 5940 - DNA, 991 bp, Homo sapiens
gacatctaagagacattcatttggattcccctcttctttctctttcttttccctttgggcccttggccttcctatgattatatgagattctttatggaagaacatgaatataagttttgtcttgccttggttattagcacaaaactttaccatgttagatgttgaaagaagaaagggaaggaatgagagagagtgaaaaggagagggtaacagaaaaaaaggaaagaaaagtaagtcagggaaatattaaaactgcaagggaaagcaattgaaaaagaaataaagtagggaaagaaggagagaggaagcaagggaaggaggaagaaaggaaagaggagatgaaagggggagaaaagatagaagaaaaataattgaagggagaatcagaaaaataaagagcagaaaggaaagaaataaagagagaaagagaaagaagaaagagcaaaagaacacaagaaagaaagagagggagaaagagagggagaaagggagagaaaaaaattgtaaaaataaaaatagtaaaagaaactgataaagaaaagtaatggaagacaggaagaaaagaagagaaggaagtaaagaggaaaacttataaatattcccacagatagacaaagtcaagcataaaactggagcttgagaaggaaatgaaaggccgtggcaccttcttataccctagaagaagacctccatacaggaagacttgtgtgtggggttgggacattagaatcatccacaagtcaccccaaaccttggaactgtcagggtcagaggggaaccaccatttattaagcatttgccatgtgccaggcactaacccagatgcattataaataccacgttgtttcacctgtgtgtggcatctacagaccttagatcatagctgtgagaacaacgtaagcactgccaaagttatcagctacccatatctcatgtttttgatgttatctactcttcctagaatcaaatattaaaataattttaaaaccaa

SEQ ID NO: 5941 - DNA, 184 bp, Homo sapiens
agttgtttcattaattaccatatctataaaacaaacatagtatctgtcaatctctagaaaccacaagatgatggagaggtcataaaaactgtggtagtatgcttagaaactgttgatttaaaatatcttgtggttatgatatcagaggctaaattttgaaataaaatatttggcaaattcctcc

SEQ ID NO: 5942 - DNA, 65 bp, Homo sapiens
tggtgattccattttacttccatgatactttaatttttataaatatgtgaaaatgattagaaatg

SEQ ID NO: 5943 - DNA, 184 bp, Homo sapiens
gtcggcctgccatgtttccatgtgccatttcttaccccttgtaggcaatggcaaagaatgtggtcaggctgtagcctccccaaccagcagacagctttatggaaacttggtatagcagctaaaagagtttagtttgtttatatggcatgtataagttttcaataaatgcctaaagttcaagcat

SEQ ID NO: 5944 - DNA, 888 bp, Homo sapiens
tctagaggaaagtttatttctgcaaatgatgagccaactagttattgaatgtaaaccagatggcaaaacacttcttgattaggggcaaaaattcaaatgtcttcttaaaacctccacaattgattctccccctgtgatgtaaacttagatatccctagagtttctcagcatctttcttcctgagtggatggcattatccctagaggtcatggaccttacatcctcactgcagtcacctttggaaacaagaccgaggcctgtagaaggaaagcggaaggatgtaagagctgttcatgggaattccattcaccacacatgccagctgatgcaaagaaatttgccagtcactggaagttactgtggctactataaaactatgtaccactctcagaatattcttaggctttttttttttcaagttatagatttgcttaaagtgaggttttttggtgtgtgcttttttgttgtcttttgacccttccagtttccagacaaacttgtcttaaaaagtgcatcattggattgaccatggtttttcatgaaattttatgagatttctgccttaacaaaatgcatatattccttatcttaaagcctgtcattacttaggatgcacttataggatctgaaaagctcactttaaactcatactacattcgttacgagtattttacgttaacataattgaaaagtacaaggtccaagctggctttcaaattatgtctaaacagaaatgggacaaatagacttgaaaatagaagggatttattccacccctgcaagggtagagtcaggtgagagtcccttggtgagtcatttgtacatcagtgtcatttcttcttaacctctgaagaagatgggcatcagaaataaagacaaagcactatc

SEQ ID NO: 5945 - DNA, 1053 bp, Homo sapiens
gtgactgctcagaggccgggcttcttttcaagtactgctggatcatactcaccccttgggattatggcttagaagaagggggctgggtaggcaagcactccttggctgtgtcctctcgctttttcacttacttgtaggatcccgcagcagccaatttagggattgtgttgttcttgtgttggttcccatgtaaagaagcagcagagaaatgcgatggttcaacagctcgccctgccccaagtatgcagacttgaccttggcggggtcctgggcttctagagtctagcccgttgaccccaaagcctcagggcttatgtccaacggtcccattgggagcaacagtgattgtttatagttttttgttttcagaaatgagggcagctgttaattttttcactcatgtgaaacaaaatgaaaaaaaaaatccaaaacagaacaagcccttctgtggtatttgctttttatcagaaagaacagcaacatttggcctctccaagttggaaaatagagtccaaatgtaactttgtggccaagagtattttcaaaaaagtctaaaggtgtagtttccactgtaactgttgagtactgttaagtactgttaatcttttacatatttgcacttggtactgttgtattgttctaaagagcttgtcctttaagtaatttctttcttttttttttttttttttttttgtgacggagtttccctcttgttgcccaggctggagtgcaatggtgcagtctcggctcactgcaacctccaactcccaggttcaagtgagtctcgtgcctcagcctcccaagtagctgggattacaggcacccgccaccgtgcccggctagtttttttttgtattttttttagtacagatggggtttcaccatgttggtcaggctagtctcaaactcctgacctcaggtgctccacctgccttggcctcccaaagtgctgggattacaggcgtgagccactgtgcccagcctaagccatttcttaaaataaaaatgctaaaggactagtaagtaaaaataaaacttcctatgggatttccc

SEQ ID NO: 5946 - DNA, 1609 bp, Homo sapiens
tggagagttttggcctggagcattggggtgatgctgtggcccgctggcagcactccaggcggcaccccctctttacccaatgccagaccactgggaatggattctagggcatcggaaatgcctacctgagagagagacccaaactttactctgggaggtaggctatgcccatccaaataaatctccatgagaaacttgaggagacttcataacaagaatctggcatttctcttcagttatcttatatgtacatataattgtttttgtggttgttttgttttgttttgttttgttttttggagatgaaggtctcagtctcttacccaggctagggtgcagtggtatgatcatagttcactgtattctcaacctcctgggctcaaatgatctcctcccacctcagcctcccaagtagctgagactacaggttcacaccccccacacctggcttattttgtatgttttagtagaggtggggtcttgccacattgcccaggctggtctcaaactcctggcctcaagcaatcctcccacctcagcctcctaaagcactgggattacaggtgtgaaccaccgtacccagcctatctttttgatacttttgaataaagaaagggtcatatgcatgacaggaaaatgaaagaaacttcctttacttttctatctctggatttaaaattataatctcatcacattatcctgctgcttgctttccgatctgtgtaacctgggaattccaattctttttctctcctgagatctatgactttgcctagtggtagagactagagttctttcctggcctgcggcttgatgcccaacttaaatgcatctaaccctttaacaaatgtgtacatgtttacaagtaatggaaatgcgtctataatactcctgcctgagaatagagacagagtggtggtggggagagtgaagaaagagatagaatacaggtggtacctgttgtggactgaattgcgtcaaattcatatgttggagctctaacccctaatgtgactgtaattggaaataagacctttaaagaagtgattaaggttaaatgaagtcataagaatgcaaccctaatcctgtaggactggtgtcctttttttccctttttttttttttttttgagatggagccttgctctgtcactcatgctggagtgcagtggcgtgatctcagctcactgcaacccccgcctcccaggttcgagcacttttcatgcctcagcctcctgagtagctgggattacaggcgtgcaccacaacgcctggctaagtttttgtatttttagtagaggcggggtttcaccatgttggccaggctggtctcaaactcctgacctcaggtgatccacctgcctcggcctcccagagtgctgggattacaggcatgagccactgcacctggcctaggactggtgtcctaagaagaggaagagacacttaggtggaaggcacacagagaggccacgtgaggacacagtgagaaggtggccgtctgcaagccgaggagggggcctcaggagaaaccaaccctgcaatcaccttgatcttgggctttcagcccccaaaggtgtgagaaaataaacttcggttgataaactgct

SEQ ID NO: 5947 - DNA, 264 bp, Homo sapiens
cctcccaagtagctgggattacaggcgcctgccaccacacccagctaatttttgcatttttagtagagaaagggtttcgccatgttggccaggctggtcttgaactcctgacttcaggtgatcctcctcgcctgccttgcctcccaaagtgctgggattacaggcatgagccaccacgcccggccctgcctcttgagctggggagttcaagaccagcctgggcaacataatgagatttcagctctattaaaaataataataatt

SEQ ID NO: 5948 - DNA, 2038 bp, Homo sapiens
acacgtggaggtcgaagtcttcagagtccgcaccctccgggatgtgcccttggaagagggtctgtgttcacaattacgtgaagggaggacccttggggaccgccattctaaatatcatgtaggaatttaaaaagccaaaatactaattatttctttgtagtgtgtaaaggaatgtttttaaaagacaaaaacccaactctttgtggatttttatcaactctttactcagagccactctccaatgcaggtcacactccaattatgatggaagatattttttatacttaattgcagtagggactcattcccagacaaagcaatagtcacgacttcatggaaccaatcaatggattgttttttgaagactggcaataaagctgtccattcaattccaaatactggttttaaggtatagccactgatattctttcatgtttagaaattctttctgttattattcaagaaaatgtttttaatcatgctaataaacttttttggagatgactttggcatcatgtttgaattcatataaagctcccctagcattttttattggtttggcttcaggagtacccaaatagtagcattatgagaatgacgcagacaatttgaataggggggaaggaaggcttcagacttgggggaaggggagattattgcaaattgcagtgaacactgagtcagtaaaaaaaaaaaacagaaacaaaaacccagcctcattcagatacagaacttcagggacccctccccccacccccccagttaatgctgctgtgaaaaatgcaaaataacctggttctgactttgtgatcactcatgtcccatacactgaactttgtttttttctggacaatctcaggttctcagaattgaaacattcagttttgtctactgacaaaatgcaactaaaaatgttttaattcaacttcttactctacacttatatacctctctcccagagcttggctcttccctgaaatccttaaaggagtttattatttgccaagaatatggtttgatgaagaccgtgtcagactcatgcattctggaatccgtgagtgcctccaaccataaacccagaaatgctgccatagaggaacccattagcaagatcaataaccatcgtggatattccaaagagcagagcatttaacccagaatctgaaatctcagtaataacagaaatgtcaatatgagattgtggttattaacaatatgttatcctcactactttatttcttttttcatccaggtgtttcattaagtattctcatttatatgctcatagaagtcatcagatcaacacattcactccaacacctgggtataaaggcgaattaaaacctgaagaattactttattattcattaagaactgcattcccacatcctcacaccaatatcttccactgttactgtgcagtcataataagagttgggttatgtgatttatgcaaaattgttattggtgtgttctaatgatttttttccaggaattcaagtaagtgaagtacaaatacttagcaccatagattgtaaaaatagaaagaggaaatgagaaaacttaatgtcgttcttgtacagttgagttttgcttctttataaactgtctgttaaaatcaggggttgctgttagactgtcaagcagaagtgatggatgttcaaggaggcaggttgccccaaagtgttttctaactttcaagtagagaactttatgctctaataagaaaaatacaactcattcttaaccacccccccaaaacagagaaaacacatacatttatgcattttaaagataaaaagtagtttctcaaaaaaatctgaagttctctgaaaaccagcttattaaaagtgctgttttgtggtgaaaattgaaaccaaatccactcacatttcctatcgggtcttgaaattcttggtggtgtgtcaccattccactagatggcagtgttgcttactgagtgtcaatggcttttttccccgtaaatggaatcatgtttttctcccccaaagtacaataaagctgccttgtctgcacc

SEQ ID NO: 5949 - DNA, 188 bp, Homo sapiens
gtggcctgagcgcatcgtcctgtgttgccccaagcagctggccaacatgtgtagagacaggatgctccagatggtgggacacccttccctggatccagaccctcatctagggcagggaaaccctggggccttgatggtgaaaatgcaccccaaatgaaaaataattattaaaaatgatcttgcaaatt

SEQ ID NO: 5950 - DNA, 174 bp, Homo sapiens
tactgatgcacacattacaggagagagctgaacgttctctcagcccagagcagcaaacacatgaaagtcagaagtctctaatatatcatttgtcttttttccagtgaggtaaaataaggcataaatgcaggtaattattcccagctgacctaaagtcaataaaacattctgttt

SEQ ID NO: 5951 - DNA, 4748 bp, Homo sapiens
ccaggaaaatcactgccggctagtcccaagcaaacgggctaggaggaaagattaaaaaaacaacaacaacaacttatttagtttggggaggggaagcatttttaagtgtgttgtaaaatcaaattttatatttcattttttgactcttgaaaaatgtctttgctccttggcagctaccagcagagactctatagctgtctcttagggcagtattttggggaagtggggcttgaagaagcagcctaatgaaccaacataccgttttgtgtgtggttttttttgtttgtttgtttgtttgttttgagacagagtcttgctctgtcacccaggctggagtgcagtgacatgatcttagctcactgcaacctccgcctcctgggttcaagtgattctcctgcctcagcctcccaagtagctgggattactggtgcacaccaccacactcagctaatttttgcatttttagtagagatggggtttcaccatgttggccaggctggtctcgaactcctaacctcaggtgatccacctgcctcagcctcccaaagtgctgggattacaggtgtgagccaccatgcctgcccattttgtggttctattttcatttttatttctttttttttttttgtcacgagatataagaaagtgctttttgccttgaatggacaattttagggctgtgctcactagtcttttcaggctggactgaaatgtcgggcccatggagccctgtgttttgtgcatcgggatgagaaatgaagcacttcacgctggctttcctaagtcacggggcgtgtattgccgtggcttagtgcaaagcattctttctcagagcatttagaggcatgcgtggcattttttcagtgggtgtgagattgcacaatacccaggctcccttctactgtggggaagggcctgcatgttggctgttttttaaacttctagttcaatttccttccataatgctactgattttctggcatacagccgaattccatcttttaagcatgctttctacggtgggcttttcaaaacaggtttgagttttgtatgcacacgtttactacctctaactcctacatcagctagtgtggaagagggtgcacctcaaagcttttacacgtaaggacagcggcttggaatgtgagagccttttctccaagcagacccacactctgcatctcagtggcagctcccacaacgtgactgcaatgtctcttatacagtattccttggtgttttcttagtgtctggatgttcttacgtgaaatctgctccccagccctggtccttggcattttctgcttgaagctgggctgattttcttgtaatttacagcaggacgctttcagcagcagtctcttgggattttatctaagatgtttgaggatgagagggcaagaactataaacactcattaattctagtagtctccccatggccagacaatggcgattgttatttaatgagcttttcctttcaatggaattcagctctcacattagtatgatttcatttgatgtttcaaatagcaaagatgctaggtgcggtggctcccgcctgtaatctcagcactttgaggagggccaaggtgggaggattgcttgagctcaggacttcaagaccagcctgggtaaacatggcgagaccctgtctctaccaaaacaacaaaaaaaagacagactgctttgatcaaccctaaatgcaaaagcagcctatttttctttgtttaaaagtcaaaacataaaaaagcagagtataacatacaaaccattcttaactattcattaaaatgggtccttcaacaccttagtggggtttgttgttgttgcttatgcagagagattattttctttttattattttataatttttgaaatagagatggggtctcactgtgttgcccaggctggtctcgaactcctggacttaagtgagcctcccgcctcagtctcccaaagcgctgggattacaggcaggagccactgagcccagccaagacttcagtgttgactgctttggaggcacaaacccatgcaagcgttagttccaaagttcagtgtgtacccttaaatgaacaatgaagcaggtaaaattacccttgaaaaaaatcccttggaccacccataaatgacagtgactttttcaatatggactcatcatagccagttttccttttgaagttggaactgatcacccttttgtcatctgtaccagatcagtagttggcttgtgttacattttgtgtgtgtgtgtgcgtgttttaaaccagtgcatataaattgtatgttaaatgtaagtaactttaagttgacttatctcttcacagtaatcaagcctcacgtaattcatgctttttaaattcagccagccccccctctctgaaattttattatgtaaataatttgtgttccctgatcactcgtttaagttcttagttgtatgtcatctcttctctagcaggaattggcaaacttttttgtaaaggggtagaaagtgaagattttaggctttgcaggccatatagcctctgctgcaaatgctcagccctgctgttgtaatgtaaaagctgccacagacactacatgaacacgaatgagtgtggctggtgttccaataaaactttatttacacaaacgggtggcccttttgggctgtagtttgtcaacccttgctctaacccttgactgagagctactttattaagccctgagggcaggagctatcccaattttgtgttccccagggcaccaaaacacagtgctttggcatagagtaggcactcaacaagtgtgtgaacagatggagagccagccctagtcagtgcactcaccctttgaggctctggttcctccaaacaatgattcgttgtctggattggctggaactgtcacccccgcaattctactccccacccacccatgtgaccttaatgtcagttgctggtctgttgctcttcggggagggagagatggcctggatacagagctaagcaaatgcttctttaagggcccttaaaagtgaaaagtaacttgcaagaggttgagatccttctgagctaggagaacttattccaccttcaaaacctagtttgggctgggtgcagtggctcacgccactttgggaggctgaggtgggcggatcacctgaagtcagctactcgggaggctgaggcaggagaatcgcttgaacccaggaggcagaggttgcagtgagccgagattgcgtcactgcactccagcctgggcgacagagtgagactccgtctcgaaaccaaaaacaagaaaaacccctagttttgtgccttctgaagatagttaggacatcttctttttccgcaaatgctggacatgccaaaaacctaacgcaaaacccaggacattccagcccaactgggacgatatcagagaccatcttcaagtgcaagaagcaggtgaaagcccaggaaattggcagagccaggattatcatccagtactttcatttcacaaatggagaaaccgaggttctgccagctagattttttttcacagtgtcactgctagcaagccactaagctggagctgggatttgagagctgctgctatttagaggatcttgggaataaaatttaaactggagtttaatggccctttcagttttgctataggcaagagaataaaatgaatgaatggataggtggctttatgggtgtaagaaagaagcgaaaaaaactcccaaaccccagtgttcctgaatatctgttctccccctgaccactctgggaatttatcaaatgcagctttgacctccaagccaagtaaactgctcttgttgctattttagtggtttttgtttttttaagacacaaggtctcactttgttactcaggctggagtgcagtggcatgatcataactcattgtaggctcaacctcctgggccccagtgatcctcctgcctcagcctctcaagtagctaaaactacagatgtgcaccatcacatctggctaatttttttttttttttttttgaggtggagtctcgctctgttgcccagattcaagtgcaatggcacgttttggctcactgcaacctctgcctcccaggttcaagcgattctccctgtctcggcctcccgagtagctgggactacaggcacctgccaccacgcgcagctaatgtttgtatttttagtagagacgggggtttcaccatgttggccaggctggtttcaaactcctgacattaggtgatccacctgcctcggcctcccaaagtgctgggattacaggcatgagccaccgtgccaagccacgcctggctaattttttaaaattattttttgcagagacagagtttcactatgttgcccaggctggtcttgaactccttggcctcaagtgatcctcccacctcagcctcccaaagcattggggttacaggcgtgagccactgcacctggccctgttttcatggcttttatttcctttcatcccacacatttgtctgcagtactagacatgttttacaaatcaacaagtttacacaagtatatgcagcttgttttggggggaaaggagacaaaatatgcatattttctgtgtggatttgtgcctcttaattgtgtttctagtctctaaggtgaccctttaacctactcaagatggggcccagagaagtggcctgcgttacagatttattttggcatatgtactaagttccattttctctttacaaataaagtgttttctttcttttctgtctcag

SEQ ID NO: 5952 - DNA, 320 bp, Homo sapiens
caatagtagcaaactactaacccagcaaatctaagcccaaggaagaagggcggaaccagaagtagggcctcgacttgcttcagacgacacagagcaagaggaactgaccatctcatgacctgtggcattgcacggtgcagtggacagaagggattatcctcagccagtcgcagggtcagcttaagttagttagatcactcccagaagagaccagctgggaccttctttgcagtacaatttgaaattcctgatgtattttgcttattatttggtttcattctcataataaagagagtgtatactgacatgggcaggatgat

SEQ ID NO: 5953 - DNA, 774 bp, Homo sapiens
gcccacgaaaggaaagggctctcaagggctcttctgctcatctcttccgtgagatttgctcccagaccctctgatctccctccaacaaaccctggctccagccccctttcccaacttgagttgcatcatcttggaaccaggaagcccagctaaagccaagagaccagagagtccctgccactagttttcatcagtctgttcaagcaaagttgatctgctcctggcacgtccagtaaattccagaatcattctcctttctgcccataaagggccttggagaattgctttaagaagagtgaatgttccaatgatgatagatattataagcgatgatggttctgttgctatgaacacagcagtcggtccctgtcattgtccacccaggagtggccttgttaattccaagtggcatgtatcttccctctgagcttcatttcttcaagatgctctgggtggtgggatgggagaccatcctcagccctcctcagaccttatcaattcattgagagattgcaaagctgaaagcacctccggccactcctgggagacagaccctttggtgatgaaataaaccagtgacttcagagcctatggtctcaactgtgcttgaaaaacactgtctctgaaaacaactttgtgattctccctgctccctgtggacaaaagcacataattctgctgttacgggtactttgctcatacgagctttcatgttcagcatgcaatggaatcatgcttgtccatgtgaaataaatatggctctctcgtgtcctt

SEQ ID NO: 5954 - DNA, 1410 bp, Homo sapiens
ggcagggttgagaagacagatctagtcaggaccaccagccatggtctaaggacatggatcgggtgcccccagacgtgtgcacaggggaccctctgccccactctgggcttttcagatactctgaccaaaaagcctgctttaaaccgcaagatggggcctgggcatgcgcaggaggagccatcgggtactacgcagcaacactcacaactgtccaggctgagataaatcccgggacctgaactattagcacgtcactagagactgggagccgaggcagtggtgctggcccaagtgaaggccagagtgaggactgatgcagctctttacgggtcttgagagggaaggactcttccaaagccccaaagccgagggtttcacccacactgccagcctgggttggggcccaaggatgtgaccttgagtgtcaaggctggacagctactgccagatgccaaagataggagaaagtgccagccctgaagctggagccgtttgtgaataaactgttcttcatcattgacactggagaaaggtgtcctccatgccctcaggcagcagagaactggcccagagcccttggagtgttggtggagatcagagtgccgtggtggaggtctgggactatgtcagagtgtcctcactttggggcatgggtgggtccaggagatggatttagttattcaattttgtggatgaataaattgaggcacagaaagattaagttaccggcccaaggtgacacagtgaggaggtggcagagctaggatttgaacccagacaatctgacttcatgattttgcatccaattcgtgtctgtgccttttaaagggtgaggtctgtgtcactttgggtggggagggggagcatggtgggccatgctctgggcagctgttccaagacagagctgacccttccattaccaatggcctgtccctcaccaacaagccaactgccacagatgacccacttcataccacattcacatctttccacctgaaatggctaacaggtattaaatccttggttggtgtttaaagccaacccaagaacagggtgttaggtactgttttaagcacctagataggttagcataggggactgcaaatggtgttccgcaaagcaaatcctgtttttgaccatgaactaagaattttattttattttattttttattttttgtagaaataggatctcactatgttgcccaggctgttcttgaactcctggcctcaaatgatcttcccacttcagcctcccaaagtgcagggattacaggcacaagccaccgtgcccagccaagaatttttatttttgcttttaaatagcaaaagaagaagattctgtgactcatgaaaatgatatgagattcgaattccagtgtctataaataaagttttattggtacacagc

SEQ ID NO: 5955 - DNA, 498 bp, Homo sapiens
ccctgcccctgcccaccccgggcggctgaaactcactgagcagccaagactgttgcccgaggcctcactgtatggtgccctctccaaagggtcgggagggtagctctccaggccagagcttgtgtccttcaacagagaggccagcggcaactggtccgttactggccaagggctctgtagaatcacggtgctggtacaggatgcaggaataaattgtatcttcacctggttcctaccctcgtccctacctgtcctgatcctggtcctgaagacccctcggaacaccctctcctggtggcaggccacttccctcccagtgccagtctccatccaccccagagaggaacaggcgggtgggccatgtggttttctccttcctggccttggctggcctctggggcaggggtggtggagagatggaagggcatcaggtgtagggaccctgccaagtggcacctgatttactctagaaaataaaagtagaaaatactgagtcca

SEQ ID NO: 5956 - DNA, 3797 bp, Homo sapiens
aagcactttcacctctggcccaggagactgacccaaagtgaaggacattgccgggagaggcctgcagcatccctggatttcagagttctggaactttgttcataaaaaatctatattcaatctgaggtgatgtggtgactgaagccagaggtgatgtactttcaccattagcttaattttaacttaaaattaccagttccctttcttgcagtcagcttcataccatttttaaagtcaatacgatggaaatcaataaatctgaattccgaacatgttgtgtggaatactcttaagtgtgtttgagagtagatctgccaattatgttgacaagggaatgatcaaaagctttgttttttttaaaaaaaaaaaaagcagtttcaattgaaatattttcatacatctttggttgcaaacatttggactgcattgcaatgagttggggtgttttttttttccttttttgtataaaattgtatgcaaaatgggggtgggttagtaagccacatatttctgtccattgattcagatttaattctttccctttttcattctctcgcttcctcaatttgagtttttgttttaagaacccaaagatgtcagttcttcttttggtacctcatcaacgcttcctttcctgggctccctcccgccgtgctgctgctgcctgtgaacgcacggtgggagaggaagagctgctcagtcttgggcaaggagctctcacacttgctgtggtgttcgttgagcagcagagtatctcccagtgactcctgtttaaatgtcttgccctttgggcccccatctccaaggagttccattgctggttggatgattgtctgcacccctcactgagcttggcctagaggcccagcctggcatggttgtgcctgggctgtgccgctcaacagccccagctcccaagcagacaaagacctcttccaggaggagccaggtagaagatagttatacagccatatagctgcagatccagataaccttctttctttggaagttttcaagaaattcttaagcagtccaaggatgatttcaattatgcttctccattgggtccttctgctcatgcattcagttcaagtgtcctttatcccaggttcagagatgctgcctttctgaagaagacatctgaccctagcaggttggccagtgttattgaacaacaaaaatgggataaattgctttcatgattagctcaccttcttctggttttagcccttctgttctctgtacacgtgaacttctgtcatctccttctggcttggttgcctctgaaaggagggaaagtctcttggtaaattatctcttttgtgctgtttgctgtttctctgctgccgtctttgcagttctcctctcactggttgcaggctttcatagtaaggtttggcgagaaatgttccaaacatcacattttggattctaggctgtcacccctcattctgtgaaacgtattagcatgtgttcgcccaagatgactattccttgtgagccagttaatgatgatattctacgcccttcccttctaagctgtagttcaggaatccagcccacatagacagactcttgctttccatggtgtagtcaatgccaagtgatgcatctaggcaggaaaatctactctttgcttttttgggggcaattagtacatttgtgaagtgcagcatccaagaaacagcctgttttttcatcccttgagaaaggagcagtcattgcagcttttctgtccttgtcggcctgcagttcctggggaaaagagtacatctgagctacttgtccaagcctctgtctgcaggtgacaggttttgggggaaatgagatgcattaagtagaacatcatctcgggtcagacattgccccttttgtttgccaatgccccagtcctagagacttgtcctgacagtgccgcacacctacttttgatctctcagagcaggtggctccatccccagactagcctggctgctctccgaggcccctccacctgctccccttattgccccattcttgtggcttgccgggccacttggcctcccttcttgccggtgacagcgttccatcatctccccgctccccaagggccaactgcttctcactcaggctggtgtcatttcaggaggaccaaagcctgcgtgagcctttttattttcagtaaaatggtgcttttttccttacttcgagatactatatataaataataatgtaaatgacaccttttcgtacggagctgtttgagtattgctttacagagctcactaaatcagcttcaacaatcttgagctctgtggctcctcaccctgtctgcatggaagaccttgctggacgctctcgggagagcagacatagcaccagaagccactgggagaagtgttttcgatccgtgtctgggccacagtagtattcactgtttagtctttgagttccgtaagcagtctcttcatacatttcttacagtctggagtgtactgactaaatctgtgtaagcaaattgaaatactctttcttttaggtagcgtcacagtggttttttttttcctcaggataatttctatacaatttccttactgtcagagggaccagatctttccctcactgtggcaggggccgtgcaggtggataaaggaagagctggtttccggagagtgactgtaacagcgttgactcgaagctagagatggagggggtggccgtctcttagacattggacacctctcagagcctcctgagggcttctttgtcttctagaatctctaccggtggtcctcctgcaggttctggctcacagacatcatcatgcctttttttccctccctgaggcgccttggcagaagagcgtgaccctgtgagccaggccccccttagctctgcttcagatcacagaacacagacagactcgcgagttgctggacctctttggtattaagtgtttgaatccatggtgggccttttgcaagtagcgttagctctttttaaatgttgaactgagctaaggatgcactttcttgtggacatagaaggggcccacgtaaggccctgagtaggctccttagttgctgctttacctgatgagggccaaagagattaactctgcctcgttgccatgtctcagaaaagttgccatatttcacccagaaggggcttgttttcctcttactcttactttaaccatgtgcctggaggagccattctgggctcttgcacttgcccagcctttctttgccaggggcagagaagggaaagggggtagattgagtgtgccaagggccgtgcaagggcaggcttgctttccacccatctgctgagggagccctctcctctcgctccttgcctctgttcacacctgttgtcttggaagaggatggtccctttgtcttaaggctttgtgataaagtcatctccagttaggatctgcacctgtttccttcgtaatagtgcctggcggcctttctgaagttacaggtggttgggagccctctcgcatgcagaacatctggtagattgatctgccaggctgggtggttctactgctttctcaatttctaagaaccttttttttttcttaaagagttctgctgaattatttgacaatatttgtaagtaccatgtttccttgtggtgtatgctctgttctggtttctgttttcaaatcaaatgcctgtttgggaggagatgaacgtatttagtctattagatttgcactgctggattttttttttaaagtgtaaccttgaatagctgtcttattgtttatcctgtaagattagtcaatcgattaaagtttgataatt

SEQ ID NO: 5957 - DNA, 2717 bp, Homo sapiens
catctctgcctcatgtcttgaatctgcttgagctctaagatgaacctggggacaaagtgagccagtcagcacctacaaagagcttttgtgtctttgacatctaccaccctcctccttttaaaaaatttctttagaatttctcaatcttcaaggctctaagtgcttaagaattcactaacagacagaccatctggaggagctgtcttcaaatgctgtgcttacaccttatctatgaacagtcactttgtaccattatctgtggaacacagaatcatctgttcccaacactccagccccttggtcctgtggatggctggatcccgcctgaaacggacctgcagagcagcagcacccttccggtgtggaggctatgtagctggtgcgctgctcacggccattcactgcccatgctgagcgcctctcacacaggtaatgcccagcttttctgctgctaacacatttggccagttgttgcagttgctcatcatcttgggaaaggtgtttgtgacttttcagagcccagattcctgttgtctattaaaacttgaagggaggggtgaatagtgtttctctcttcttcccaaaatgaccttagctgtcctaggatagttagtaaaagactttttagcattttgacctagggcctttggctttcactaaaagtggggacctcagtatcccagattgtaattttgccaagtgttagatttgagtctctcatgtggatgcattagtcaggtggttactccttgcttcaaggtacttaccttatttcattgaagacaccgcatttgtgaactcttgcttcctggcctagaaccattcagcctaccctgtatttgccataaactccacaattcacaccaaaatgtctgtacttagagctaattcgcatatatacaggaagggctcttagaatcagtttgtgggcacagagcctcaggagtaaatgaagttactagggctgttcttaccatctccttctggccaaatagcacaacatttcctcgttctgctctgacctcttagcttagaaggaagattcagaagtgaggggctaagaaggttgtccttgcctaatgctctgatctgtaagtgaatagggcagaacagttcagccttgaggttagaatttagcaggagctatcctgacttaatatccagttgtggggtttgcaaaacaaaacagctgtatgtaatcattgccactagttccatctagaactcctttctagtttgttatttttaaaatgtttatacataaaaccaccaaaatacatagcttcgacaagatggaagtttatttctctctcccataacagtgcagtgatagtcagctggtccaggccaggcaaggggctggtccatgatgtcatcaggcacccaggttcctactgtcttgccatgtggccacagttagcaacaaaggaggctgtaaatttagtttctacttgggcagccaaaactctgaggaaggagattctgctagtaaaaaggagtgggggaagaatggccattgggagacaacaagcagactcaaccaggcctctttgttggcttcctttcctcctgctgcacatgagccttcgccgtgcatttggagccatgacagctgatagctccagacctgcatcctcctagcttgggggctctgaatgaaaggtttcttcccttccagttcgaatttggaaactcccaaagttctcaatggtttgttgtgagttccatgtcctcttggatcagtcactgtggccatgcatgtttggccacatgattaatccagtctgggtcatgaccttttcttcatccaaaacaaggtgatgggaagacaaaaacaatagctactacaaacaataggagtttataattatgtgctgatgtattcgaagatgtgttgacagtcgtgagtgtgtatcctaggaaaggcgagctggactctgtctccatggtggctctcaccccagggacctaggaacagcctgtcaccacacaattacttttataaccctggagatgaaaatctccttgtcctcaaaatacttccagaagaacaaccagatgggaaggaccttggttgggactctttccagttcacttggggcagagggaatttaatggctcacgtagctgaaaaggatgggctagattgggcttcaggctgcatcccaggactccaaacagggatctgtctctttggctctcagctctgctttcatttgagttggctttattcttgggcttcacagtgtggccccacagcaccagttattgataaaaagagctcccctttgctgacagaactgctggatttggttctcattggtccagacgaggaaggtatccagcctcaagtcatcattgtggccaggaagatggaatacaccaaatggacaggcctggcatgtacccacagagactgagagttggtgctggtggttgtggtggcagatgatattacctgaagaagggacgaatgggtgctgggcaggacaaagcatcagctgtccagttcaggcctctcctctttccctggtgtcttcattttcctccgtctccctgctgtcccttaccctctgcccaatctctcattactcctggtcttgggagttgccttctgaggatactccactgggggtacctgagcctggattagagggcagggggaggatattgcctagccaaagtgggtgttcaataaagaaccatttggagatggt

SEQ ID NO: 5958 - DNA, 305 bp, Homo sapiens
tagctgccctcccctccggactggtgccctcctcactcccacctgcatctggggcccatactggttggctcccgcggtgccatgtctgcagtgtgccccccagccccggtggctgggcagagctgcatcatccttgcaggtgggggttgctgtataagttatttttgtacatgttcgggtgtgggttctacagccttgtccccctccccctcaaccccaccatatgaattgtacagaatatttctattgaattcggaactgtcctttccttggctttatgcacattaaacagatgtgaatattct

SEQ ID NO: 5959 - DNA, 1352 bp, Homo sapiens
ctccgtttgtgccttgggcttgctcctgcaaccagtatctccttggaattcatccaaagcccccatggacgcatggacgcagggcgacaataaactgtattttcgtttctaactctatttagggccaagagaagaaagctggaaggatgtgtactaaagtctagctcagcagtccccaacctttttggcatcagggacagtttttccacggatgggtgacaggggatggttttgggatgattcaagtgcattacatttattgtgcactttatttctattatgattacattgtaatatataatgaaataattatacaactcaccataatgtagaatcagcaggagccctgagcttgttttcctgcaattagacggtcccatatgggagtgatgggagacagtgacagatcatcaggcattagattctcataaggagtgcacaatctagatcctttggtgtgcagttcacagtaggatttgggctcctatgataatctaatgccactgctgatctgacaggaggcagagctcaggcggtaatgcaagcaatggggagtggctgtaaatatagatgaagcttcagctcgcctgccgctcaccttgtgctgtgcagcccggttcctaacagaccacagaccccacaccaggtctatctcatttggtctcagagctgtgaatcagccagcaatattttagttgcaaatcactgaaaacccaactcaaagtgacttaagtcagaaagaaattttatgaattcaggtaattaaaaagtccagaagtatctgcctttaggcacagctggatccaagggcacaaatgatgtcatcaggctccagttattctccatctcccagctcagctttttctgtctgtaagcctgattttcaggaaggctctttcctagtgatggagatgaccaccatcagctccaggcttctatcctgctaacccagtaacccagtgggaagagatttacttattccaataattccaagtggagagtgtcattgacccgtttggggtctcatctctacttctaggggaatgaaacactctgagtggccaggcctgtgtcatgtgctaattcctagagccagggaaataaggtctgaggattcaggatggggtgaaaggtggttgcttaaaggaaaatgaaatacaattagcagaataaggggaaacgagtggtctgctctgctcgggcaaaacaagagatgcccattactgtgagggacccttgaagtctggactcttaaatgggtttttgctgatttcctgggtgcatgctaggatgatggggcttgatgcagtagggaagagacgatgtaaaaataataaacaatatataccttc

SEQ ID NO: 5960 - DNA, 1170 bp, Homo sapiens
gtagatgtgtagatctccgtccttcatttctgtcattcaagctcaacggctattgtggtgacatttttatgtttttcattgccaagttgcatccatgtttgattttctgatgagactagagtgacagtgtttcagaacccaaatgtcctcaggtagtttggagcatctctatgagatgggattatgcagatggcctatggaaaatgcagctgcataattaacacattatcaaagtcctcttacaatttattttccgcagcatgtcagctaagtagacccaatggggagagaaaatgcctgctttctttccctctttttctgcactgccatattcacccccaaccatccaatctgtggataattggatgttagcggtactcttccacttccgggcctggagcttggcttgtatccaagtgtatggttgctttgcctaagaggaatccctctatttcacctgttctggaggcaccagaccttgaaaagaacatgctcaaaataaaatgttatctgttatttttgtaaactcaaagttaagatgatcaaagttctaaaattccaagaatgtgcttttagacggtctcaatctaaaagcacttcaaggggtcaaagggcaaccagcttgggtgctacctcagtgttgtagtttctgatactttatgtctttgctcaccctcatccccaaactacttgaaaagggcatttggcaccactctctgaaacaacacagtcactctagcaaggcccccaaagggccctggttttacattacatttcaaactttatttgctttggggttttgtttctgttgttgttcaaatgcaaaaaaaagaaaaaaaaagaaaaaaaaaggtgactcacattgttacacatgctttaaaatatgtattcaaatgttattaaccacaatgacgacctgctttgatttaaccaagaagacggctgcggagcctagcagactcaggcctgtgggaatgggatttgttacaaatctaggtttgttactggcttcagaaagctaattaagtgctctgaaaaagacaccgtttcttgaaacaaagatggttgtattcctcactttgatgttgttttgcaagatgtttgtggaaatgttcatttgtatctggatctctgttatgtgccatttttcttctagcatcgagatacaat

SEQ ID NO: 5961 - DNA, 128 bp, Homo sapiens
gtgaatgcaaactccatcgttgagcctggggtgtaagacttcaagccaagcgtatgtatcaattctagtcttccaggattcacggtgcacatgctggcattcaacatgtggaaagcttgtcttagagg

SEQ ID NO: 5962 - DNA, 552 bp, Homo sapiens
actgacctctgacctctgccccacgcccagcacagccttgggggaagtgtacagagatgtctctgaggttgcatggcatggtccttgtgatggtattactttttacaaagaatgaaaccaaatggactcagccctctcccacattttcccctcaccctccaagtcctaacccctccatcctctctaacttttcaagccaatcccttaatgtcattcctctctctgtgtatctgtgccagatgttttcctttcttccttctttactggaaggacctccacattcttccctccttggaagaggactttactaaaagtcacaggtggtggccaggggggatttccgaatctccatcaggcgcgctcatagttgtccccattgtctacccacacaaatcctcaggaaaccaaccaccgcccaggtggccctgagggaggcattcacctttatgtgttagaaaaacatgaccagaaatcaaagatgtcagagccccgaagcagctaatgtaataagcactcatgttattaaaggttttgccttgtcgtaaccaaccg

SEQ ID NO: 5963 - DNA, 415 bp, Homo sapiens
aaagacagattttttaaattgacttaattactaagtcatctgtattaaattttgttataatgtaaagagattcaagccttgtaaataatgacatggaagaccctgtgctgcacttaaaatattgctgcttgattatttgatttttacatcagagctttataacacgaacttttgtacagaattgtgagttgtgaccatgtaacatgagaggttttgctagggcctattatttttaaccaccattaattagttggggtggagtttactgtaatgtgaaattttcacatttgaattttttaattgcctggcaaaagctgatataagttctaaaatatcagcagaatgatttgctgaattcattacaaccctgttatgtcactttttgattacaataaaagttttcagtaaacttttc

SEQ ID NO: 5964 - DNA, 365 bp, Homo sapiens
tgtagcagtgaagtaaatcattttagaacttaatatccaactgatcatagtacatattgtaaataaaatgtattttgatgacagctcagttgaatatggataatatgtggcatcacttgcacacttattttgtagaaatgggtaatttgtgcccgtaacactgtttcatattaaatatgatagcattatccctgtatgacactgtgttgtacagttaatgtatgatcctttttagatcgtttaggttttacactaaggaacatgatgacatgttctacatttgtctgtctatagttagtattttgtatgtatgtacaggctgttgtgtgctttttgtttcttgcaataaaaaatgtttggagtgt

SEQ ID NO: 5965 - DNA, 2417 bp, Homo sapiens
cagtgtagatgcagactcaccgaccgggacctcagacgcgagggaaaggagcactaagtggggctcgccgcctgcagccaggggccgcctgtgggaacagctattctctgcacattttccactttgttttccccaaaacatatcagtttgaatacttgaatcatgcaggccaatattataatgtgaaaaggtatctactctatttacactcccaaatagcgccatacatgctaaaccgtagagaatgagctcgcttgtgtctattcatcatgtttagcctttggattctttttttttttttccttctattcctccccaacccccccccccgcccctttttttctctcttgcaaaaccattttttgggctgataacgtatgagcttttccctttgcactgaatgatgttctctccgtctcatcggcagtatggggggcagctgtcccagtgtcaatgtttactcaagggtgttcttaggaggcgtgcgctctctactatgccttgatgttgcctaccttattgtggtatcgtggagtttaaaagatcaagttaggatgctgacttaggattattaatgaaagtgttgcaccagttttttcatgttgtaaaactaaagaatttcgctctgcagtttgaaaaactgtggccacagctgtgacttgcagcccacctgccacccaggacgggccctgcactttgaataggctttccattttgttttggaggttctcactttgaaccttcttgtttacagatttttttgtttgttttttgagaaaaaaaaatgtttactcttccatcatttaaaaaaaatgtaaaagacaaaaaaaaaatggaggatgatttaaaagatgctttctatctctgggaaaaaggagcagcatttggccatgttcttttgtttttctattcctgtcccaaatcaaagagcatggttctcaggaaaaccagttccccagtttaaaaaaaaaaaaaaaaattccttgtagtttcttagaggaaaaaaagaaaaaccccaacttttagcactgatactacatattgctctgttaaagaattttctctgccaaaaaaaaagaaaaaacaaaaaaacgcttaaagctggagtttgacattctgctttcagatgctgtctttttattagtgagtgatgatggtttgctaataatcaataggtaataattttttgtaatcccatcaagtggctccatatgtttctgctctctcgtgactgtgttaatgtttaactgttgtaccttaaagccgaaatcagtaactatgcatactgtaaccaaggtattgggcttacagagttgtttgttgtataaagaaaattttaaatgttgttgcaaactaacgagttacaccattttaaactttctttcctcccccctttttttgcccacaaatggtattataatgcttgcttagtcaaagaagagagactaaacaagggtaaaaattttaacagtacagaatttgccatcatatcattgccttgattctaactgtttgtgtcctaagatgcaaaagaagtcagtggcttttaactgtttacaaatagaatgtgattgtaaaatgtacagtttggttgtgtttgaattatgaaatttcttcagatataataaaccatgactttttggctgctcaacattaattgtctcctttttgtgaatttatttgtaggctcttttttataatgaaagtttcaaagttgctatgtatgagggttctcatagagcaaccgattaaaaatctaagcaaatatttgaacattttatctgaactcatcacaatttcaccctgaaataatgtgagaacaatgggaaactgtagcttgctccttcccaccctctctgagcatctttgggatcttgttgctcaaaactcttctgtgacttcatcttccccaccatttgtgcccatctcaagcctcagcaagaaaccatgtggaacatgaagcttaatgacttgacagtgtactagtgttaaactctcatacctctgttacaaagcgagaaacgccacacccggactggccttttcttcccccttcacggccctcgcttctccctgcaggagctcgggggcgaaacctgtgtatggatttcagtgtatgacttcagatcatgctccaacttgccaggtgtgagctaatgttgtcggacaccttactataagcaaatgttattcagtgcgttcaatgtatattgacttccatactggtttttccaaaaaccaaaggtagctttgaaaaaccatgtctggaaatgtttggagcgttaagctgattgaccttctgaccttggggctttgagtagtatataattcataactgcgttaattgtattgttaaagtgtttgggagttttttgcgcttgttatgtggaaataaagtgtttgatttaaaatttttt

SEQ ID NO: 5966 - DNA, 89 bp, Homo sapiens
tgtggggtgaacccaggggtccaaactctgtttctcttcagtgctccatttttttaatgaaagaaaaaataataaagcttttgtttacc

SEQ ID NO: 5967 - DNA, 207 bp, Homo sapiens
tctgtcgaaggcttatgccgagccagaagccgaagccacttgccctcctggaggagacctgcaagctccctgagcggtgggcgggcctcgtccgcaggtctcatcccacactcttgagaagccttggtcactacagtggtcgcacatgttcctcttcctgttcctgttgacatgtcgttgtttaaataaatctcacttgccaccagt

SEQ ID NO: 5968 - DNA, 439 bp, Homo sapiens
agcagagctcgtgggattcctgctgctccaggtgtcctcagctcacctgtcccagactgaggacaggggagttcctgcatttcctgccagggcagaggcccagaggagcgaccccctgcttccactgcttgggcctgctttctcagatagactgactgctgaggaggctctaggttcttggaattcctttgtgctcatcagagaccccagcctggggaacacgctgcccgcactgcccagagagcagtgcaaacaccacaacacgagcgtgtttcttgagaggaatgtccccgagttggacaaggaggctgtttctgcacatcagctcatttcccgcaccccatttcttgcttgattgctttgttgggggcctggccacttccttgcttctcaagctgacaattctcactttgcaataaatagtccagtgtttccttcc

SEQ ID NO: 5969 - DNA, 1439 bp, Homo sapiens
ggctagagaggcagaggaaggctagtcaataagctaaggaggctccttgcctgagtccttgaataccccagcttctgcagcttcacttgctggagtgccaagtagatctcctcctccttcatgcagccaggattgcctccagtgctgttagcttaggcaaacaggtggatcccatggcatccccatggaggaaccaggcccatctgggcagcagcatctggttgaccagatggccaccagaacccactgttcattcttatcttctgctagttaatatagcctgaagacagaggataaatagttgtcaatgtcagagacagtgctattaatgtatatgtgagcgacaaaaaaggtctgctttataggggttctcactctagcttggggagccagggttctagccctgtatctgtcatgggcacctgctgtctaaacctctgcttgggcttctccccagaatgcactttgtggctgagtgctccaggactcctagggagcaaggtcctccctctaaggtgtttctagtcttctctttaaaggtctcatcccacaacccctgacttcctccctccccacatcatgaaggcagaggcatgcacattcctcactgaaaaagaaaacacacacccacccacacacacacacacagaagaaaatgaaagctgacacacctcgaagccttctttccaagagccctctaaatggggttgggtctcactcttcatgagtatcctgggttgtgcagaagcttagcatatgcccttgtgttcggatcaggcccacagggctgctcaaagagtagagtaattgtaaccgaggtcagagctctggggttggcagagatgagtggccatatctgggggtaaaagaagaaatcctgtcctcttggtgggaggttaccttacctgaagaccatctctcccaagcactgtagttctgagcatgtttttggggtggactctgtcccctagggtccctagaagggcaaagaccagagagttgacaagtctgttattaggaataatccttagccatgtaatggagaaaggagcagtcagcattcttccaatttgccccaccaccacctcctcgggcttcattttctctatttagagatggcagagagtgaggtagtggcgagaaagctgactccattcatcagatccagtttatgagggttgggggtgagcaagggctgtctgcagaaacccccatcaagagctgctgaatgaagtgtcccttcccatcagtttgattcaattaaaatgcatcatttgacataaagcacttgttcacagatctccaaaaccaggaattgttctagtaaaactggaaatttgtatgagtggggggagttaaatctgttcagctgttattaaactgtcatttctcccgctaaatgaaaaccgtgttgttataaagcttaatgcaacctgatt

SEQ ID NO: 5970 - DNA, 1705 bp, Homo sapiens
ggccagcctgcccggcagcggcagcggcagcagcatcctgtccagcgccagcttcatcagcttgggcagcagtgccctcacctacaaggtgagcagcgggctgctgacttccacagccagccttccctccacccaggccagcagccgtcagagcgtccggctggatggcagtgcccaaaacaggcagagcagccacaccagcgtgcaggaggacaagacgggcggcaacgtgaaaaccagtgagcaggtcaccacgggggagcagcctgcccaggtgtgcatgcctttgtgagaatcctctccagcagccagagtctcccagaaaacaacacacaggcccagcaaacacaggctgcacccagagtggatattcccaaaacaagtaggaaaggtgttttcaaaagcacacactgactgtgtcaaccatcagtgggtaatcccatttgtagcaacaagcatcagtgggcaggccacatgtagcaggaaggatctatgctgagcaccgcctatcctgagaacacagtcagtgaggagactgtctatactgagaaccactgttgctaggaagagctgtagtatcaagattcaccaatgctgagtccacctgtgtcaaaacagcgaagagtaatgacatcgactgtgaacttcagtgacaagccatctataacaagatccatcaatggcaaaaccatctgtagtcagcagcatcctggtgggaccccctgtaccaaaactcatcagtggcgacagatgttctcgatggcaaacgctgacgatattaagaactgtcacgagttagaaccttccatgatgaaaccatcctaaatgatgaatgccatctgcaaccaacaccagccacgatgagctcagaagaaacaagctgcaaccatggttgggactgtccatatcaagaaccatctgcagtgagcgccatgcgtggagagccacatccacatgaaacttcatcctggccaagcagcaccacactctgtccatcattgtcactgcccgcagaagcactagcaagacagccacggtgcacacggagcaccttcacgactctcagctcccccaaggagtccagactaagtgactgtcaccagagaaggatcatcaggagcagccagggatgcccccggcacacagggactaggtctagtgagaacattagagggcggtgtaaatggatccccatgcctgggcacctgtaatcccaactacttgggaggcaccatcccagagagctccaagcgtccttttttttttttttttcctttgagtgctgtctctggacatcttcagcccagaatcttctcaggagcaaaggcttcctgatgcctcattcatgtcaagaaaggaggccaggagccatcctgtgttcagatggttgagacagtgactacgatggcaggacaatgccgtgagaagcacttcatggtgacagagcccaacccagccgggaacagctgcgatggggaagctctggagcattttgtgagcaccgtctcggtggatgggaaagccgaagtctctgcccgtctcttactggaggcactaaaccccctccctgggttgacctcacagacattgaagtgagtctgcccacaaaggaaaagaggccagagactgtcgtgaagacatccactaggtaccagaaggaaagctgagggggcagcaaagacaataaaaggtgtctagagaggtc

SEQ ID NO: 5971 - DNA, 992 bp, Homo sapiens
ccaggataggagctgaaagggcctgacatgcagacagcattcatctgttcactaatttcctgggtcctggaatctatagagacaagcaggactgaacctgtgtcctgaagagccttcactgcccagtggcagccctggggggctgagctccagcactggacaggcacagagcaggggctgcccaggaaggagcacactccaggccaggggtgcatggcagaggaaggtggggagagcccagaaggacattgcagacagacagcctgcatggggactctggcatcagaaagccgaatgtttttgggaaacgggtgggtcacacaggcaggggtgaaacatgggctctgaggttggctacctgattcaaacccggccgcgctgtgcacctgctgggtgacttggccaggatcccccacttcgctgtgcccatatggaaaagagggcaaggccagtcctcactgccgagggccgagaaggcggtgccgagcccctgctgctgcatgaaccttagccgctgtcactgatcccaattactctgatccttttgcccttccttcccataacggcctgctggacgccacagcctgaatactggagagagctgggcattgcccaggtcacaggagagagtccgtagagacctgcgcaggagccgggacccctgctgagcagtgggagctttctgtcatccccatggctcaaggataacctacctgcctgcagagaagtgcgaaggtcttgctggatgacttttcacccgcactcacccaggagcaggctcccaagtgaagaaaccaccgaaccatcaccagctcctagaagcctccctcctaccaccttctagtcaccatcccccagaagtaatgactctcaaacctgggggatttgaggccagggggagagccaggctctatgctttctgtaattgtgtctcgtttgtgtgcacgcaggtttgttttatgttttggccattaagattttccccagccctc

SEQ ID NO: 5972 - DNA, 947 bp, Homo sapiens
gtgcatgtcctcttgttgctgagtctgcagatgaggactagggcttatccatgcctgggaaatgccacctcctggaaggcagccaggctggcagatttccaaaagacttgaagaaccatggtatgaaggtgattggccccactgacgttggcctaacactgggctgcagagactggaccccgcccagcattgggctgggctcgccacatcccatgagagtagagggcactgggtcgccgtgccccacggcaggcccctgcaggaaaactgaggcccttgggcacctcgacttgtgaacgagttgttggctgctccctccacagcttctgcagcagactgtccctgttgtaactgcccaaggcatgttttgcccaccagatcatggcccacgtggaggcccacctgcctctgtctcactgaactagaagccgagcctagaaactaacacagccatcaagggaatgacttgggcggccttgggaaatcgatgagaaattgaacttcagggagggtggtcattgcctagaggtgctcattcatttaacagagcttccttaggttgatgctggaggcagaatcccggctgtcaaggggtgttcagttaaggggagcaacagaggacatgaaaaattgctatgactaaagcagggacaatttgctgccaaacacccatgcccagctgtatggctgggggctcctcgtatgcatggaacccccagaataaatatgctcagccaccctgtgggccgggcaatccagacagcaggcataaggcaccagttaccctgcatgttggcccagacctcaggtgctagggaaggcgggaaccttgggttgagtaatgctcgtctgtgtgttttagtttcatcacctgttatctgtgtttgctgaggagagtggaacagaaggggtggagttttgtataaataaagtttctttgtctcttt

SEQ ID NO: 5973 - DNA, 176 bp, Homo sapiens
gttcctcctacatggctagccctgtgctagacactggggaatcggcgatgaacaaagcagatagaaatccccactcttgtggagctgacattctggagggagagacaaaaagcaaacatataaagaaagaaagaaatcacatggatctggatgacagtgagtgctgggaagaaaat

SEQ ID NO: 5974 - DNA, 1511 bp, Homo sapiens
tgaggctgactggatgtccagagctggccaggccactgggccctgagccagagacaaggtcacctgggctgtgatgtgaagacacctgcagcctttggtctcctggatgggcctttgagcctgatgtttacagtgtctgtgtgtgtgtgtgcatatgtgtgtgtgtgcatatgcatgtgtgtgtgtgtgtgtgtcttaggtgcgcagtggcatgtccacgtgtgtgtgtgattgcacgtgcctgtgggcctgggataatgcccatggtactccatgcattcacctgccctgtgcatgtctggactcacggagctcacccatgtgcacaagtgtgcacagtaaacgtgtttgtggtcaacagatgacaacagccgtcctccctcctagggtcttgtgttgcaagttggtccacagcatctccggggctttgtgggatcagggcattgcctgtgactgaggcggagcccagccctccagcgtctgcctccaggagctgcaagaagtccatattgttccttatcacctgccaacaggaagcgaaaggggatggagtgagcccatggtgacctcgggaatggcaattttttgggcggcccctggacgaaggtctgaatcccgactctgataccttctggctgtgctacctgagccaagtcgcctcccctctctgggctagagtttccttatccagacagtggggaaggcatgacacacctgggggaaattggcgatgtcacccgtgtacggtacgcagcccagagcagaccctcaataaacgtcagcttccttccttctgcggccagagccgaggcgggcgggggtgagaacatcaatcgtcagcgacagcctgggcacccgcggggccgtcccgcctgcagagggccactcgggggggtttccaggcttaaaatcagtccgtttcgtctcttggaaacagctccccaccaaccaagatttctttttctaacttctgctactaagtttttaaaaattccctttatgcacccaagagatatttattaaacaccaattacgtagcaggccatggctcatgggacccaccccccgtggcactcatggagggggctgcaggttggaactatgcagtgtgctccggccacacatcctgctgggccccctaccctgccccaattcaatcctgccaataaatcctgtcttatttgttcatcctggagaattgaagggaggtcaagttgtttgtcaatgatttgtcagagaacctgttgaaatgtgaattaagaagctaagaaaatatttcttagcaacattttctttttcttttttttttttttcttttgagacagagtctcactctcgtcgcccaggctggaatgcagtggtgcgatctcggctctctgcaacctctgtctcccgggttcaagcgatttcctgcgtcagccccagagtagctggaattacaggcacacaccaccacgcctggctaatttttgtatttttagtagagctggggccaccctggcccggccccg

SEQ ID NO: 5975 - DNA, 1739 bp, Homo sapiens
ctggtgaaggagggagagctggtcctcccactatggtgggctccgtcagcagccccactcagtgcctgcgtccctcaccctcagtcccaggagctggaagcgaaccacagtgttgaggggagcccgctgggaagaggggactcgggaggacagccctggatactaccagagtgacagatggctgtggctgcagggcaaagagatcccctgcagttctgggttggccacagggagcccaggacacccgccttcatgcctctgctgtgagacccagcaaagcagggcccatgaccactagggcctgggctgaccctgactcagaacaggacaatgacggggtggggaggcatcccatccagcctcagagggcccagagaatggctgagcaggacagtgggagaccagaccctaccccgcaactccagtaagcagggcactgcccagggagactgccttcagaaacctgagcttcagcggccaacaccccccatcccctgcgcatccttgtctcatttggggactggtggagctggctgagaggttggggtagtttcctggttacaggggtccacaagaccctctctcatcccggtataggggcctctctcctctcatcgggcctgataagggattggccaaggctgtgtgcatcctgcagagggaaggaagtcagctgggccacccgccatccaccttggcaagagctgggcccactctggcaggccagggtatcatctgcgtgctgctgccgggccaggaagggtgggtgggtggccagcaggctggcagctccagaccccagagggccagaagaactcaccccagtgccctctggatgcaggtgttggggaacactgaggacaatcccccatctcccctcacccttgagcaggccctccctgcactctctgccacatgtccctcctggtctgatcacggctgtgctcactgatgtggctgctttctgtctctgcccctgtgcccttggaggcaggcagtgaggtgctcctttcccaggcccccaccccttctcccccttcagccacttcccagcgagttggaaatgtgccttgcacccccagccgagtgaagcccagaacgcatctatatgcatcgatgtaacaagctcggatcagggacctaattggtttcccagtagtgggtaatttctcgttgcaaatattaatccgttgtttttctggcgcccagcccggcccgccgcagtactgtactcgaggtacgttcctatgcaaccgagagccccggcaaatacttcatgagcttagcagcctgggctcgagcagctatgcaaacgcgcttttcatttggagcacggggctgatgtgaagataagaattgtttctcctggagaaagatccatcatttctccagcttccaagcccccggcacctctgctcagctcccagatgtgacgagcacctcccgccagggggagtcaggggttgatcaaaccagctcttgtgacccaaaccagtgccgctgcattaaagggaggcccagctactccttcccagctgagatgtgggtacaggtcagatttgtcagggagatggcactaacacgacacaagctcactcccagaaccgcagctgatgtttataataatcgtatgtactgtgcaatttaggaggggaaaaaaaggctgtacaagctttaactctaaaataaatttctatttttttcctcttgcaaaattaataaaagatgttattaagaat

SEQ ID NO: 5976 - DNA, 2920 bp, Homo sapiens
gtcgcctccgccgccctcggacccgggagcagcccgggcccgccccgagccggtgcccggtgcggcggtagggaatggagccacctcgccgcggggcagggggcgcagcggtagactaggcaggacgcggcccggcacctggtccgtccccggcgggctggtgagggggccaccaaagacccctagcgcggcctggtgagcgggggcttggcccagaggagccaagccgcacagacccgagaattcggaggccaccacacaacacacacacacacacacacacacacacacacacacacacacacacacacacacacgccaggagcaagggagctttcgggccacactcccagacgcctccctgagccctggaacccggactcgttgctcctggccttccataccccctggcagatcatcctgcggtcccaccccagatcccctcctcctcgccatcccattctgccccctccccaccctgggtacagaaagggactgaagtgttgggcagagagggggcttaaggcccctgggcacaggctgggatcagggcagtgagcgaagggcagctgtgtcctgccctcccttctggaggctggaggggagaggccaagcccttggaaaatgtagcaaatgtctggatgtcgcataagtgcgtgtatgtgcgggacaggccccgagaagctagtgactcctgcacacccccattgcacaaatgaaatcacagcccaggagggagggtagcttggcactggctgagaaatagagctctctccccgcccctccccctaaccacaagggattgtcctgacaacttgtggggatagaagggctcacagggcaggggtctcagctgcccccatccttagggcaggggagttagtgtggagccgagagcaggtcccagctccccctgccagccgcactgtcccaggcccagggacctctgccgggtcctcccagcccttgccacacagcctagacgtagtagcctgggcttccagcaggtggcgagctggttcgtgctggaaatttctcctgggtttcttggggtcaaacatgccaacctccaagaccccatcctcacgtctcccacttttctggcgctggagtgtgcagggcgtaggacctgcatgtgtgggtgtgagaatgggggcggtggacaccagggggcgagtgtgtgactaggtgtgtgtgcacatgtgtagggtgcagacgcatgggtgccatcctttgcgttcagtgactgtgcgtccagacccctcaccagcggcccccccaccacaccctggtcctcccaggcagctgtcccagggcgcccaggcctgccttgcaccacagccctcaggaaatccggcaaggaggcccctgcaggttggttcaggcccccaggtagcaaaacagagacaacagcagccccgcctgaccccctgcccctctctgtggaggcccgggacccccgcaataagcaccacatgggtgaggctgtccctgtcagggtcccctgccagggtccctcctggggttctgggccatttgaggggctctttgatgggccaggccggccagagtgaactccgagcactttctggctggtgccccaacctctccactccccactcattcccaccttgaaaaagggctataggtcccctgccctgcccgggtccagtttacaaacagtgtggggtggccccagggcctggccccactctccctgctgtgcccactcctctccagactccacctccccagtgggtatgggccctccacatgccaggtaagtagcaaacccccactccctccaaggaccaggtctcagagaaggccctggtcactgcccccggcccacctggagcccatcggggctgcctctcccagccgcgacttctccttttgccttaggcctcgcgacatcctgatctctcctgcaataactaggaatcgagattccacagtagacgtcccttgccgtgctcgctctctctctcgcgcgcgctctctctctccctctctctctctctctctctctctctctctctctctctctctctctctcctctctttctctctctccctctctctgttaagatcctgttcgggagtttccccagccgttgtagtatctagtatgttagagttgggaggggaccatagttatgtagcccagccccctcattcccagaggcacccagagggccagcctccagcctgaccccagagcagaaccggaacaccaggttggggccctggtgctgccacctcctctgctggtcgggctgggaccctttgccccttaggagaggtgttggtcacagatgtttacctcagtttatgtcactgtcgaagaaacaaaaaataatagcaaaaaataacactgtagacatgaagacttagaagacaaaaaaaaaaaaatcacacaaaaaatctcccttgttgcgattcttctgtgaaggtacagtgtgtatgtgtgtatgtgtgtatgtgtgtgcgtgtctctgtcccagaccctgtgtcccccacactgccccctgtccttcggtgcttcccagagacccctctgagctggcctgtggggcacgggaagccccctggatgggaggcggggccacaggtcggctagagggtctccaccaggcccactgaacagaaccccacggctgccagaatgttccctgagcccacactgtggccagtgggacagtcctggtggctgacatcagcgtccatgcttggctcagggcctggggcggggtcctgggtagagtcctagccccagagccccagcccctcatgtcttgccgcccttcctccatgtgtttgtaaatactctggcatcctttggccctgagaaggtttttaaatgtgttatttacttctctaaacatgacgattgctataaaaataaacaaaagtttag

SEQ ID NO: 5977 - DNA, 456 bp, Homo sapiens
ctgagacccggtgctctgggagccaggccctgagtgggtgccagaaggcttgctccaatgccactgagccctgctccctctgccactgtggacacatcctctccaccctctgggcctcagtgtcttgatgtatcattcatggagcaggcaaaaccagacgtctgggaagaccgtgaacttaaggagtctgattctccgacacaggctggtggaccacctaccccactgagaccacctctcagggtgcctgccctggttcctccccagcctgagtcagctgtctggactgcaaggaggctgggcacgggggctcacgcctgtcaccccagagctttgggaggccaaggtgggaggatcgcttgagaccaggagttcgagaccagcctgggcagcatagcaagatccccatcttttaaaaacaaaataaaacaataaagactgcaaggaagactgagg

SEQ ID NO: 5978 - DNA, 82 bp, Homo sapiens
tgccgcctggcagactcgccatcccccaacgacacagggcaggacagcagaggacgtgctgggattaaacacattccccctc

SEQ ID NO: 5979 - DNA, 970 bp, Homo sapiens
ggggtcttggaggcagggctgtcccacagggcgcccgccgacctgcacctgtctgtgaagtatgtagggtgggcagaagccacagtcgccgccgccaggggcttgctcctggctctgtcctttgcttccctccgtcctcgctcagttgtgatccagcagcccccctccccactgcctccccagctctcagtgaccccgactgtctcctgacttagccgaggtaaggtcagtgcagcagacagggccagactggggtgtggggggctgagctgggcacatgagtgagggctctggcttactgggaaacagcgattgacctgtgcttctgacagcccccgagacaccttgaggaggccgctccttcccagacacacccccacgcccccactggacggcattggaggaagggacagctgcttgggttctaatgctcctgctctcttctctttcccctccaaccagttcaatctcatccctcccagcagctccccttccaccccccggggaactgaagattgtcctggccgcgacctgagacctccatgagtggagggaagagtgatctatgtctcttcccccagcagctcggaccactcccagccccccatccccccgttccccaggggagctggggaattcctgccaagcaccttgaatgggaggggcctcacagagggcagggccagggtccagcaggggtggggggttcctgctctgcccctgcccgtccccacccagtcttgccctcccatcctctcatctattcccccgctggagacggaagatcttttattttctattatttataacttcagacttgggccccctgttctttctttcccattaacttgagtgacctgtgtgagagacagacagatgccccacgaggatggctggacaaggacttttactttttattacataaaaatattaaaaaataaataaaaaaaataaaattttaaactaactt

SEQ ID NO: 5980 - DNA, 214 bp, Homo sapiens
gctctccactctgtttcccgcctgggccatccaaccttgaagtcctaaaccacacctcagtcactaaaggtctgtttaaagttgttctggttgattgcttgttgccacaaaggtgtgttgagcccattcatttgctgattatatttctgagctgctaccacatgacagacacaaggctcagatgaagaggtgaattgaacacgttcctgacctc

SEQ ID NO: 5981 - DNA, 741 bp, Homo sapiens
cccaccccagccccctgaacccccttcatggacagatcccccacagcctggggcagaagaggcgtcgagggcgccagaagtggcggcagcagcagccgcagcagccaaagagaggcaagagaaagagaaagcgggcggtggaggggtcccggaagagctggtccccgtggttgagctggtccccgtggttgaattggaagaggccatagccccaggctcagaggcccagggcgctgggtctggtggggacgcgggggtgcccccaatggtgcagctgcagcagtcaccactagggggtgatggagaggaagggggccaccccagggccattaacaaccagtactccttcgtgtgagccaaccccacccgctccaccctttttaaaccccccagccctgctcgtgagattgggctgggtagggacagaggaggccgaaatccctcccccatgcttcctgacccttgttggccaagggcatctttgatggtacaagcagaggctcgggagaggctcccgtcacacactacaggtcccctccccagggcaggggatttgggctccatgagctccttgaggggctcttctggtcagccccaccctgggggccatttccccattaactacccccagcccgaggcagggtgagggggaagggctgtcagttacattaaggtggttgttgttgttgttttaaacaaaatggagaagcataaataaataaaaaggtttatctcggttct

SEQ ID NO: 5982 - DNA, 330 bp, Homo sapiens
atccagaagatgaaagaaggaagtgagcatccttttgctctgtcctccccaccccgatagtgacacatcttcaggcagagctgtggcacagacccccgtcctgtcccccacacccgtgtcatgtgtctgtttataaacatgtccccttccctttccttccccctcggccacccgcctccctctcaaccttgtaaattccccttcccaaccccgaggggcttgcagggacaaggcgaccgactgcgctgagctgcttatttattgaaaataaacgacggaaaagtctggccttgcctctgtgcaagcttggaggcctgggtcgccgctgtg

SEQ ID NO: 5983 - DNA, 200 bp, Homo sapiens
cctggatctcctcaagtccccaagattcacacctgactctgaaatctgaagacctcgagcagatgatgccaacctctggagcaatgttgcttaggatgtgtgcatgtgtgtaagtgtgtgtgtgtgtgtgtgtgtgtatacatgccagtgacacttccagtcccctttgtattccttaaataaactcaatgagctcttcc

SEQ ID NO: 5984 - DNA, 2581 bp, Homo sapiens
caccccactccctgtttgacggcccagcctggacttggggagaatgactttcccttttttgccccataagggctagcataagctgaggtagaacttatctttaagctgcagcaaaatcaaggagtgacttttgtcccctctcctgttgaccctggtttagagccgttaaccacttggtgagttatgtgggtgttgttgccctgggtggcctgtggctccgtccacaagtcatgctgagttttgcagcctctgtgacttggagatgtcccttcacccctcccctttcaccaccatcctcttttcctcatggaaatgtctgctttatgaaactatgcacatattgaaagtgagttgaaacaaatgagggttgggtaggagcttccaggcctgggatttacaccacgcctagcccagcagaggccttagtcccatttggggcttgggagtgacatttgcttgaggcttatacactggtgtggttgcctggcttgcaggaaatgaccaagctcacacatgctggctgaagcgtaagcagacaactgaggtactcttttgaaggatgaaggtggtggattctcagccctgggggtcttcctcacctgaggacccttcagagccaccctttctagtttgcatttcctggtgcacacatttaaggcataacagcacattcatccctttggtttgggatctcaggaatacagtcccatgcaaagattctctggttttatggcttttttccctttctttacaccatcctctcccataagcacccatgtctttgaatatgaatgtatttgtaaaataccacgtttcatgtgtgaatatgtgcttttactgtacatagtgctattgtgcaataggtcttatgctgttttcactcaatgtgtgctaagatctagccccattgactcttctagaaatgcagtattgctttgacctgccatgtggcactccacaatgtcaattgcagtttacacacattgcctaaagtgggggacacctgggtgcccctgaccccttggcaccggatacaggccacgataaacatcctttcgtgtgttcccttctgtgcttgtgtggcatgtgtacccaggatgggcctataggtcacagaggtcagtttctctttggttttccagattttctttagaacggtgactgaccctcctacttgaggccgcccttttctccttatccttgccagcacttgtattgccagactacctaatttttgccagtctcatgggtagatagtggtgcagtgctttaacatacattcatctgatcagcattaatttggggaattttttcacttagcctttctggtttcccttcctgtgcattgcccattttctcatggagtttcttatcttttttggtttattctcaggagttgcttgtacattcttgggcaattgcagataattccaagaatgcatatttgggctgggtatggaggttcactggtaatcccagcactttgggaggcccaggcagaaggatcgctgcagcccaggagttcgagactagcctgggcaacatagcgagacctcgtctctacaaaaaaaaattaaaaagggggctttgggaggccaaggcgggcagatcatgagggcaggagattgagaccctcctggccaacatggtgaaaccccgtctctactaaaatacaaaaaattagctgggcatggtggcgcacacctgtagtcccagctactctggaggctgaggcaggggaatcgcttaaacccaggaggcggagattgcagtgagccaaggttccaccactgcactccagcctggcgacagagcaaggctccactcaaaaaaaagatttaaaggggaaaaaattgaaattttctttgtatctaggggtatccgtcactgaacagaaattcttaattttggctaggcgtgatggctcaggtctgtaatcccagcactttcggtggccggggtgggtggatcacttgaggccaggagttcaagaccaccctgaccaacttggtgaaatcccatctctactaaaaatacaaaaattagctgggtgcagtggcgcatgcttgtaatcccagctactcaggaggcagaggcaggagaatcacttgaacccgggaggtggaggctgcagtgaacagagacagtgccactgcacatcagcctgagtgacagagagactttgtctcaaaaaaaaaagaaaattttaattttaatgtagacagtatgaattatcttgttctgcagttggttgctttttgattgcttatttaatagagttgttaagatattttacatcttctcctgttagctgttcagcttttcctttcatattgagaacactacacagtgctgaagtccagctggtacacaccggggtgacaccttggctgcatctgttctcaacagtcagacacttcttctaattggttgatgctgggctgtactggttgctaaatattgcacatcattttaaaactatttgagatgcacttttgtactcaggaggccaaggcaggaggattgcttgagcccaggagtttgagaccagcctgggcaacacagcgagaccttgtctctt

SEQ ID NO: 5985 - DNA, 237 bp, Homo sapiens
gaggctgccgctcacctacctgcacatctgccacagctggccctgggcccaccccacgaagggcctgggcctaaccccttggcctggcccagcttccagagggaccctgggccgtgtgccagctcccagacactacctgggtagctcaggggaggaggtgggggtccaggagggggatccctctccacaggggcagccccaagggctcggtgctatttgtaacggaataaaatttgt

SEQ ID NO: 5986 - DNA, 587 bp, Homo sapiens
tggaggccgagtctgtcctggaaccaggcttgcctgggacggctgagctgggcagctggaagtggctctggggtcctcacatggcgtcctgcccttgctccagcctgacaacagcctgagaaatccccccgtaacttattatcactttggggttcggcctgtgtcccccgaacgctctgcaccttctgacgcagcctgagaatgacctgccctggccccagccctactctgtgtaatagaataaaggcctgcgtgtgtctgtgttgagcgtgcgtctgtgtgtgcctgtgtgcgagtctgagtcagagatttggagatgtctctgtgtgtttgtgtgtatctgtgggtctccatcctccatgggggctcagccaggtgctgtgacaccccccttctgaatgaagccttctgacctgggctggcactgctgggggtgaggacacattgccccatgagacagtcccagaacacggcagctgctggctgtgacaatggtttcaccatccttagaccaagggatgggacctgatgacctgggaggactctcttagttcttaccttttgtggttctcaataaaacagaactt

SEQ ID NO: 5987 - DNA, 404 bp, Homo sapiens
gaggggctcctggagtcactgcagagggagtgtgcgaatctaccctgaccaatgggctcaagaataaagtatgatttttgagtcaggcacagtggctcatgtctgcaatcccagcgatttgggaggttgagctggtaggatcacaataggccacgaatttgagaccagcctggtaaaatagtgagacctcatctctacaaagatgtaaaaaaattagccacatgtgctggcacttacctgtagtcccagctacttgggaagcagaggctggaggatcatttcagcccaggaggttgtggatacagtgagttatgacatgcccattcactacagcctggatgacaagcaagaccctccctccaaagaaaataaagctcaaaataaaatatgatttgtgttcatgt

SEQ ID NO: 5988 - DNA, 93 bp, Homo sapiens
tcctcagtgtccttaccccctcctacctcttttctgtgccacctgctgtgggtccagcaggtttttacttgagtacaataaaaagtctgagtc

SEQ ID NO: 5989 - DNA, 5569 bp, Homo sapiens
gtgtcggtgaatagtgaggctggaggccggaatctcagccagcctccagcaccttccctctcaccatcccactgccccctcgctcccatgtttccacccggcaccctgatcctcacccgaatctcctttttttttttcttttgagacagagtttcgctttgtcgcccaggctggagtgcaatgcacgatctcagttcactgcaacctctgcctcctaagttcaggcgattctcctgcctcagcttcccgagtaactgagattacaggcacccaccaccatgcccagctgcttttttgtatttttggtagagatggggtttcaccatgttggctaggctggtctcaaactcctgacctcaggtgatctacctgcctcagcctcccaaagtgctgagattacagacatgagcctccgcgccttgcctcctcacccacctcttcactctgaatcctcatgaggcttctcagccctggatttcctgctgccatcctcacccagcacccacaactagcgcctgggcagggcagggctggcacctctcaacgtctgtggactgaatgaataaaccctcctcatccacccctatttatctccatcaccatttccccctctttcttgttcctggaaacggctgctgagtctccatcggccaaacttatctgccctgtgatttctttgacaattctccttttcccccagaacccaccctgggttgaccagagtctgggaagaaggacaagagaacccggcaaactccctcctaggattaactttgtaaagcacccttgccctgtagctgcaagggctgtggaacctgggcagcccgcaaccacctttagctctgggccccccaggccagcctggagcatggctgggtggggccaccagcccatgctctcaggcgggcctgtgatctttcccagggcacatggactgtaggctggccctggcccacaccaccacactctccccagccatggacagaggcagccagaggcctcacggtttctcctccgagtttctggctgggtgtagttctcagaaaccccagtgcctgcgtgtgtccactcgtgggtgtggtttgtgtgcaagagctgaggatttggcgatgcttgggaggggtagttgtgggtacagacggtgtgggggtgggaagtggtgcagagactgaagagggtcaacctgggcatgggggacacagggactgctgagaacgtgcgtgtcatctttgctctgatggggtggacatagcagaaaatctaactctgtctgtagccccatacagaatgccagggtgagcacagtggctggtgcctttaatcccagcactttggaaagttgaggcaggaggatcgcttgagcccaggagttcgagtctgaagtgagctgtgattgcaccactgcacttcagcctgggcaacagagtgagcccctgtctcaaaaaagaaaagaaaaagaaagccaggcttcatggaaagatcgtatgtgtgacccaaatatgagttcttcagctcagccatggtaatcccttccttgaagtctccatttctgcagtacacatgcatgtgcgctctctctctctctctctctctcacacacacacacacacacacacacacacgcgcgcgcgcgcgcgctctcctgcgaacagaggcagggggagaggggtttgccctggtctcggggactggtctggctggcgcttccccactgcacgtttccaggtttagtttgtctgtgtctcctcttccatcccaggggctgagccccttccatcctccaagaggaaccagtgagagtgagtgaaggaggggcctggagccagggacttcccctgtggggcctgggtggagaggggagaactcaatggtgctgcctttgagaccagcccaggctacagcccaggagcacacatgggccagggcagttggtatttcccgaggacaaagaggaaattttcaaagaggaagttgttgagttagagcttgcggtggctgagagcagacaggttgacctgcaaaaaaagacaggggaggcatgtgagtgtgacagccctgctctgtggcctgggcaggagatgggggaaagggtcaggtgggggatgggctcgtgcagtgggagaggagacggagggagggagcgggaaggggcttgcttagtgggtgggaagagctgagctcggatggaaccagcttctaccagccaggctgggcacccactgggctgcatctggtggccttttctgattgctatttggactcactgcagctgcagaatgacagaggccatgtccaaaatcccttagagacactgttgtcttagagttgttaaaataagagcccccatatcaggtttagaaaatactgtcaccgaacgaacgtcgctgtcctcagctccacctccctttcctttgacagatatggttgttttctaagccaggactggttttagtcaggtcctgggcgaatcctgaaaaaaagaggtagtacgggtaaggaaggcacccaacagggctttcacaatccagaaaatatcaaaatataagtgttaaaagagaggcacaggccgggtgcggtggctcacgcctgtaatctcagcactttgggaggccaaggtgggcagatcatgaggtcaggagtttgagaccagcctggccaatatgatgaaaccccgtttctactaaaaatacaaaagttagccaggcatggtggtgtgctcctgtaatcccagctacttaggaggctgaggccagagaattgcttgaaccctggagtcagaggttgcagtgagccgggatcatgccactgtactccaggctgggtgacaaagtgagactgtctcaaaaaataaaaataaataaaataaataaaagagaggcacaaacagtgttatgaatgcaccaaggaaaatggtgcattcataactctcaggtgaagcctaccaagccatgcgtgtgtgcacatatgtgtgtacgtgtgcatgtgcgtgcgtgcatgtgcgtgcgtgcatgtgcctgtgtgtgtatgtgtgcacatgtgtgtgcgcatgtgtgtgtgtgcgcgcatgtgtgtgtgcatgcatgttctcccatgcatgtgtactgtggcaagggagactttgaggaagagattccagtggctgagcagaagggctcgcattgccctggcgaaaggttggaaggcttcacctgagagtgtgtcgtggcctttgtcatatccactgcttgattcctttctttaaaaattatttttattgttttctacatatgagaaccaccacacctggctaatttttgtattttttgtagagatggggtttcaccatgttgtcccggctggtctcaaactcccgggcacaagagatccacctgcctcagcctcccaaaatgctgggactataggcatgagccactgcacccagccactgcttcattcctggtggctgctgtgcctggcatgttgcagatcctccatgaatatgcatttgaatgaatgaatgaatgaatgaatgaatgaatggagatgacgcctcagagattctttcttttgagatgaggtctcattctgtcacccagactagagggcagtggtgcaatcacagctcaccacagcctcaacctcctgggcctcccaagtagctgcgatcacaggtgtgcaccaacatgcccagctaatttttttttttaatttttaatttgtacagacagggtcttgctgtgttgcccaggctggtctcaaactcctgggctcaagtggtcctcccacctaagcttccccaaatactgggattataggtgtgagccactgtgcccaggcttgcctcagatatttgaaggctgggaaggattttgcaaagctgggaaaaggaaaaggcattcccagcagaggggatagcaggtggaaatacataattaaaaaaaaaaaacgtggagcagatccagcgcagtggctcatgcctgtaatcccagcactttgggaggcagagcagggaggattgcttgagtctaggagttcaagaccagcctgggtaacatagaaagaccctgtctctacaaaaacacaaaaaattagccaggcgtggtggtgcatgcctgtagtaccagctacttgagaagctgaggcaggaggactgcttgaagccaggagtttgagaccagcctgggcaacatagtgagaccccgtgtctacaaaaagtaaacatttatatatatattttttaaagtggagcagttcaatatagagtcttttttgaacaaacgtgaaatagatgtcttttttttttttttgagatggagttttcactcttgttacccaggctggagtgcaatggcgtgatcttggctcaccagaacctccgcctcctgggttcaaacaattctcctgcctcagcctcccaggtagctgggattacaggcatgcaccaccaaacccggataattttgtatttttagtagagatggggtttcaccatgttggtcaagctggtcttgaactcccgacctctgctgatccgtatgcctcggcctcccaaagtgctgggattacatgcgtgagccaccgtgcccgacaatagatgtcttttaattttctggaggaaaaagcaaagcaaaagaagcagtggatattttaagactaaaaaggaaaacaaaaaaaggagatagagcaggccagacgtggtggctcaacgtctgtaatcccagcactttgggaggccgaggcaggtggatcacctgaggtcaggagttcaagaccagcctgaccaacatggtgaaaccctgtttcaaaatacaaaaaattagctgggcgtggtggcgggcacctgtaatcccagctacttgggaggctgaggcaggagaatcccttgaacccaggaggtggaggttgcagtgagccgagatcacgccattgcactccagcctgggcgacaagtaaaaaactccatctcaaaaaaaaaaaaggagatagagcaaggaacagtaagaaaatagttgggtgcagtggctatgcggtggcactataggaggctgaggcgggcagatcacctgaggtcaggagttggagaccagcctgggcaacatagacccctatctctacaaaaaatttgaaatatgaaaaattagccaggtgtagtggtgtgcgcctgtggtaccagctactcaagaggcgaaggcagggaagattgcttgagcccaggagtttgaggctatagtgagctgtgatcatgccactgcactccagcctgggcaatagtgtgagactctgtctcaaaagaaagaacatggccaggcgtggtggctcacacctgtaatcccagcactttgggaggccgaggcagtcagatcatgaggccagtttgaaaccagcctggccaacatggtgaaaccctgtctctactaaaaatacaaaaattagccaggcgtggtggcatgcccccgtaatcccagctacttgggggtctgaggcagaagaattgcttgaaaccgggaggcagaggttgcagtgagccgagatcgtgtcattgcactctagtctgggcgacagagcaagactccgtcttggaaaaaaattt

SEQ ID NO: 5990 - DNA, 577 bp, Homo sapiens
tcctaaaccggaagaggatgacaccggccatgggttaacgtggctcctcaggaccctctgggtcacacatctttagggtcagtggccaatggggcacatttggcactagcttgagcccaactctggctctgccacctgctgctcctgtgacctgtcagggctgacttcacctctgctcatctcagtttcctaatctgtaaaatgggtctaataaaggatcaaccacatggggttctgcggtgataatgagcacatagtgaggggtcagcaaatgtcagaagttacctgggacagccgggcacgatggctcacacctgtaatcccagcactttgggaggctgaggcgggaagatcacttgagttcaggagtttgagaccagcctggccaacatggtgaaaccccatctctaccaaaaatagaagaattagctgggtgtggtggcacgcgcctgtaatcccagctacttaggaggctgaggcaggagaatcgcttgaacccaggaagtggaggttgcagtgagctgatggtgccactgcactccagcctgggtgatagagcgagactctgtctccaaag

SEQ ID NO: 5991 - DNA, 950 bp, Homo sapiens
gctccaagttggttgcgggggagaggggagaatggagtagagtcccttggtacaagctcctctcccccctcttttcccaccaactcctatttccctaccaaccaaggagcctccagaaggaaaggaggaagaaatgttttcttaggggaattcgctaggttttaacgatttgtttctcctgctcctcttctgtcagacctgaccccacacaaacctgtcccctcggttgtgttgaagtcccctggacagtgggcaggggtggcagaggacacgagcagccactgcccgtaccccctctcctctctgtaagcccatgccctgtcttcccagggacttgtgagcctcttccctcgacggtcctcttctctccttccagtcctctccccctgctgtctgcagcccctccccggggagttggtgctttcttttccttttttttttttttccagggggagggaggagaggaaggagggggatcagagctgtcccaaagagggaaagcggtgaggtttgaggaggggcagaagcagggccggcaaaggttgtaccttcataaggtggtatggggggttggggtcaggccctgaacatcgtcctacttgagaatctgtcaggggaaaaagtcaaggggagcaggaggaagagccaggagggccagaggcagagaagagatggagtcttaggggccagggtgagcgaggggtccagggcctagaggtgcttcctgggggcgggggaatgcagccagtgtccccctcccctcttccaccccagctccagccctggtcttgtcttttcatccctcttccccacgacagaagaagttgtggccctggccatgtcatcgtgttcctgtgtcccctgcatgtaccccaccctccaccccttccttttgcgcggaccccattacaataaattttaaataaaatcctgtttctggctctggattg

SEQ ID NO: 5992 - DNA, 1143 bp, Homo sapiens
ggggctctgccccgcatcccaagacttttcttcctgttgggagctgccttgggcccatccctcccctggggggagcccaactgatggccctggcccccacccctaaggaccaagggagcctgagcggccttgtttacagcttctgtcctgctcctgcatcttgccaggctcctctgccaactgtaggcctgcctcatccctgcactggttccaacctccctgcactaatgcctgcatcccctccggcctcttggccccctatccctgcacttctggaaacctccctgcactctggaaacctccctgaacacctccccaactctgcgctctcagcctccctgcatctctcctggcctccctgcacttcttccagccccccaaattctctggacctccaccctggccgcctcctcccaactttcattgtcttggcatctctcaaccctcagtcctctcttccttcccttctttatcatctcccctttcctctccacgtcccgcccccttcctcttcctgcctcctcatctcccttaagcatcctcttctccaacctcccgtcaccgtttactctgcaaaattgacagcacttagacgaggcttgggggcagggagcagtgttgggagagggctccccaaccccaggctcggactgttctctgctgggaccacccagggtcggacacccaagggtgcctggcaggtcgcagagttggcaagccgggcctcgtatggggactcgggtgagggtggcgagtactggttccgaacgcacgcaggggagaagggagggacgcggcgctgacccttccaggtcagctggagttgacccgcccacctgggcttttcaaccccagtccgcgagtttctttcttgaaggtgtgggggctagattcattcacgtgcttcgtaatgaaataatccaaaaaataggaccaaagcgcccactggcaggagcgagggcggggcgccgcgctctataattattttctaagatgatgggggaggtttgttgcacgcgacagcccgctgaggaggcggggaccgagctacaacgcggttcggatttggcgggggtttttttccttaaaaaaaaaaaaaaaaaaaaaaaaaaagtctgggggaagaaaaaaactaaaattctt

SEQ ID NO: 5993 - DNA, 359 bp, Homo sapiens
ttcccactgctcctgcctctagggtgcagtgtccgtacctgctggagcctgggccctccttccccagcccagacattgagaaacttgggaagaagagagaaacctcaagctcccaaacagcacgttgcgggaaagaggaagagagagtgtgagtgtgtgtgtgtgttttttctattgaacacctgtagagtgtgtgtgtgtgttttctattgaacacctatagagagagtgtgtgtgttttctattgaacatctatatagagagagtgtgtgagtgtgtgttttctattgaacacctattcagagacctggactgaattttctgagtctgaaataaaagatgcagagctatcatctctt

SEQ ID NO: 5994 - DNA, 31 bp, Homo sapiens
ctcctgattaatacaatggaagtttctgggc

SEQ ID NO: 5995 - DNA, 157 bp, Homo sapiens
aggaaggtgctcccttcacacacccaggctggagagacactgcgctcagggacggcttgatggtagccaggacctcctctctactgcgggggtgggcgggggcggaggatgggaactggctagtgagcactgaaatataaattctgaatcctctcct

SEQ ID NO: 5996 - DNA, 103 bp, Homo sapiens
gtgtgaatcaacttcttgggccttggctctgagttggaaaaggttttagaaaaagtgaagagctggaatgtgggggaaaataaaaagcttttttgcccagtgg

SEQ ID NO: 5997 - DNA, 692 bp, Homo sapiens
ggtgcagcggggaggagcagatgagctgggcagggcaggggtgggtggagcctgaccctggagggcactgagctggaggcccctgcaagggtaggggacaagatgtaggctccagctcccctcagacctcctcatctcatgagcttcttggggctggccagtggcccagggccagcttggcgataggtgcctcaaggctgcctgggagccccgcctccctaccatggtgccaggggtctccctccgccacctaggaaaggagggagatgtgcgtgtcaaatattcatctagtcccctgggggaggggaagggtgggtctagacatactatattcagagaactatactaccctcacagtgaggccctcagacctgccacagggcagagcaggtctggggcctgaggcagggagaatgagaggccaccttactggcaggaaggatcaggatggggtcttggggtcaggatgcctgggtctcttcccgtaactgtctgacgtcctgtgccgtcttgtcctttatctttttttttttttttttaattgggatcagggctggggcggggaaacaagggaaggaccttggaaggggctgctcccaggcctggggggcagtcgtgggagcccctctcagctgtggggctggcacagagccccaggcaagcttttaataaactgttggttattctaacag

SEQ ID NO: 5998 - DNA, 418 bp, Homo sapiens
ctgactccagcccttccagcccaaatctagagcattgagcactttatctcccacgactcagtgaagtttctccagtccctagtcctctcttttcacccaccttcctcagtttgctcacttaccccaggcccagcccttcggacctctagacaggcagcctcctcagctgtggagtccagcagtcactctgtgttctcctggcgctcctcccctaagttattgctgttcgcccgctgtgtgtgctcatcctcaccctcattgactcaggcctggggccaggggtggtggagggtgggaagagtcatgttttttttctcctctttgattttgtttttctgtctcccttccaacctgtccccttccccccaccaaaaaaagaaaaagacaaacacaaataaaatatctgagcggaactgtg

SEQ ID NO: 5999 - DNA, 349 bp, Homo sapiens
ccgtgacatcacgccatgcccaccacggccccgcccggcgccctccccgtgccagcacacacgagtccagcttcctcggaggtgtttattgatgcccagctgccatgctccggccactgacacaaccagaaaaggcgtaaacatgcacgggtgtcccccaggagggtggcaggggccctgccttcaaaccccggccccctccaggggacagttatttaaacgagtggccgggagcatctgccacctgctggggaggcagagaccctgcaatggccacctctttaaaagggcagctgtacagggctaggttttttcaatgaagtttctgtattaaaggagtggctctggg

SEQ ID NO: 6000 - DNA, 201 bp, Homo sapiens
gcggaggtgttcccaggctgcccccaacactccaggccctgccccctcccactcttgaagaggaggccgcctcctcggggctccaggctggcttgcccgcgctctttcttccctcgtgacagtggtgtgtggtgtcgtctgtgaatgctaagtccatcaccctttccggcacactgccaaataaacagctatttaaggggg

SEQ ID NO: 6001 - DNA, 305 bp, Homo sapiens
ccccgcccggcccctgccccctccaacccttctggccctcgcaccactgtgactctgccatcttcctcagacggaggctgggcgtggggggggctgtcctggctctgctgtcccccaagagggtgcttcgagggtgaggacttctctggagaggcctggagacctagctccatgttcctcctcctctctccccacttgaaccatgaagtttccaataatttttttttctttttttccttcttttttctgtttgtttttagataaaaattttgagaaaaaaaatgaaaaaattctaataaaagaag

SEQ ID NO: 6002 - DNA, 111 bp, Homo sapiens
agccccgcagggcctccagcagggtcagccattcacacccatccactcacctcccattcccagccacatggcagagaaaaaaatcataataaaatggctttattttctggt

SEQ ID NO: 6003 - DNA, 408 bp, Homo sapiens
gaggggctcctggagtcactgcagagggagtgtgcgaatctaccctgaccaatgggctcaagaataaagtatgatttttgagtcaggcacagtggctcatgtctgcaatcccagcgatttgggaggttgagctggtaggatcacaataggccacgaatttgagaccagcctggtaaaatagtgagacctcatctctacaaagatgtaaaaaaattagccacatgtgctggcacttacctgtagtcccagctacttgggaagcagaggctggaggatcatttcagcccaggaggttgtggatacagtgagttatgacatgcccattcactacagcctggatgacaagcaagaccctccctccaaagaaaataaagctcaattaaaataaaatatgatttgtgttcatgt

SEQ ID NO: 6004 - DNA, 93 bp, Homo sapiens; identical to SEQ ID NO: 5988

SEQ ID NO: 6005 - DNA, 89 bp, Homo sapiens
gggcacccgcgggcctccgctgcccgacgcttctgttcggcccgacctccaccccggctcccaataaaatttaactgatctttgtttct

SEQ ID NO: 6006 - DNA, 287 bp, Homo sapiens
cgcggtccagggagggcggaggcccaggagaccaaagggaggggctctgccgcttagcagagaagaaagggcctgggaggtggtgggagggagaaggaagggaagaaaggggaggaagaatagatagaaatagggattggagacagtaaccttgaagctcaggaaactgtcctggctgggctgagtcaggaccttgccaggacgggctgtacccctggcttctagaagactgcctagcacacagtaggcattcaatacttgttgaataaataaactggctttcacct

SEQ ID NO: 6007 - DNA, 1042 bp, Homo sapiens
gtcccgcagggctgcggaggggcgcgctggggcttcgacctggctgcactaacccaggctcctcctcgccccggcctccgggtctgggaaattgaggggacggcaggcccggctgccctggaactgggagacagggagaatcccctgccggggtccctggaaacagtgcccaccccacatcactacattccctcggcccgtgttagtgaataaagtattatatcctcaccccacccgtgcctgtgagtgaggtgggtgggagaggaagaaagttggggttctccaggctcaggtgccaagtgagttgtcaaggaaccaaatggggatgtaaacctaaaaggggttcccggcacctcggtttgtgttggttggaggtgatcgcacacttggcccttggttacgtcctcataaccttagacctgaaagggcccataaatatactatgttcacgatcagacacgcactgcattcggcagagctccagtgagcaaggcacgaccctcagatctcagtctagtgaaggagagaaaactgtaataacactacgttaaaggttttaactgctttgttatgtaagcttacccagcccggcgcacagtgactcacgcctgtaatcccagcactttgggagggcgaggctagcagatcacttgaggttaggagttcgataccagcctggccaacatggtgaaacccggtctctactaaaaatacaaaaattaactgggtgtggtggcgggcgcctgtaatcccagctactgagggggctgaggcatgagaatcacttgaacctgggagacagaggttgcaatgaaccgagatagtgccattgcactccggcctgggcaacagaggaagactgcctcaaacaaacaaaaaacaacaaaccaaaccaaaccaaaccaaaaaaatctcaaagcgattggacctagcagctcatgcctgtaatctccagcactttgggaggcggaggcaggaggatctcttgaagtcaagagtttgagatcagcctggagaacaaagtgagacccccatctattaa

SEQ ID NO: 6008 - DNA, 1519 bp, Homo sapiens
gtccaggcctgtgaggtgcagagtgcccagaactggactcaggatgcccagggccactctgcctctgcctgcattctgccgtgtgccctcgggcgagtcactgcctctccctggccctcagtttccctatctcgaacatggaactcattcctgcctgtctcctttgcaggctcatagggaagacctgctgagggaccagccaagagggctgcaaaagtgagggcttgtcattaccagacggttcaccagcctctcttggtttccttccttggaagagaatgtctgatctaaatgtggagaaactgtagtctcaggacctagggatgttctggccctcacccctgccctgggatgtccacagatgcctccaccccccagaacctgtccttgcacactcccctgcactggagtccagtctcttctgctggcagaaagcaaatgtgacctgtgtcactacgtgactgtggcacacgccttgttcttggccaaagaccaaattccttggcatgccttccagcaccctgcaaaatgagaccctcgtggccttccccagcctcttctagagccgtgatgcctccctgttgaagctctggtgacaccagcctttctcccaggccaggctccttcctgtcttcctgcattcacccagacagctccctctgcctgaaccttccatctcgccacccctccttccttgaccagcagatcccagctcacgtcacacttggttgggtcctcacatctttcacacttccaccagcctgcactactccctcaaagcacacgtcatgtttcttcatccggcagcctggatgttttttccctgtttaatgattgacgtacttagcagctatctctcagtgaactgtgagggtaaaggctatacttgtcttgttcaccttgggatgatgcctcatgatatgtcagggcgtgggacatctagtaggtgcttgacataatttcactgaattaatgacagagccagtgggaagatacagaaaaagaggggctgggctgggcgcggtggttcacgcctgtaatcccagcactttgggaggccaaggagggtggatcacctgaggtcaggagttagaggccagcctggcgaaaccccatctctactaaaaatacaaaatccaggcgtggtggcacacacctgtagtcccagctactcaggaggttgaggtaggagaattgcttgaacctgggaggtggaggttgcagtgagccaagattgcgccattgcactccagcctgggcaacacagcgagactccgtctcaaggaaaaaataaaaataaaaagcgggcacgggcccgtgacatccccacccttggaggctgtcttctcaggctctgccctgccctagctccacaccctctcccaggacccatcacgcctgtgcagtggcccccacagaaagactgagctcaaggtgggaaccacgtctgctaacttggagccccagtgccaagcacagtgcctgcatgtatttatccaataaatgtgaaattctgtcc

SEQ ID NO: 6009 - DNA, 101 bp, Homo sapiens
gtgccccatctgttggtcatccatcctgaagggacaggaaacctcccaggcagttatttttttttctctatatttctagtaaagttttcgatatgtttctg

SEQ ID NO: 6010 - DNA, 396 bp, Homo sapiens
gtgggctgcccctccacctaggctttccaccgtggccactccctccatgaccaggcctgactctgttaaccactacttgaagtcttgagggggaaagcctccagggagacataggggccttctcccttcttcccaccaaagtagggggtaggcaactggttgtcatggaaatggggatcatcacagtccccttccccttcaccccacgtggctgggcagtgttaagggtggcaagatagtctctgtccccacccccttgtacttgattccccagctgtctttcacacagccccccacccttaggggaagggggaggggcttctctacaatgaggtttttttcttttttttttttttttaagaagaaaaaataataaacttagtttctgtatgagca

SEQ ID NO: 6011 - DNA, 264 bp, Homo sapiens
gacctcaaccccagggattcccaggaagcagaactctccagaagaagggttttgatcattccagctcctctgggctctggcctctggcctcaggcccactaatgatcctgctaccctcttgaagaccagcccggtacctctctccccactggccaggactctgagatcagagctggggtggaagggagccattctgaacgccacgcctggcccggtcagtgctgcatgcactgcatatgaaataaaatctgctacacgccaggg

SEQ ID NO: 6012 - DNA, 1101 bp, Homo sapiens
acctgaaactcaggggactctggaacaccatggaccctgggggctgtgcccccatctcctccccaccccaggtctagtggccccaccctccattccggaccccatgggcccagcccctgcccatctagttggtttggggaccctggtgcatgctagtgggcatgggatcagccaagcttcgttccatcttttcctaaaggtcagagctgcagcctagggggcactgccctacagaaaaggtctgcctgagaggcctgaggagcccagagcacttgactgagcttcccggaaactggccctaacctgtctgtctccgtggatgcatcctaaccctaaggaaaattccccaggctgtgatctaccctagagaaggctcgctccctgcctactggctcacaaatgaggaccagtgagccatgtccttgttccttgtttgagactgggctgcaggccccaggaagactttccttcacccaccatccccctaacctcggcagggcttctgtcctgtggagttccctggacaccttggtctggctcttgtgccaagggctgaaggaggtaccctcttggcagatgggggcatcacttgcttcctttgggaagctctaaggttgctgcagtcaccttcctcatcttgcaggtgctgaaccaacatcatcagtttctattctaatcaggccccttcccaatctccatttctctgccaagcccatttacccccacctcatgcatcccaaggctctactgggtccctggacctaaccctgctttcatcctggtggccttaactacagtggaggtggaacttcccaggaggggaagggacagaccagccccagccgctgggccaacttccaatcattccagctagaagagcttccccctgacaccctgtgactgagcctgtgtcctgtctgcctgcccagccatgctccatcggctgtgagggcagtgcccggagaggccagagggttggagctgcagggacccgtttggacccacagcctctgttctagagatgcttgtataggctgttaattgtgatgaataaacgttcaaccctcggcctgcagccagagtagccaggccgcgcacccc

SEQ ID NO: 6013 - DNA, 1020 bp, Homo sapiens
gcgccgcggggcagctcgccccgcctcctcccgctgggttccgtctctccttccgcttctttgtctttctctgccgctgtcggtgtctgtctgtctgctcttagctgtctccattgcctcggccttctttgctttttgtgggggagaggggaggggacgggcagggtctctgtcgcccaggctggggtgcagtggcgcgatcccagcactgcagcctcaacctcctgggctcaagccatccttccgcctcagcttccccagcagctgggactacaggcacgcgccaccacagccggctaattttttatttaattttttgtagagacgaggtttcgccatgttgcccaggctggtcttgaactccggggctcaagcgatcctcccgcttcagcctccctaagtgctgggattgcaggcgtgagccactttcccagcctctctttgctttgcctgccccgttctcttaactcttggaccctcctcgtctgcatggtaactccgtctgagtctaccattttcttgctctccctccttccttgggcctgcctcagttccctttggcctccccctttacccagctcttggggtgtctctgttttttccatccccacttcctgccttctcgtggccctgtgtgagcacatgtgtacatctcagccttatctcaaggaggtgacaccttctctccttgtccccatctggctgtctctctgtgcttccctggccaggggcgtgcctgctggtcctatggggggaaggctactctgcatctcagccaccttcctcaggctcactccacctacatccccagtctgccacaccccatccctttgggcctcagccctgtccctttgatgtcctcctttccttcagcccctctgccctgtccctgcacacctccactgcctcccagcagatctgtggagacaaaacaagcaacaccttaaaagagttttatttctgaaaataaattaattttttgtaaataaaatgtttaaaaataaaaaagaaactaaagtt

SEQ ID NO: 6014 - DNA, 1093 bp, Homo sapiens
gactggtgttagccaccgctcactgcaagcactgcctccctccggggtctgtaagaggccgcaggggcctacagacctcatccccccatcccctggctggagccacttccagtggccactctcaggcagagttcagattcctgcccgcagggtcctctgggctgggccttggggcagctcccacattcccagggattttccccatcagtctgtcccttgggttttgcaagctactctgcacctgggctggcctcagttgaaggatcatgcagtagatagaggggaggcagggagagcttgtgggaccttcagtgctgactttagccaccatttccattcctatacaggatgtgaaggtcagaaggcagccaattgttggtttaatttttttttttttttgagacagtctgtttcccaggctggagtgtagtgatacagtcacagctcactgtagcctcgaccttccaggctcaaaagatgctcccaccacagcctcccaggtagtgagtagctggtactacaggtgtgtgctgccacacccgactaatttttttgtagagacggggtttcgctgttcccaggctggtctcaaactcctgggctcaagtgaacctcccgcctcggcctcccaaagtgctgggattcctttctttatttctgtagaatctattttatggttggcattttgggggaagatttcgatgggttccacattcttgctttagttgttgtagagggatttgggtgtttctacccaaggcattggtctagcttttcctacaatgaacctatctttggaggttcaagctccccaccttcccccactgtggtgacctgtggccacttgcagaagggatggtgcctgacccactgccctagccccacgctatgcaccaaacttgttctccccgtcctggtccagggctggggtctttagagactgacagcctctgccccaggcctgagtccttagcaagggttgggtaaggaggttttaagggagaaggtccagtccttagcccttgaaatacaaagctcttctgacactgaatttggatgcaccttgttttatataataaatcgtgtttcacag

SEQ ID NO: 6015 - DNA, 637 bp, Homo sapiens
ggtggggcaggatgggtgcccacacccctatttattccccctggtgccctgagctcccagcacccccccagccttagtgggctcagcagggcccacatgcccccatctccaagcgtggggttgggggccccaagcccagcgagggagcctcagtccctggaggcagcttctgcctctcctgtcacccctgcccaccaccccctgattgtttttctttgcggagaagaagctgtaaatgttttgtagcagccagcagctgtttcctgtggaaacctggggtgccggcctgtacagattctgtcctggggggctacacagtcctcttgctttgtgttaatggggacttccccttacgccctgcgtgtacccctccccagtttaggggtctctggggcagtggccatgttctccccctgggggggctctgcacccccagtcctggggactccgtgcctggaaccctgcctcatctgttcctgccagaccctgagggtcacccttccaccctggtgtcactccccggctcagccaggccaggatggcggggtgggtcccttttgctgggctggactgtacatatgttaatagcgcaaacccgacgccacatttttataattgtgattaaactttattgtac

SEQ ID NO: 6016 - DNA, 967 bp, Homo sapiens
cggtggggctggggcctggaggcccagatacagcacatccacccaggtcccgagccctcacaccctggacgggaagggacagctgcattccagagcaggaggcagggctctggggccagaatggctgtccttgtcgtagagccctccacattttctttttcttttttgagacagggtcttgctctgtcacccagactggagtgcagtggtgtgatcatagctcactgcaccctcaacctcctgggttcaagcaatcctcctgcctcagcctcctgaacagctgggaccacaggtgcacgccaccacacctggcttttttttgttgtttttagagacagggtctcactatattgctcaggctggtcttgaactcctgggctcaagtgatcttcccacgtgggcctcccaaaacgctggaactacaagtgtgagccaccgcgcctggcccaagccctccacattttcaatccaggagccttgagtctgtgttgtgtcctgacacctccaagttctagggccgtcaggacacgggagggtttggggacagagtgtccttcctctgtcctctcatcccagtcctgatggccgcttggtgagtgtctggtgccctggtggcctgccccagctctcttctggctttctgagcaggaagcgagcagaggctccacaggcttacgctgctctcctgacagccacacgcgaccctcggtgcagagtgcagaggcggctctggttcctccagccacctcagtccctctttgggaggtgatgttcccattgtttttcaaaggcctcaccttcaactgtctgtcttagaattcccctctggagggctatggcctccctatgctttcacttcccacctctctacctaagttccttcccagcacatcgccagccctgggcctggggatgtccccaatgctgtacctggctgaccccggattaaaagcctcatccacgaccg

SEQ ID NO: 6017 - DNA, 360 bp, Homo sapiens
tgtcgcacattgttggtgagatgttgtgggctgccccctggcctgccccagccctggccccagccctccctcctccctcagaccctgttctccctcctttccttacaggcactaggagcaccaggaacccagggcctggccttctctcccagcagcctggggggcagggcagagcctccagtcggaccccttcctcacactggcccctatgcagaagggcagacagttcttctggggttggcagctgctcattcatgatggcctcctccttcaggcctcaatgcctgggggaggcctgcactgtcctgattggccgggacacacggttttgtaaaaaattaaaaaacaaaaaaagagcat

SEQ ID NO: 6018 - DNA, 413 bp, Homo sapiens
acttcaagtctccaaagatcagaatctgggggagggagcgcgtgcagggaggggcttgatctccacattttctcaggagtagttcgggcatccccatatcttctcctctccccttgtgaagaggacccagatctggcttctttcccaaggagggggtggggtgttcctcgcgtccctgtccttgaaggacctccttcccccagcctcatcaccgtgctcttctcagcgccaccctcagcagccagattgcaacaccagggagaggcggatgcagagccccaccggtgggaaagttgcctgtggaagggagccttttgctacaatttgtaacttattttctaaagtctattttgtaacaatttatttaagtttaaaaaaaggaaaactgctgccccccaaaaaaagaaattttc

SEQ ID NO: 6019 - DNA, 333 bp, Homo sapiens
ccccacagcctttggcctgctcacccgaccagcctgggccgcattccctgcaggacctcccgggtcaggcagggcggccccctgctccacacactgctgcatcttgggtctcagggacccagacagatggacttacatggagctgggcactgccctgcctcaacagggtccattgcctcctcgcctccagaacttggagcagggaagtgggcaccctgaggcctccagcaccagttccgtcattctcgttcctggggaacccccactctgacctgttattaaagttcacattttgaatgccctctcgggccccgtgtgtggggagggcaggtg

SEQ ID NO: 6020 - DNA, 125 bp, Homo sapiens
gcagcctggcccctgctgtcggacctgagcctcctggctcccagcctgtaaatatgtatagacctgttttgtcatttttttaataaagtcagttctggtggccctggactttggaggggaagggg

SEQ ID NO: 6021 - DNA, 338 bp, Homo sapiens
ttagcctggctccccaggttctggaacagctttttgtcctgtacccagtgttaccctcgttattttgtaaccttccaattcctgatcacccaagggtttttttgtgtcggactatgtaattgtaactatacctctggttcccattaaaagtgaccattttagttaaattttgttcctcttcccccttttcactttcctggaagatcgatgtcccgatcaggaaggtagagagttttcctgttcagattaccctgcccagcaggaactggaatacagtgttcggggagaaggccaaatgatatccttgagagcagagattaaacttttctgtcatgggg

SEQ ID NO: 6022 - DNA, 434 bp, Homo sapiens
gccgccggacgggtagtggaggggcgcgggggcctgggttgaagcttaggtctccttggtcgggtctgacgggagaagggtggggagcgggttgccagggcccagggggctgggaactgggggatctcccagaatactgacaagcgtggggtaggactggcttggtggctcatgcctgtaatcccagcactttgggagacggaggcgggtggatcacctgaggtcaggagttcaagaccagcctggccaacatggtgaaactcctctctactgaaaatacaaaaatgagctgggcgcggtggcatacgcctgtaatcccagctagttgggaggctgaggcaggataattgcttgaacccaggaggtggaggttgcagtgagcagacattgcggcactgcactctagcctgggtgacaagagtgagactctgtct

SEQ ID NO: 6023 - DNA, 1183 bp, Homo sapiens
cggctccttcccgacagagctgcctctcggtggccagcaggactctgcccagaccacacgtagcccccaggctgctggacacgtcggacagcgaagtatccccgacaggacgggcttgggcttccatttgtgtgtgtgcaagtgtgtatgtgcgtgtgtgcaagtgtctgtgtgcaagtgtgtgcacatgtgtgcgtgtgcgtgcatgtgcacttgcacgcccatgtgtgagtgtgtgcaagtatgtgagtgtgtccaagtgtgtgtgcgtgtgtccatgtgtgtgcaagtgtgtgcatgtgtgcgagtgtgtgcatgtgtgtgctcaggggcgtgtggctcacgtgtgtgactcagatgtctctggcgtgtgggtaggtgacggcagcgtagcctctccggcagaagggaactgcctgggctcccttgtgcgtgggtgaagccgctgctgggttttcctccgggagaggggacggtcaatcctgtgggtgaagacagagggaaacacagcagcttctctccactgaaagaagtgggacttcccgtcgcctgcgagcctgcggcctgctggagcctgcgcagcttggatggagactccatgagaagccgtgggtggaaccaggaacctcctccacaccagcgctgatgcccaataaagatgcccactgaggaatgatgaagcttcctttctggattcatttattatttcaatgtgactttaattttttggatggataagcttgtctatggtacaaaaatcacaaggcattcaagtgtacagtgaaaagtctccctttccagatattcaagtcacctccttaaaggtagtcaagattgtgttttgaggtttccttcagacagattccaggcgatgtgcaagtgtatgcacgtgtgcacacacaccacacatacacacacacaagcttttttacacaaatggtagcatactttatattggtctgtatcttgctttttttcaccaatatttctcagacatcggttcatattaagacataaattactttttcattcttttataccgctgcatagtattccattgtgtgagtgtaccataatgtatttaaccagtcttcttttgatatactattttcattctcttgttattgcatcaatgctgagttaataaatcaaatatatgtcatttttgcatatatgtaaggat

SEQ ID NO: 6024 - DNA, 1090 bp, Homo sapiens
tcccctctttgccttggacttcttctcccccgcgagttttccccacttacttaccctcacctgtcaggcctgacggggaggaaccactgcaccaccgagagaggctgggatgggcctgcttcctgtctttgggagaaaacgtcttgcttgggaaggggcctttgtcttgtcaaggttccaactggaaacccttaggacagggtccctgctgtgttccccaaaggacttgacttgcaatttctacctagaaatacatggacaatacccccaggcctcagtctcccttctcccatgaggcacgaatgatctttctttcctttctttttttttttttttcttttcttttttttttttttgagacggagtctcgctctgtcacccaggctggagtgcaatggcgtgatctcggctcactgcaacctccgcctcccgggttcaagtaattctgctgtctcagcctcctgagtagctgggactacaggcacacgccacctcgcccggcccgatctttctaaaatacagttctgaatatgctgctcatccccacctgtcttcaacagctccccattaccctcaggacaatgtctgaactctccagcttcgcgtgagaagtccccttccatcccagagggtgggcttcagggcgcacagcatgagaggctctgtgcccccatcaccctcgtttccagtgaattagtgtcatgtcagcatcagctcagggcttcatcgtggggctctcagttccgatttcccaggctgaattgggagtgagatgcctgcatgctgggttctgcacagctggcctcccgcgttgggcaacattgctggctggaagggaggagcgccctctagggagggacatggccccggtgcggctgcagctcacccagccccaggggcagaagagacccaaccacttctattttttgaggctatgaatatagtacctgaaaaaatgccaagacatgattatttttttaaaaagcgtactttaaatgtttgtgttaataaattaaaacatgcacaaaaagatgcatctaccgctcttgggaaatatgtcaaaggtctaaaaataaaaaagccttctgtg

SEQ ID NO: 6025 - DNA, 377 bp, Homo sapiens
taatccactttcctgtttatctctaccactgtgggctggacttgcttgcaaccataaatcaacttacatggaaacaacttctgcatagatctgcactggcctaagcaacctaccaggtgctaagcaccttctcggagagatagagattgtaatgtttttacatatctgtccatctttttcagcaatgacccactttttacagaagcaggcatggtgccagcataaattttcatatgcttaagaattgtcacatgaaatgaggatgtttatagcacactttccttgcgtggaagagctataacccagggacctgagtgcctctctgggaatagtcgggggaacctatttgtgggcattgaaaaagttttttcactttc

SEQ ID NO: 6026 - DNA, 1965 bp, Homo sapiens
ctgctccccaccagcacgctgacctgtgaaccccagcctcaccatcacccccagcactgccagggactgccctgtctgctgtgccctgaccacaggctgcttcatggcgttactgctagaccaaggagcccttctgctggccctgtccgggcataacagaaggctcgcactcttgtcttctggtcacacctcactatgtcccctcagctcctatctctgtatggcctggtttttcccaggttatgattatagagcgaggattattacaatattgggataaagagtaattactacaaactaatgattaatgatattcatatatctctaagatctatatctggtataactattcttgttttatattgtattatactggaacagctcgtgtcctccgtctcttgcctcggcgcctgggtggcttgccgcccacacttcaggggcccagacttacaccctgactgtcccaccttctgtccttgtcctggacctcaggttcccagcgtcccgagcccagcactgtctcttcagtgccctgatttctcacccagaggtttcaccctccttcatctcacgggcccagagccctgtctcactcaccccacctgtcttagaccccagttcccagcctgacaagctttccactcacaggggagaggctactgcagaacctgacggttcaggctgagtcgccctttggggttggggccctgacgcacctgctgctctctgggagccctgaggaccgagtggcctgcgcgctgaccctgcccttcatctgccggtgagtgggaagtgggtgccttgcggggttgggggaggagtgctgtgtttcccaggcccgttgcccaccttttgaaaggccctctcttccctgtaggaagccctctctgtggcgccggctgcttctggagcagggtggtctccggctcctccttgcggcgctgacccggccggccccacacccgctcttcctcttctttgccgcggactccctttcctgcctccaagacctggtgtctcccactgtgagcccagctgtcccacaggcagtccccatggacctagactcaccttccccttgcctctatgaacctctgctgggcccagcccctgtcccagctcccgacctgcacttcctgctggactcaggcctccagctccctgcccagcgagcggcctcagccaccgcctcccctttcttccgggccctgctgtcaggcagctttgcagaagcccagatggacctggtgcccctgcgaggtctgtcgcctggtgcagcctggcctgtcctgcatcatttgcatggttgtcgggggtgtggggctgccctggggcccgtgcccccaccaggccagcccctgctgggttcagaggccgaggaggcactggaggctgctggccgtttcctactgcctgggctggaggaggagctggaagaggccgtgggccgcatccacctgggaccccagggtggcccggagtcagtgggtgaggtgttccgcctgggccggccccggctggctgcccactgtgcccgctggacactggggtcagagcagtgcccgaggaagcggggtctggccctggtggggcttgtggaggcagcaggtgaagaggcagggcccctgacggaggctttgctggctgtggtgatggggattgagttgggggcaagggtccctgcctagactgttgacgtcccctgggaaggggacccaaggatgaattggctgtgaaggatcctccctgagactggcaagggaggaggctgagcagaaggagtcatcatggaggagcggtgagaacatggaaccggactccaagatgacgatctaaagacccgggagcgagaagccaaggccaggttctgggtgtagggcccagagaagcagaacagcccagagccccaggtgcctggcctggcctagacctctggaattgagattaaacaatttggagttggat

SEQ ID NO: 6027 - DNA, 383 bp, Homo sapiens
cagcccgctcggctcgccctctcccccggaggccgcgccctcccggaaaagccgggtcctccagaccccgaggccttgctctcagagcgggaggccccacccactggagagccccgcccctaaggtactatgagtcctcaggggtcaagttcagaaacggcccagccagacctaaacccacacgcccacaaagtggattgcacacagacaagaactcccgtgcgggcctccactctattcccacccttgagggagcccccttactgggggagggtccttgcaattccagcgaatcggaggccaggccaggacgtccttgctccctgcaccctcactgttctgtgcactttttctacctacataaacacacgcattccacctct

SEQ ID NO: 6028 - DNA, 233 bp, Homo sapiens
gaccaactgcgttggacaccataagccacagcctcacaggaagtgggggtgaggagcctgcggtgctccccagaaaaggggaaggggcagtggggtgagaaggtcctggctccccttctcccggccttcctctgcctggggcccactgcatctgattggcagtcacttcccatgagggcctggcccacccgctgcagttgccctaaggaaaaataaagctgcctttcccctgt

SEQ ID NO: 6029 - DNA, 111 bp, Homo sapiens
ctcagggacccagcccctcctctctgagaaactctgaccttcatgtccttaggctgtgctcctgccactctaccctgacacctcaataaagaccagtgctggttttgttgg

SEQ ID NO: 6030 - DNA, 824 bp, Homo sapiens
aaatgtaaaacatggagcagattttttacttgttacccatgtcttattgtgcatcagataatttatatgggagtgaaaccctacaaatgttaagaatgtggcataacctttaactattttcaagccttacacaatagcagagaatataaactgaaaaaatccatacaaatattaaaaatgtggcaaattattttaaactgtgctcaacccttactcaagataatccatactagagaaacactatagatgtaaaaatgtgaaaagttttattcaaaatatcaaacttatgagtcacctaggggttcatagaaaaaggaagtttgcagatgcaataaatgtgaggaagtatttaataaaaaatgaagtctaaatgtgtcagagaatttatgtgagaaaggactaaagcacagacactttcagcctttatactaaataagagtattttttgtacagaataatctaaaggcaaaataattagataatttatttgcttatatgttttaaagtagcaagaacattgatgttttgacaggtatatttcatagatacttcatttgtatttacagtatttgaggtttttggaaagcaaatattatttatataattcagctttcaaatctgttgctgcttttccttaatccgtggtgttcatgtgaaaatatgtgttctgtttttttttctgcatcagaacaatgtgaggtcattctacgttaatatcattaatatcagcatttttcatggaagtttaatgccaaatgtaaaacacatgaaaatttttaaaaatatgctctttgtgtttgaataaagtagtaatgcatgtaaac

SEQ ID NO: 6031 - DNA, 1019 bp, Homo sapiens
gtactgcacgactactcgcttctgaaactgatagacactgcctcagctccgtgcagggcagacgcacaagagcagaatctccgtgggacatctctctggagcatcaatattactgcagtatttggaagaaacaaatttaaataagttctaaggtgaagaatggaacatttaagacaagtctggaaagtcatctgcctttaataactgtcgtttgtccttaacgtcagactttctccaagaccaaaactctaagaacttatttccattcttacaaatagtaaaaatgataaatcatatcaagtcaattgaaagtcctgcctgctgctttcctaaattgcaatatggccttggtatggttttatttgtacttttgtgggggattcgtggatctttagattaaaaaaaaaaaaataggtttttgaacaatttttgcaagtttgcagctgttagttattgatttatttttccaacccatctaattcttctgtctctctcctcaggctcaataattccatgggtctctaaggctgtgtttattttctttaaattttgttgatttacttttatactccatttgattttttctatctctcaccttttctcagactcagtcatcccacaggtctgtaaggctctgttcattttctttaaacttcttttttttttcctctcctcagattggataaattatattgctatgtctctgtttctgaactatagaaaagctcaaaattattatttttatttctcattttttatatggctattttttctctgctgatgtttcacatctattcatttatgagaatattttcctttgccctcatgagcgtgtttataatagctgccttcaaattcttgtctgccgtttacatcttggacatcttggagatggctactgcctgctttttatcttgtgtatttattacattttcacgtgtcttcacgcatcccttgaattggaaattgtgccctggagactgtatacaagactggattaaaaagactggattctgttt

SEQ ID NO: 6032 - DNA, 808 bp, Homo sapiens
tttcagcttccaaactggtatacattccaaactgatagtacattgccatctccaggaagacttgacggctttgggattttgtttaaacttttataataaggatcctaagactgttgcctttaaatagcaaagcagcctacctggaggctaagtctgggcagtgggctggcccctggtgtgagcattagaccagccacagtgcctgattggtatagccttatgtgctttcctacaaaatggaattggaggccgggcgcagtggctcacgcctgtaatcccagcactttgggaggccaaggtgggtggatcacctgaggtcaggagctcgagaccagcctggccaacatggtgaaaccccatctctactaaaaatacaaaaattagccaggtgtgatggtgcatgcctgtaatcccagctcctcagtaggctgagacaggagcatcacttgaacgtgggaggcagaggttgcagtgagccgagattgcaccaccgcactccagcctgggtgacagagcgagacttatctcataaataaatagatagatactccagcctgggtgacagagcgagacttatagatagatagatagatagatggatagatagatagatagatagatagatagataaacggaattggagccattttgctttaagtgaatggcagtcccttgtcttattcagaatataaaattcagtctgaatggcatcttacagattttacttcaatttttgtgtacggtattttttatttgactaaatcaatatattgtacagcctaagttaataaatgttatttatatatgc

SEQ ID NO: 6033 - DNA, 2289 bp, Homo sapiens
ggacgcctgagccccagcgggagacctgtccttggctcttcctcccaatgcccgtcaggctgaactcgcctcccccgtgactctgcctcgggcctcgcagaggccgctggtcacttcgtcatcattttgcccctggagacgtctttctttgtgccttgatgttgagagcgcctctcttttgagcaaacaagcattctatatgcaaccagagtagaggggacctgctcagcaggtgtgaccagggttctctgaatctgttattgtttttgcttctggaaagttcatttggggtttacaacaactaggatgtgttgggtgagatgtttcagatctggagaaatgagcaggtgtcgggaaatgtgtgacttaaccgtggtgagggctggaaatccaaactcaccaccatgatctgtgaaataaagcccttagcggtgtgaagcatccggtcctttgaacagaagggcctggaaggcccctggggctgagaaagggtccgcccggtggcctggaggcaggcgccgggagcgcagtagcacgtggactgggcaggatgttgcactagcttggggtagatgctgggggctgcggccacggtcagagggccccactgtgaggcgtgggtgtgagccaggctgcaggaggaactgggcctccgcttcccagcaacgcagccaggcctgagaattctgtgcgcccggcgggctttgggaatgaggggttcccttgaacatgcgtaggctggaaccccgtctgagaggtctccctgaatttcagtgacacatagtgcagcccggcagtgtcccacttccgtggagagagccgctggaatggtgtggacccatcccgcgggtgaccggtgcctgttctcccctgaccgagcctgtgagcacatcgccccctgctggcgacagcggggaaatgagggctgaaaatatcctccccacaagggcaatccccgggacctgccgagcagccaaggccctgtcctttcttgaatggtggcgagctgaatctggtcggtttcctagcttttaggtggtaaaagtgcctggcagcttggctgccgtggaggagtcagtcgtggttggaggttcattgccgtgctttcatgcagagtgttttgccttcatgttagcttccggctcccctcccaggctgcagactctgacctgtggcatcaggcttctcccagtacaggagggtgccatcccccagcatgcggcttctctgccattagcagccctgggcgggccgaccacactcgaggctgcggtgctacgggcttagccctcgcctccctcactgggagcttccccatcctccctgccttccccagtgggaagttagggaagctcaggagcctgggaccccgcatgtcccaaaatgggattggagaagctggagagaaagcagaagaggccgaggagtgaggcagcagcctctatgctgtgatttccacaccgggtccgtgcagaggaaacagaaactcccaactgtccttacccaccgacatcacagcccctatgaagaaagtagccacaatctcaaataacaaaagggaatgttctaaaactttttcttccttaaaaaatggagaaaattgcacttgtgcttgctgtgtggtatataaaccaggattagtcccagggtcgtgaggtttctggtgaaaaggttaaatcgtagaagctagtatattttttatatttttgtaacaattgcttttttcatgggggaggcggggttagtatttatagtcctaacaagtccagtaattttttataaatcttcagattataaacagcccctaaaaactttacaacgtttacacagttttttaaaaagagactgtatacacttgatttgctttcaaaataaataaggtcagctagtctaggaggttaacgtcgggtaggaatgctgatcatgataggtttggttttctacagattctgttccggtgcctttcctatccaggcaccacctgagaaagttgtcatttgaggtcgcacttggaagttacatctgtgaagtttctgtcattcgtccagatctgtgtgtgtagcatgtgctgaggaagcacgtgctgggctgtgcctcagacagtgcatcaccgggcacccagaggcttgcctggctattcctgttctggtgtgtgtggagtgttggggaggaacagatgcagatcaacctgtggctgttttcccgtctaggttctcacaggtatctcctgacagaggtacttaacaatggctctgctggaaatttctataaataaaatgtccaaaatgg

SEQ ID NO: 6034 - DNA, 977 bp, Homo sapiens
tggggaaggtgtaggaagctctgttgagacacatgttctgaagtgtgttgtgtttcatgttcaagcttaatcaaggcagccattaatatacgaactgagcatgctggggaggtgaatgccacatccttggcggggttatggacctcttgcatgtcatagccaatctaacggtaatggtaaatgcttttaatcaagcaggaaaaagttctcatgattatgccaactataatagtaatcctcactgagtgataaaaatagtttatgaattgaaaatttgccgctgcatgttgtatgatcaaatagttcatcaaaatgaatctttgctctttggactgaattcttaccatactgccattaaaataaatttgccaactagtaatgcatactggaaatcaaaagatactgaaagaatggtgaacttctcttagtggtattgtcatgctaaaagatgttaatatacatcataaaagcaaagtcagccagctgatattttggttctcaaaaactgcattattaataatattttagtatacagagctattctacagtttttacattgtaaacatgactgtggttttgtatttgctaaatataggggttggactaaaatataataaatctgtaccttatcaaacattttctttgagctcctgctaaaaataggacatgtctatgattgttcaaaaatatgttaaatttaggctcagcacagtagctcacacctgaaatcttagcacttcgggaggctgaggcaggtggatcacttgaggttaggagttcaagaccagcccagccaacatggtgaaaaccctgtctctactaaaaatacaaaaattagccaggcatgatggtgcatgcctttaaacccagctactgaggaggctgaggcatgagaattgcttgaaccaggagacggaggttgcagtgagctgaaatcctgccactgcacaccagcctgggtgacagagcgagactcc

SEQ ID NO: 6035 - DNA, 1694 bp, Homo sapiens
gtccaaatctcaattttttagaattttaagttatgaagtgctcaaaggtactgacacagttgattttattcacaccattaggggtatgcaagatgtccctgttttataaacataatcacaacagtaataaacctcaagtagtggctagtgtttagtatagaaatataagatgttgatttagtaaactgataaaaatcgaattcttgtctttttagtgggatccttactgtccctggaaagatatagcatagtggttctcagcacagtctccagaacagaagcatctgtagtacctggtaacttgttagaaatgtacattctcaggctccacagcaggccgcctgaatcaaatcctgggaggtggggacagaaatctgtgttttaagaagccttccaggtaattctgctgcacactcaagttcaggaaccaccggtatagaccattaccttagtggatttacctgtagagtttattggatcctgaaaccaatcaattacttagaactaggcaaagatgaaagtatagccaactattcttggctatatatatatattcaagtgggccgggcgtgatggctcacacctgtaattccagcactttgggaggtcgaggtaggcagatcaccgagcccaagagttcaagacaatcctggccaacggcgaaactctgtctctacaaaaaatatacaggcgtgttagcatgtgcctgtaatcccagcttcttgggaagctgaggcacaagaattgcctgaacccaggaggtggaggttgcagtgagctgggatcgcgccattgcactccagcctggctgacagagcgagactgtctctaaaaaaaaaagactcaagtggaccctacaatgaagcctacacatcccaatagaagccccttcttatgctgagggaagcagccctcagaacatgatagcttgtatccagcagagtggcacgtgctggcacacctcacagaagcaccctggccctggatgcctgcaacctcagaagagtgcagctcccagagggaggcagccatccatctgggatggtcctaagcatggaatcctaactcctgattccgtctcctatttcttgcttggctacgccagttcccaaatctggtagatgtccatgcccatgtgctcctgctgggactcaattcaggctatgtatgactatgaagtcaggctcatctgcttactggctgtgtgaactttttgtatcttggttttcttcatccatgaaatccaagtaatactacctaattgttactgtggagattaagttcaaatgcaatgtatagtaatattaagcaatttctagttattattctagccagtaatggacttcagaatcttttattacacaatataagaatatgtatgtaaagacattttggaatttcctggatgagaaggaagtctgggctgggcatggtggctcacgcctgtaaccctagcactttaggaaatcgaggcgagtggatcacttaagctcaggagttcaaggccagcctgggcaacatggcaaaaccccatttctacaaaaaatacaaaaattagctgggcatggtggcacccgcctgtagtccagctacttgaggctgagatgggaggatgagggaggtcggggctgcagtgagccaagatcacgccactgcactccagcaccctgggcgacagagtgagaccctgtctc

SEQ ID NO: 6036 - DNA, 128 bp, Homo sapiens
atagctcctctcgccaccaccttcaggctccttctgtcatgggacccttcacctccagatgccatcctctggcacactacaagtggtccttccaacttagtgcatccctttagaaagtaagcaatcag

SEQ ID NO: 6037 - DNA, 1630 bp, Homo sapiens
caatcttcactcattgttatgggacttaaaatagcctttcttcgaataagtgatacagcaaaaagccataaaggattccttttgcggttggatatgtaaaggtcatagcagcaactgacaagaagtgtgcaatatttacctggattatcttgatgatggtgactcattatcagtgctttggtacttttgattacctgtgtttcagtattagtgtcactttagtacttcagatcctgcaaatatttttgcagatgaagtatgtatgtatgttactaagttaaacttagaaacagaacctcattcagtttttataatgtatttttgcaaactactgtaaatagcaaatcaatgccaatgttaaacaaagaggaaaacgttgtgtggactttgttctcttgcaccagtatttcaggaacatctgcttgccatccccacagctctttaaaactggctattatgtgtgcctttcattcttacatttctaatcatactgcaggaaaaacattggattcagcttagactgaggaaaactctccattatgttgtaagaaattatagatgttttgagagacactttttgttaaaccagatattgaactccagcaactattgtggttatatttttagttcattgttctcatttaatgctaaatatcctttatattgctttaataattttcttttttttttttttttttttagacggagtctcgctctgttgccaggctggagggcagtggcacgatcttggctttctgcaacctctgcctcccaggttcaagcgattctcctgcttcagccttctgagtagctgggactacaggcgcatgccaccatgcccagctaatttttttgtatttttagtagagacggggtttcaccacgttggccaggatggtttcgatctcctgacctcgtgatcctcctgcctcatcctcccaaaatgctgggattacaggcataagccaccgtgcctggcctctttaataatttttaaaataccctaaaggcttgtgaatatacaagtctactgataaattatgtattgtctgggaatttgatagtcattgttttagataactggattttacgctgtggtagacaggctgtgacactagtgttgcacaggtgtaattggtcatcctatgccttcaccagaataacttgggagtggtgccagaaactagagtctacaattctcactgtttagagagtgttaatgacatactgtgtatgcataatagccgcatgtactataatagcccttaaaattaaactattgggattgctgtaaatattttaaagtactggaggtgccttttacctgtttattagattttgaaaaggtttaaattatttcatgagcaatcttttaaatttcatttaacataaagctgaaaattcaataacaggataaaaaagctttttaacaaggctgccatttaacttaaatgtgttcatcttagctttcacttgtataaaatttgattctttgaactgcagcaataaaaccctcagctcctaagaagtcttaagagggtattctatatattctgctttgttttattttctgtaaattttgtaggtaaatatgtgcattaaaaataaatactttatatataactcgtga

SEQ ID NO: 6038 - DNA, 401 bp, Homo sapiens
acaatccaaaaaagaaaccagttcttcccccaaagtattcaatgcttagaatactaaaaggttttctttgaatgtatatgtttctgaaagtcattttttaatgattacattctgtacattctgtaaaaacttcaaaacctggccaggcatggtggctcacgcctataatcccagcaccttgggagaccgaggcgggtggatcacttgaggtcaggagtttgaggccagcctggccaacatggtgaaaccgcatgcataagcatggtggcacatgcctgtgatcccagctactcgggaggctgagggaggagagtcggttgaacctgggagacagaggttgcagtgagctgagatcacgctactgcactccagcctgggtgacagagggagaccctgtctcc

SEQ ID NO: 6039 - DNA, 2627 bp, Homo sapiens
gggctcctgctggattccgaaaaggccgggaagccagtctccttccctgaagcaagcccaggagaagactctccgccccacgccaatcccaaaggcatgcagatggctgtgcatgttggcttctttggacctgcactggaggatttctcagacacatgcaccagattctggctcgaagcagccactgagccataatgcgcaggggaggccagaagctctgtgcctggtctgtaacagtttccaggccagctggagaatgttcactggttcggggctgactttgagatctttgttccctgaggtgccaggcaggcaactttagcacatgatgaaaacagacttccacctcagtggcctgtgggcacgcacaagtgaggtctgtttttctagacaccaagggggagtaagctgagctgtctagcacggattggagactccctctccctggtgggcctggcaatgacagcatttctcacagaggcattctggtaaatgaagctgaaaggggtgttttacatctgtaaacggtttcaaacaggtagagagaaaaacaccacaattaacactgttactttttgccttgtctggcatgtttgttttaaatgaatacattaatggggtttttatccttttgaatgacttttcagacactagacataaatctcttccctccagtgtatgctctgcctttttaaccactgacatgtaaggaggactactgtctagcatcagcttatggggtcagctggctgtggggatagagtcctgaggaatgtggtcacagcaagaaggcggggagcagcagagccttgcctttgaatgaggcagcttgtgaggcaagcattctggagagaggtgctttgaaagtaaggtgcggcctttcacctcttccttgattactcacacatctttgcgttctcccctgccgtccttcaactgtatcttacttttcttaccagaaaggaatggagtctgtttagagacaacttggacaacctgtgagtgcatctcttctttcctttagtcttcacagctaactctggagagcttcaaaactagaaggatctactccgcatgggtgcatgcagaggctcctggatctgggaagcccgccccctcacaaatgctgagccgttcttgctctgaaactgcgtgagtcaaggcaaatgcaaaaagccaggttttggggatgtgtcttactgtgcttcaacttcccaaggaattgaaagtcaacctaactgtaacaacagggtgagaaatgaccaaactgcccgtgactttttctgaatggacttcataaccggaagacttaaccggtggcctcatcaccagagcatcgccaggatttctaatgcactcagtttccctacatagcagggattcttagctaggtgtccccatgaaccccgtaaagttctacacaaagtcttgcatacaggagcctttacaagatgattatacagggttgcagattgggtgactgaccagacttgttggggtcctgggatgagttgccccgggctgcaaattaagagtacagctaagtgcgggggtggcggtggagggaacgaaaattgaacctgtctgcctgtgctgtgtcgtgtggctttatcagcccgaggaagggcaggtgtattctaatttgcacaaaggtgctgggtagactagtggcagctctcatgtgctgcacataagtggaatcagtatgaatagaagaacttgctgtataaaggaatttcatggcaacaatgctggtaagggcaattagcctcgcttaagttgccttttttacacaccaaaactttttacatgaagggctggtttcacatgaatactatactgaaatctgtgctctcaagatctagcagtgaccagggctgcccggcgggggctctcctggcaagtcaggaaggtttctgttgctaatataacatagaaacacattagtgcactgggcctctctgaggtcagcatatttgtactcttggaatatttgtttttttcttcagtaacaacagaaaccccagttgggagtttaacaaataactgactaccactcactcatgcatttttatttccaattaaagcaaagcactgtgctgtgctcagataataatagtttgtaagtaaaagtttttagttttcagtgttcaggttatagaatataactgaccataaaaattacctgcaggtattttctttttatgaacttgtttttaaattaccaagtaattactggtgtcattttgttttatgacagacacacgtatctaacaaacaaacaaacagtgaccttctccatgggtcaaggacttccttacaatttctcctgagttaacttttgtgaaaataatacctaaggttttctggcttattgaggaaatttcctaacaaacaaacaaacaaacaaacagaagagaagatcattaaccactgtatactttgtgtatataataggtcagtgtaaagaaatatgatttgaggtggtgcatgcaagtaactagggtttattctatataatgaatatttatagatctgtaacatttgtttcaaaatgctgtttcatttttataaagtaccagtgtttagctgctttttatacattaaattagcaatttgaaaaactc

SEQ ID NO: 6040 - DNA, 949 bp, Homo sapiens
agcccctccccagggccccaccctgccatatgaaggaccccacccccgacaccacaaggcattattattctattaattattgttattatgatgattattgttattaataattattgttactccactaatatttagctagcctacatgtagaagatctatggaaacacagaactaaacttttatttatatgttgtggggactgcataactagcccaggaaatgactctggttttgagtggcctgtaatgggcagaggctccctcggggctcgggatctgcagcatctatgtggatcagcccacacccttcccagagccagggagcccttagcctcaactctgccccaccccagcctcttccaggagagcacccttacttggcccggcttccagagaccctcgaaatctccgagaagataaacagctgctacctcttagtattattctgattttattttgcccttaactgattgttatatgctacaagggatttcagtggactgcagagtgcgaacgtcttgctgttgtgtttttatgtcccaacctagaaaccttagctgtcttttctggagttgtctttcatgcttttccagtgggatcaagcccttttccccaagagtcccatctcttctgccatgcacgacatgaaaatccacttctcttccttctccttcttctctctctactttacagtgatacacacacgtatttaaggactatccctgagaccatccttctcattttggaaactgctagggagggaaccaaccacttaaacaagcgtggttttccaagatccaggcaattgtgtgctgttggttgtggtggaggatgtggcacatatatacgtacctacacggttctctaacagagctttctgtatctatagatagatgccatctgtccatttctatgtatctttctataaatatacactctcaggtatcttt

SEQ ID NO: 6041 - DNA, 1257 bp, Homo sapiens
agtctccgggaggatgttcgtctcagtttgtttgtgagcaggctgtgagtttgggccccagaggctgggtgacatgtgttggcagcctcttcaaaatgagccctgtcctgcctaaggctgaacttgttttctgggaacaccataggtcacctttattctggcagaggagggagcatcagtgccctccaggatagacttttcccaagcctacttttgccattgacttcttcccaagattcaatcccaggatgtacaaggacagcccctcctccatagtatgggactggcctctgctgatcctcccaggcttccgtgtgggtcagtggggcccatggatgtgcttgttaactgagtgccttttggtggagaggcccggcctctcacaaaagaccccttaccactgctctgatgaagaggagtacacagaacacataattcaggaagcagctttccccatgtctcgactcatccatccaggccattccccgtctctggttcctcccctcctcctggactcctgcacacgctccttcctctgaggctgaaattcagaatattagtgacctcagctttgatatttcacttacagcacccccaaccctggcacccagggtgggaagggctacaccttagcctgccctcctttccggtgtttaagacatttttggaaggggacacgtgacagccgtttgttccccaagacattctaggtttgcaagaaaaatatgaccacactccagctgggatcacatgtggacttttatttccagtgaaatcagttactcttcagttaagcctttggaaacagctcgactttaaaaagctccaaatgcagctttaaaaaattaatctgggccagaatttcaaacggcctcactaggcttctggttgatgcctgtgaactgaactctgacaacagacttctgaaatagacccacaagaggcagttccatttcatttgtgccagaatgctttaggatgtacagttatggattgaaagtttacaggaaaaaaaattaggccgttccttcaaagcaaatgtcttcctggattattcaaaatgatgtatgttgaagcctttgtaaattgtcagatgctgtgcaaatgttattattttaaacattatgatgtgtgaaaactggttaatatttataggtcactttgttttactgtcttaagtttatactcttatagacaacatggccgtgaactttatgctgtaaataatcagaggggaataaactgttgagtcaaaac

SEQ ID NO: 6042 - DNA, 5427 bp, Homo sapiens
ctggggtcatcgggaaaggcaaagaaactgaaggcagagtcctaacgttgcatcttattcgagctggcagttctgttcacgtccattgccggcaatggatgtctttgtggtgatgatccttcagaaaaggatgcctctgtttaaaaacaaattgcttttgtgtccctgaagtatttaataagaagcattttgcactctagaaagtatgtttgtgttggttttttaagaagtctaaatgaagttattaatacctgaagctttaagttaagtgcattgatcatatgatatttttggaagcatacaattttaattgtggaagtttaaagcctcttttagtccattgagaatgtaaataaatgtgtcttctttatggaccaaggatatgaaatcatttttcttttgtagctaacggttgccttgaggaagaaataatttggttttattaagagtctactctcaatccagttattagagatgtactgagtttgatttgttaatcctttctatatactgctgatcttgcatgtctacaatctgctcagtttttctgtgtttctgcaatagtggtcagaaaaatacttaaattcccttaatggtgttgttttctatttgttctggttttgagataaatgagtgattctgtccccaaatgtccatttttgaagtgattttcctggaggattagggtatttagcagttgaagctcttcattcatagtagttactgtcagctaacaggttttttaaggcttttaactattaatattttatggaatggggcaaagtaaattgatgaaagaattggagtgataatagtcctttacaaacatacagtccataagaaaatgaatttggcatatagaattattacaatttcctgggagagatggatatttaaacctctattattttagacaagactgtctagaacttaagtttgatctgtcagccagtactcccattaaattcagtgtagtttcacttgatagaatcagatatgttatcgaaatgttagcagcagcttcatcctccttctgattaaagtaagtagaaatgggatgttttgtttaataacagccatagtgtgtgtttagaccacagcggatgttgtagaccaggaccatagatgatacatgtcagtgctgtggaatgtgcattctctgagtgttgttttgtggtatcattgtctttcctgaatgactttctaactgtgcagaaaggcagaaaagtcatcatatgtatatgtcatatgactttataaaatatttaatgtgacaaaaagtggaaagaatctttacaaaccctgcaattacttttttaaaggcacttttactctttggttttatcattccattttgctaatatttactagctttataaattacagtaaggtacaaaaactcatcttgtaatattttcatttttgaagtgaaaaagtacatatattttgcacaaggttttatactgctaagtgcttggttggggtggtgagatgatgattagatcaggggtgaggctgagagactctgggtttagggctagccctgcctccatctcccttgggtaaaatgaagggtgtggggtaaaagatgcataaggccttttctagctctgacagcctagaagtccaatcaccctgtaataaatatgtgttgaatgaagaaatgggtgaatgagcttgtcaatgtgattttaaaaaattgactacctggaggaatgattaggaatctaaatgaagccagccctcggtatctgcaggtttctcatccatggattcaaccaactgcaaatggaaaatacgattttttttaaaaaaaggatggttacatccgtattgaacatgtacagacttttttcttgtcattattctctgaacaatacaagaactctttatgtagcatttacatttattaggtattataagtaatctagagattatttaattaaaatatacaggaggatgtgtgtcagttatatgcaaattctgtaccattttgtatcagggaattgagcatcttcagatgttggtatctgcagggatcctggaaccaaacccctgcagatactaagggctgacgatctaggtaagactggatttaacagttggaaaaaaaaaaaaaaaaggagagagaagacagttcctttcctgtagaaattaaaacaaaatacaaattgaggaagctctgctacccaggctgtcatggtagagaacttgaagaagacctgtttggatggacacctggtttcaaaagtcaggtgtggagactgttaaatgggagggcctcatccataaatgatttctggcaacgtcttcttcaggtggagcttgacgtctttttaatgttacttggggagggagtgctcattaagggatgccagggccagctctggtggttcctggggaggctgcgtccttccctgcttctgcatgtcatgaggcagcaggaaggtttcccctgcacctgtctgtcctggctccctctgggtagccccctactgttctgtgcttcagcacagcctggtttgtcaagaggcacatagttggggctgggctgcatggcacaggggcttatgtgcctgctggttatttaattttcagccttaagttttctttaatattttcctgttggctatttaaaggttttggttatcttttattccttatctacaatcaagatgacaatgtaattgaattatcttatttataacacggttcgtgattcatgattcatgattacaagtagaaaatatgtcatgttcctcacctccaaataaatatgtgtgtgtctgtgtgtgtgtatatatgtatgtggcggagagggagagagtggggaaggagagcagtgttatcatacatagagaggctaaatgtgtcccatccctcactgtcagctttataaaggagtttgactccatccacagaagaatgttttataagactaggaaaacacgttgaaaactaggataaacagcaacaaaaatcaactaaatatgttgttactgttgctaaggattttctccttagaataatttaggatttttaaaaatttctgtttgccaaatgctgtagataaatggccagattcttcctatccctaggattcctttattattttttttcacagattttgagaacaagggggagagatagtatggaagattaagattccattaatcttatagaactgtgttgtcacccaaattcctgcttgtttgaacatggcatcttcatagattcaggattcactaccctctatagctggatcttgaaaattatctggccagataattttgcatctgcttggatgattgtagactgagatgtgagtggaggataaagtattagacttttgctgagtaactgccaaccaagaagtatttatcggacacttactaggtgcctaggattgtatcagagggaatatgaaatgtgtccctgccctacctagttttaacgacagaatatctattaaaggctacttagctgaagggtaagggtgacaggtctaggggaagctttgggaggtggtgtgctgtgacagaaaaagtggcagagtagggacgagagacctgcattctagccctgtttctgtcacttgctctgtacacttagacaacagcttgacctcttgagctttagtttcctcctctgcataatgagagggttagactactgaattgtatgggaaaaaaatacaaattcctgggtcctaggccatgcctgctgaatccgactgttcaggaagaggcctaggaaatctgtgagggaatccccaggggaatctcgtgaccagccaggtgtgaaatctgctaactggaagatctcaaagcttccttcactttttgtgattttgtggtcatgtaacgttactgtattattctacgtaaatgtgggtacttggatgtttatcatactgtttctctgtgtttacatactaatttgtgtaagaaatgcattttagtctgtgtacctcaacctgctgtttgtttcctagaggtgttagtagtctttaaatacaagtaagacttaagaggatatttgatgttatttacctggatattttcttccccttttatttatttagaggaaattgagattctaggagccaaaaaaatgaaaacaaaattctaaggcaaagttaaagaaaaaaattacattatttcttaccatttgctactttataatgaaaatttaaaaattatatgggaagatttttctctgggataacaaatccttgtcataaagtaagaggtctttttaaagtaggtaggctataaggcctgtaatttaaaataatactcctttctctagggtttggtgcaattctccattaatgaagataacatttgaattccccaaagcaggtgaggagtcggggaggagaaagcgatgttaaaatgaaaactcactgcaaaagaggaggcagaggaagaaggaatgtaaaccccttaaagcagatgtgtgtggggccttatgaagaccaggattctgcgggtgtcaggggattgcccctcttgacagagactagggttttagactgaggcttcctgcagggtgttcgcattgcccttctccgttccccttcagacctttctggggagaagaggtgggaggaggggagaaagactgttcatcttattctgaatcctggagcagctgaaggttttctcttgagtcaggatgcagtggtaatgcattaaccagcaagtgtggccaaggataatgaaaaagtgggaaaggaaggtcctcctcctccctgattgtagcatccagcagtctctgtagccaggttactcaagaaccacatttgatttcctggccctttgccttggcagtgatggcatttttatttcactgtgttttaaagtcttcatttatttttataacatgggttagggagaagggccacaaatggagggattgtcctttcaagcaccacagcttcagataaaattagtactttcaaatattgtccactttaacttaaaaaattctagagggattatattggagactcaactgcccttggttttagtttataaaatggcctagtactgtggaattttaattttagaaagtcttagcatcagatcataaacattcattaaaagaactcacatcccatctgaaacttcccaggggagttgggattcttagtagattggtagaaaggggctcattttctactgcatttcccatttttggtatcttgttcagcatgttttatttttatttcttgtctgcagaacatcctatatttatgagaacattctttaagaagaccaccacatagaataccccttcctatcagctcgctctgatttagccttaattttgttaaattttttagagatgaatgaagtgctgctgtggaaagaaatgtacatatactatttctgtatcattaaaattacatttttatggttc

SEQ ID NO: 6043 - DNA, 2606 bp, Homo sapiens
ttcccagactctgcacttaaaatatgaactgattttggattttttctttaataattaattgtaaataccccagtgttgagtgcatcaataacttactgaccgaacatttcagttatttgtttagaagtgcaaactgctttcagagactttttgcatgtaatatttcttaagattcataagtttctgaactcgtatgtactatcaaatacataaaggtgtaaaattacaacaaaaggcattataattttgttgggggttaattttatgaaaattatgctcaataagagttgtatatttaatatatttgcagtgaacacagaatactttatgcatattactgatttaatttgaatatagttttacagcctccttgacacctataatttacagatcaaaactcagcaataatttgggcagctaatgaatgtcatgaaagctgtagaatctacatcaccatccattgctttaattacatgaaaatgctctagtgttgtgatgcactgctgatgtttccaattcaggtacaagtatgttttaaagaagaaataagtttcccaatcagccaatttaactggctacctgttacctcagctgagttagtttaggaagtttacattcgtttctaattctatacttgttttcaggggttttttaaacacatcctatatatcatgtcaatctggcaagaaatatgacttgctttttgctgagcttaattcagatatcagtaaaattaagtcataaaataatcatgtgtcatgtgactttggcaccctatagacatacttagttttaacttttcaaagtttggcctcctattagaaataatcatgtctcagatgagtaatgtctgtttccagggttcagaaaaggcaaactcatgaaatgccactgaaaagaactttcaacacagcatacttcatgtaaaagaaattgtttgtttgctttctttgtgtagatttctatttgtgttttatgtcatggaaatattccagaattaacagataatagtggtaaagtaatatgcagatagtctaaattcattttgagtttctaggtgtaagcagactaaatgttgcccagaatcagtgttgggttatcagtttatattaaatatactgagttgcccgttttgaaaatgcactttgaataatctcaaaaagatgtacaagttatacctgtaaaccacaaaagtgaagcctgaggcttctgttcaatttcatagactcctttaccatgtaaaatttgtctgatatttgatttgtgatacaatttctcctgctaaagctgctattattctgacaaggtagaggtccaggttcacctttatatatatttaaaacaattagtactgaattggacataaaaatattgacattctaaggagagatatatgttagcatttttctggtactcaaataagttagtagtaaagtctgcaagggcataaatttagggggaaaaagtgtcccagttctctcctacagaaaaaatactttcagtatgttttgataaaactgttgctttgtcatgagttagtcaattgtatcaggttttccaagacctttaccagtaaattatgtttctgtatgtaaaataaccccttattagagagacagtgttatatgtatttacaaaattatataagttccattgggattgtattgattttgtattttcccaaaatagtactttgaattgatagtcctttatgcaatgtcttagcaatagtctctataatgcccatccaggagaagtgggtagtaattcttcatcatgaaaatgatatattacatatttagtatcttccctttgcagtattgcacttttgtttaactagaatacacctatgagatagccaaagtttcaaacacagttatcttagtttaccggtggagtatttcaacaccaaccacatttcccttcctccctctaattctacccacatgatctttattccttcctttcgccaattaaaaaaaaaaaaaaggaaaaaaaatctgtagatcttgtcactaaaatctaatttatatcaaatttatgagagaaagtattttcctaattatggtcaaataaatttggttaacatcctagtgattctctttctatataataaggcaattacagttttcaaagcattaagtctaacataactttaaacattctcttaggtttcaagacacttctatttaatattcattggggaaaagttgtccagctatcagctaagaaaacacatgcaaatatggttgtgtaaagttaagggttataaggaaaaaaaaatcagtagaattacataatactaaagttgcagttgaaagaatatccaagtatgtgttggtagttactaaaagaattatagctgttattgccttgtatttatagcccttgtttcaggttttatgattcaagtcttagtccaatctttcttttggacatttgcaatatttaccagttgtgttttgtgtagtctgaatttgctttctgtagttgagcaaacgtcttaaaaagtcatttgtaatttattaaattactttctatgatgttctatagagcaaatggaagtttaattattttttattaaacatattctttgactacccatg

SEQ ID NO: 6044 - DNA, 1347 bp, Homo sapiens
ggttagtctcttgtattaaactcttcacaaaatctgtttagcagcagcctttaatgcatctagattatggagcttttttccttaatccagctgatgagttacagcctgttagtaacatgaggggacattttggtgagaaatgggacttaactccttccagtgtccttagaacattttaattcatcccaactgtctttttttccctaccattcagtgattactgtcaaggctgcttagaatccaaacttggatttttgactctggcaaagcttttagaaatactgcaagaaaatgatgtgtacccaaacgtgagcataggaggcttctgttgacgtactccaacagaagaactgtgtttcaagttcaatcctacctgttttgtggtcagctgtagtcctcataaaaagcaaaacaaaaattaggtattttgtcctaaaacacctggtaggagtgtgtgattttttgcattcctgacaaaggagagcacacccaggtttggaggtcctaggtcattagccctcgtctcccgttccctttgtgcacatcttccctctccccattcggtgtggtgcagtgtgaaaagtccttgattgttcgggtgtgcaatgtctgagtgaacctgtataagtggaggcactttagggctgtaaaatgcatgattttgtaacccagattttgctgtatatttgtgatagcactttctacaatgtgaactttattaaatacaaaacttccaggctaaacatccaatattttctttaatgcttttatatttttttaaaatgttaaaacccctatagccaccttttgggaatgttttaaattctccagttttttgttatatagggatcaaccagctaagaaaagattttaatcaagttgaattgaggggattaatatgaaaacttatgacctcttcctttaggagggagttatctaaaagaaatgtctattaaggtgatatatttaaaaatatttttgggtgttcctggcagtttaaaaaaattggttggagaatttaggtttttattagtaccatagtaccatttatacaaattagaaaatgttatttaacagctgaattatctatacatatctttattaatcactattgttccagcagttttcaagtcaaattaataatcttattagggagaaaattcaattgtaaattgaatcagtataaacaaagttactaggtaacttcatattgctgagagaaatatggaacttacattgttcaattagaatagtgttctgcaaaaatatttataaaacttctcaagatactgctactgtaattttatatgaagataagtgtatttttcaataaagcatttataaatt

SEQ ID NO: 6045 - DNA, 610 bp, Homo sapiens
cgcgggctgcgtcggtcccggacttttctaatttattaaaaacatggccttggcagttatttttccatcaccgagagagagagacagagagagaaaataaactacccctcctattcagaagtttatagtttatggagatggatgacataaaaatgtaaacatctccacacaaaaaaaaaaatgtcttaaccaaccgaaaagaaaaattaaaaaaggatttgtattaaatcttattctgtatatttaatgtagcatttttgtatttaaattgataattcaatatctttgaagtaaattatgaaatcaagacacctgtacaggcatttaatgtttttttgtaatataaatatatacatttgtgtttcccccaaaactgtttcatagttaaaaaatacaagtttaatttaattttttacacctattgattctgctgggtatgagctaaagtattacagaaaggaaacaggttatactcttagatttaaaaagtgaaagaaactgcaggcgcctttgtaaaatgcaaaatatttaattaaaagagattttaacataatgagagccactcattactttttagaagcctcaataaactgtccattgccttggtcaa

SEQ ID NO: 6046 - DNA, 454 bp, Homo sapiens
cgcaatggctgcgatttgcgaaagaatcttggaaatgggccccacgtttcgaattcatctccaggttaagaagctgccagaccttgccagggaccaggagctctcactttgcctaagagacagacacacagaaaccctcctagcagctgtccttgcacgcagagctggggtggtgggccgacttgaaccttagcagtccccacgggagatggcagggcaccttggggaaggccaagtgggaggctgggaggctgccccacccaccgactctaccaagtctctcttcctcctgtggattcagcaaggcttcctctcctgctcacccctgtctctcacctccaccaaccccactcactttgtaacttcatcactgacccggccaataaggaccctgtgcgtcttctccccctcctaagcccttgtgtccttaaaaataatcagtccgaacccatgt

SEQ ID NO: 6047 - DNA, 1248 bp, Homo sapiens
gctggccctggctcccacaggcccttcctctccactgccttcgatacaccgggcctggagaactagagaaggacccggaggggcctggcagccgtgccttcagctctacagctaatcagcattctcactcctacctggtaatttaagattccagagagtggctcctcccggtgcccaagaatagatgctgactgtactcctcccaggcgccccttccccctccaatcccaccaaccctcagagccacccctaaagagatactttgatattttcaacgcagccctgctttgggctgccctggtgctgccacacttcaggctcttctcctttcacaaccttctgtggctcacagaacccttggagccaatggagactgtctcaagagggcactggtggcccgacagcctggcacagggcagtgggacagggcatggccaggtggccactccagacccctggcttttcactgctggctgccttagaacctttcttacattagcagtttgctttgtatgcactttgtttttttctttgggtcttgttttttttttccacttagaaattgcatttcctgacagaaggactcaggttgtctgaagtcactgcacagtgcatctcagcccacatagtgatggttcccctgttcactctacttagcatgtccctaccgagtctcttctccactggatggaggaaaaccaagccgtggcttcccgctcagccctccctgcccctcccttcaaccattccccatgggaaatgtcaacaagtatgaataaagacacctactgagtggccgtgtttgccatctgttttagcagagcctagacaagggccacagacccagccagaagcggaaacttaaaaagtccgaatctctgctccctgcagggcacaggtgatggtgtctgctggaaaggtcagagcttccaaagtaaacagcaagagaacctcagggagagtaagctctagtccctctgtcctgtagaaagagccctgaagaatcagcaattttgttgctttattgtggcatctgttcgaggtttgcttcctctttaagtctgtttcttcattagcaatcatatcagttttaatgctactactaacaatgaacagtaacaataatatccccctcaattaatagagtgctttctatgtgcaaggcacttttcacgtgtcacctattttaacctttccaaccacataaataaaaaaggccattattagttgaatcttattgatgaagag

SEQ ID NO: 6048 - DNA, 139 bp, Homo sapiens
aagcagtatttccaataaggaaaacacagtagcttttgcttgaaattgtaaaggcacttattgataatacttttaatgtgttggtaatgatgtttaaaattgaaagatttttaaaacaaaaatgatagattttcttact

SEQ ID NO: 6049 - DNA, 177 bp, Homo sapiens
agtgggaactgagaagtcaagatcctccctggaggacaggactgaaaaccttgccaagctgtacacagttgctgataccctgtgcaacagctctcatttcctggcaagctctttcacaaccctacatatttctgatcatgtgctgccttttactgctgaattaaaacagatatttca

SEQ ID NO: 6050 - DNA, 1440 bp, Homo sapiens
gcctgcctggaggagaaggaggaacccccatgccaatgtccaggtcacaggcatccgctgcgctcccacctcggacaccatcttgggattcctcccctggaagttgtcctttctgatcctctcttcttttcccatttacaaatgatttcgtgactgtagtttttgttcaccttctgtgcatctggcctgggggctgttagctcagaggagaggagcaaacaggaaaatgacttctgttctgtccccgctgttttgggggaagtctctcccactttgggatcctgctgaagctaggttcatgaggtcggaaatccccaccacatttgcctagactttgggcacaggagttcttagtccaccaaatcagagagaggatgggcttttgatcagatacccctcccaaaaaaaaaaaaaactaaaactaaagcaaaaatcaaacaaaatctggctgagtttagtggggtggttggggaaggtacatagaccctcctcttgcccaccctagacagccctctcatgtctgaacctcagcctgggagttagatttatttgtctctaaaatgaagtcagtggatagatgctttgagggattttgagtagaaacattcatagttaattttcactctggccaatctgagtttgatgtgtgtgttctggaacattcctccagcttttggtggtcagatggcccagagatatgggggacaggaggaagagggtaaatgaaccacagtgagcaggttctaggaggtacctgcatcagacaagctggtggaggccacgtggcaagccacatctactgaggcctcatgctgctcttgctctgtaagacacggagcccagaaacccatctgcacttcctgagacctgcctggggaaacgggggcagggaccaagtgaggcctcatgtgtgtcttcaccgtgctgtcctcacaaggccaggtgggtgcccaaagggagcctgacaggctgttgtgttaatttattgttcttgcacacctgcacagcctccctctggggatcccacctggagtggaccaggggtcttgagaaatggagagttggctgcaaaaactctcatgcactagatgtggcaccttggagggcagggtgagacaagcagcccagaaatactctctcaagtggaggggagaattttgagagtggatggaacagtttggtggtttcagagaatttctaggtttctacttggatctacttctgatacaaacttgcacttggtgccctctggtggtgtttagttttagttccgtaagagaaatgattcctagtttgctaaattggtggcatctttgggaggggtttctgtttatggttagagtctcttacacccttgttggagggattcttattctgactgtgggagctcctgttgcgggatcttgggaaaaaataaagaagccgctgcattcgcacgtc

SEQ ID NO: 6051 - DNA, 1133 bp, Homo sapiens
actgcttcacggactctttgctgttgacgttgatctcctggtagcatgaccttttggcctttgtaagacacacagcctttctgtatcaagcccctgtctaacctacgaccccagagtgactgacggctgtgtatttctgtagaatgctgtagaatccggttttagttgagtcttcacatttagaatttgaaaggaaaaacagaacatttctcatgtgctttgtagcttaaaaaaaggaaaactcaccatttcatccatatttctttttcttgcaaaacaaacatacccatctgcaccgacgcctgcccccgtcccacctcgcggcgcagcccctggagctcctgctggggggcagggcccatctgccgcctggggctccggtgcggtgcactggtccgaggagtgtgctcaggccgggctttccagaaggccacaggccactgcaaaccctgctgcctgccggccgcccagacaccacagacgccacctggcggccctaagccactcccgccacacgctcactccaggttcgtatagaaaaagcacagctctcactggccagtagctgccaaaaagaacacccatcgtataaggaaatccagccccatagaaaacaatctgcccaccgaccccctttctaaggatagcctttgtaggggttttttggttccttttttttttttttcagtttttgtttttacttttgtcccgccgagtactatgtattaccagccccccaccccacagatcagttttcctagtctttgggaaacgggttgtgttttttttcctttgccgtgttggatttccggtcccggctgacacctcccttcgtgtgtgcgcccctccccacccctgcctttgtttcggtgccctgtgtccgctctctcatgtggggatgtttgtgctgcagacaaaaagaacaaaaaaaaatttttaaataccacaagatggaaaaaaaaaacaaaaaaatttaaaaagatggaatgtagtgtttacattaaagccgccgttttcatgaccaatcctatgtcatttctactttgactaatacccaaaccctaaacctcttcacggtttcacttttaagacttaatctttgctgaagaagaccagtcacagccatttcaaat

SEQ ID NO: 6052 - DNA, 1289 bp, Homo sapiens
cagcactgggcaaagctgaacaaaaatgtgacccttcgtaattactgggaagtctgaaagagctaagcatggagtcaaggagaactacatggtagcttgcctgacagtgttcttaaaactggttgtcttttactaggactcataatgattgtcctcaaccgagaccttgagcttgcagctaagtacttatctcttgattaaaaaaaaaaagttggcttttttttttttaacatttagtcctttttccatattggcttcttcagtgaatttttaagttcaatttgtttttattgaggtaaaatatttataacataaaactgaccagcttacccatttttaaatatgcaattcagtggattaagtacattctcattgttgtccagccatcaccatcatccatctccagaagttttccatcttcccaaattctgtgcccattgaacaataactccccacctccccttcccctagcaacagccataccttttgtctctatcatcaacttcactactcatatttctcatgtaagtggaatcatacagtatttgtccttttgtgactggtttcacttagcataaagtctttaagatgcatccatgtttccagtgtttcggtttttttagaaaaactcatacgtgattgcagccgggcatggtggctcacgcctgtaatcccagcacttgggaggccaaggcaggcggatcacctgaggtcaggagttaaagaccagcctgacaaacatggagaaaccccatctctactaaaaatacaaaattagctgggcgtggtggcacatgcctgtaatcccagctactcaggaggctggggcaggagaattggttgaacccaggaggcggaggttgcagtgagccgagattgtgccactgcactccagcctgggcaacaagagtgaaactctgtctcaaaaaaaaaaaagaagaaaaaaacataagtgattgcagaattttgttcttctcataatttctggtttagaaaattatggagccttacatcctgatcatgctgggccttagaattctgacacagtgagtcatcacatttcctcccactgcctgtggccttgttccaccatgactctcacagtacagtgtaggcttagtgtagtattattcccttggaaagggtctggcctaccatcacatgccccaagaaacttctggttggtaaagaagataggctgcttattgccatgtgtagtcacttccaagtgcccactgcctttccatcctgcaattgtggcctgtgtataattaaatgattttagcctc

SEQ ID NO: 6053 - DNA, 25 bp, Homo sapiens
aagccatccatcgtgcccacccctt

SEQ ID NO: 6054 - DNA, 138 bp, Homo sapiens
gaaggcacccctccgtgtggagcacgtggagatagtgccaggtggctcagtgccacctatgcctgtggtgaagtgtggctggtgtccccttcccctgctgaccttggaggaatgacaataaatcccatgaacagcatg

SEQ ID NO: 6055 - DNA, 125 bp, Homo sapiens
tgctgggacagccccgctcccagatgtaaagaacgcgacttccacaaacctggattttttatgtacaaccctgaccgtgaccgtttgctatattcctttttctatgaaataatgtgaatgataat

SEQ ID NO: 6056 - DNA, 135 bp, Homo sapiens
tgtccggacagccctgctcgaagatatagaaagagtgacctgcacaaacttggaattttttttccatacaaccctgacccatttactgtattttttttaatgaaatatgtgaatgataataaaagttgctgactt

SEQ ID NO: 6057 - DNA, 139 bp, Homo sapiens
tgtgggaacagctcttctcccagatgtaaatagaacaacctgcacaacctggatttttttaaaaatacaacactgagccatttgctgcatttctttttatactaaatatgtgactgacaataaaaacaattttgacttt

SEQ ID NO: 6058 - DNA, 144 bp, Homo sapiens
tgtgggaacagctcttctcccagatgttaatagaacaagctgcacaacctggattttttttcaatacgatactgagccatttgctgcatttctttttatattaaatatgtgagtgacaataaaacaattttgacttgaatctta

SEQ ID NO: 6059 - DNA, 139 bp, Homo sapiens
tgttgggagagccctgctcccagacataaatagagcaaccagtactaacctggatttttttttttaactaccctgaccggtttgctacattcttttttctattcaatatgtgaaagacaataaaacacttttgacttga

SEQ ID NO: 6060 - DNA, 136 bp, Homo sapiens
tgccaggacaacctttctcccagatgtaaacagagagacatgtacaaacctggattttttttttataccaccttgacccatttgctacattccttttcctgtgaaatatgtgagtgataattaaacactttagacc

SEQ ID NO: 6061 - DNA, 140 bp, Homo sapiens
tgtcgggacagccctgctgtcagatgaaaacagaatgacacgtaaaatccaggattttttttttctacaactccgactcatttgctacattcctttttttctgtgaaatatgtgaataataattaaacacttagacttga

SEQ ID NO: 6062 - DNA, 146 bp, Homo sapiens
tgccaggacagctgtgctctcagatgtaaatagagcaacctatataaacctggattttttttttttttttttttgtacaaccctgacccgtttgctacatctttttttctatgaaatatgtgaatggcaataaattcatctagact

SEQ ID NO: 6063 - DNA, 155 bp, Homo sapiens
gtgccatgctttgtgggagtctgggtcggcacactgtcagtacatcaggcacatgggcccactaggctggggtttctggttttgtttctgttgtgttttgttttggtttctgtattatgtatttttgtcaacgccaataaatttctttgatttgt

SEQ ID NO: 6064 - DNA, 32 bp, Homo sapiens
ctccaggctttgacatccctgtccacagctct

SEQ ID NO: 6065 - DNA, 591 bp, Homo sapiens
tggtgtttgtgctgtagctgttggaggctttgacaggaatggactggatcacctgactccagctagattgcctctcctggacatggcaatgatgagtttttaaaaaacagtgtggatgatgatatgcttttgtgagcaagcaaaagcagaaacgtgaagccgtgatacaaattggtgaacaaaaaatgcccaaggcttctcatgtctttattctgaagagctttaatatatactctatgtagtttaataagcactgtacgtagaaggccttaggtgttgcatgtctatgcttgaggaacttttccaaatgtgtgtgtctgcatgtgtgtttgtacatagaagtcatagatgcagaagtggttctgctggtacgatttgattcctgttggaatgtttaaattacactaagtgtactactttatataatcaatgaaattgctagacatgttttagcaggacttttctaggaaagacttatgtataattgctttttaaaatgcagtgctttactttaaactaaggggaactttgcggaggtgaaaacctttgctgggttttctgttcaataaagttttactatgaatgaccctg

SEQ ID NO: 6066 - DNA, 178 bp, Homo sapiens
aagtctccaaggaggtcgggatggggcttgtagcagaaggcaagcaccaggctcacagctggaaccctggtgtctcctccagcgtggtggaagttgggttaggagtacggagatggagattggctcccaactcctccctatcctaaaggcccactggcattaaagtgctgtatccaag

SEQ ID NO: 6067 - DNA, 996 bp, Homo sapiens
tggccccctcaagacctttggaatccagccaagtgatgcacccaaatgatccacctttcgcccactgggataattgactcaggaaagaagagcctcggcagggcgctctgcactccacccaggaggaaggatacgtgtgtcctgctgcagtcctcagggagaacttttttgggaaccaggagctgggtctggacaaaggagtaccctgcattacgtgggatatgtgtgatcaattggggacatgcgacacacaatgagggtgtcatgacaatgcatgacacgtacggttatatgtggcagtgtgaccccttgacatgtggcgttacatgaaagtcagtgtggcacgtgttctgtggcatgggtgctggcatcccaagtagcaggatacatgattgttggtctatatatgacacatgacaaatgtccatgtcacaggactcatggctggccagatgacctcaggctggcccaagatctaatttattaatttttaaagcaaatacatatttatagattgtgtgtatggagcagctaagtcaggaaaagtcttccgcccgagctgggaggggagagtgtccatgcactgaccagtccaggggctcaagggccagggctctggaacaagccagggactcagccattaagtcccctcctgcctcaatcctcagcctacccatctataaacttgatgactcctcccttacttacatactagcttccaaggacaggtggaggtagggccagcctggcgggagtggagaagcccagtctgtcctatgtaagggacaaagccaggtctaatggtactgggtagggggcactgccaagacaataagctaggctactgggtccagctactactttggtgggattcaggtgagtctccatgcacttcacatgttacccagtgttcttgttacttccaaggagaaccaagaatggctctgtcacactcgaagccaggcttgatcaataaacacaatggtattccacgtc

SEQ ID NO: 6068 - DNA, 306 bp, Homo sapiens
gctccagtgcccagcagcagcatgtcagctgagcctcctgccctcccccaggaacatgcacgctcactctgcttccttgtgggtggcctttttttaccgatccccttttttattttttacaaccggacctccacccccaacttcctccagcccagctgggcttcctttgttggagtcaactgttgatgcttccaggccaaactggcttcctctcctcctctccccacctttgccattcttaagtattgaatgtactttgtataattttagtggaattgttattgagaataaaatttttacaatcat

SEQ ID NO: 6069 - DNA, 53 bp, Homo sapiens
cacatgtgaagaggcatcgtggacttttttctactcaattccagccaatgttg

SEQ ID NO: 6070 - DNA, 1366 bp, Homo sapiens
gtcctacctccagccaatgaatgggatcattctggatgtcaccagcccaataggctcagctcatgatgacagaacacatcttggaaagactgactctgttatgtaactcttcatttatgttaagtattaataggtcaaaaccaaaatgacctaaccctcctggacctatttatcctgaaacaccttcttgtattcattaaccatagtactcctccccacctcaagtagacacctctctcaggagcttctgagtcagacgcctctggagcgagccctatgtcaggcactccacctggggggcccttccccagcatacctgctggtgtgtaagtgtggactaacccgccgccaccaccctctgttccagcaggctctgcatgaatctttgtgcacttgcacctctttttcacatgggccacagtttcagtacttcagcctcagtggggttcctgatgtttatctagggtgttactcaagcccagtttgagattttggagtctcctgtgatcacatcttgtctcggctgtaggaatcaacagaaggagacgtcctctacataaaagctccatgtgaaaagctactcctagtcttaacatttgcagtccttgtgtcactgtcttctggtcctgatgtagtcccactgtttctagaagtctcttttaagcattatttttgaaaaaaaaaatatttttatagatgaatactcaggctaacctagtggatgtgatcttggaacttccatgattatccacttaaagatcaaagtattatatgctgtgtgctttttaggtgtttgttagtactgtgaaggcaaaaatgctttctacattgacattcattcctattttactgggcacctatgaatgtatgctgtgtgctagaaatagactaaaacatattcctatagcatgttagtgtgtttgcatgtttgctgaaaatcctttgtgtataaaccagtttgtaaggttctctgggttaggtagggactctgcagtttcttcctgtcaaaatctctcctaccaagatggtgttccactgtccagcccagcatgagtagcaggtagagcacagctttactggctgtttgtatgctttggtttagtgcaatgtgtggtagattacttatcagaaaacatatatgtcatctctagaacgaagaaaaagcatagtagttcaattcccagtgtgtccctttgattttttttttttaatagtaaaaataagaatctgtactgacttttcacttggccattctggttttaaaggacaagctacaagctctgtgtttctgtactgatgtgtcacttattaaatacttttgtaccatgagtaaaacttcaggtgtttcgcaagaaccaccattctc

SEQ ID NO: 6071 - DNA, 2599 bp, Homo sapiens
agagcctactctgatgaccgtggccttggctcctccaggaaggctcaggagccctacctccctgccattatagctgctccccgccagaagcctgtgccaactctctgcattccctgatctccatccctgtggctgtcacccttggtcacctccgtgctgtcactgccatctcccccctgacccctctaacccatcctctgcctccctccctgcagtcagagggtcctgttcccatcagcgattcccctgcttaaacccttccatgactccccactgccctaagctgaggtcagtctcccaagcctggcatgtggccctctggatctgggttccatctctgtctccagcctgcccacttcccttcatgaatgttgggttctagctccctgttctccaaacccatactacacatcccacttctgggtctttgcctgggatgttgctgacacccagaaagtcccaccacctgcacatgtgtagccccaccagccctccaaggcattgctcgcccaagcagctggtaattccatttcatgtattagatgtcccctggccctctgtcccctcttaataaccctagtcacagtctccgcagattcttgggatttgggggttttctcccccacctctccactagttggaccaaggtttctagctaagttactctagtctccaagcctctagcatagagcactgcagacaggccctggctcagaatcagagcccagaaagtggctgcagacaaaatcaataaaactaatgtccctcccctctccctgccaaaaggcagttacatatcaatacagagactcaaggtcactagaaatgggccagctgggtcaatgtgaagccccaaatttgcccagattcacctttcttcccccactccctttttttttttttttttgagatggagtttcgctcttgtcacccacgctggagtgcaatggtgtggtcttggcttattgaagcctctgcctcctgggttcaagtgattctcttgcctcagcctcctgagtagctgggattacaggttcctgctaccacgcccagctaatttttgtatttttagtagagacgaggcttcaccatgttggccaggctggtctcgaactcctgtcctcaggtaatccgcccacctcagcctcccaaagtgctgggattacaggcgtgagccacagtgcctggcctcttccctctccccaccccccccccaacttttttttttttttatggcagggtctcactctgtcgcccaggctggagtgcagtggcgtgatctcggctcactacaacctcgacctcctgggttcaagcgattctcccaccccagcctcccaagtagctgggattacaggtgtgtgccactacggctggctaatttttgtatttttagtagagacaggtttcaccatattggccaggctggtcttgaactcctgacctcaagtgatccaccttccttgtgctcccaaagtgctgagattacaggcgtgagctatcacacccagcctccccctttttttcctaataggagactcctgtacctttcttcgttttacctatgtgtcgtgtctgcttacatttccttctcccctcaggctttttttgggtggtcctccaacctccaatacccaggcctggcctcttcagagtaccccccattccactttccctgcctccttccttaaatagctgacaatcaaattcatgctatggtgtgaaagactacctttgacttggtattataagctggagttatatatgtatttgaaaacagagtaaatacttaagaggccaaatagatgaatggaagaattttaggaactgtgagagggggacaaggtggagctttcctggccctgggaggaagctggctgtggtagcgtagcgctctctctctctgtctgtggcaggaggcaaagagtagggtgtaattgagtgaaggaatcctgggtagagaccattctcaggtggttgggccaggctaaagactgggatttgggtctatctatgcctttctggctgatttttgtagagacggggttttgccatgttacccaggctggtctcaaactcctgggctcaagcgatcctcctggctcagcctcccaaagtgctgggattacaggcgtgagtcactgcgcctggcttcctcttcctcttgagaaatattcttttcatacagcaagtatgggacagcagtgtcccaggtaaaggacataaatgttacaagtgtctggtcctttctgagggaggctggtgccgctctgcagggtatttgaacctgtggaattggaggaggccatttcactccctgaacccagcctgacaaatcacagtgagaatgttcaccttataggcttgctgtggggctcaggttgaaagtgtggggagtgacactgcctaggcatccagctcagtgtcatccagggcctgtgtccctcccgaacccagggtcaacctgcctaccacaggcactagaaggacgaatctgcctactgcccatgaacggggccctcaagcgtcctgggatctccttctccctcctgtcctgtccttgcccctcaggactgctggaaaataaatcctttaaaat

SEQ ID NO: 6072 - DNA, 2010 bp, Homo sapiens
actcctctggcctgtgtctagttgtttgattcagacagctgcctgggatccctcatcctcatacccacccccacccaagggcctggcctgagctgggatgattggaggggggaggtgggatcctccaggtgcacaagctccaagctcccaggcattccccaggaggccagccttgaccattctccacctgccagggacagagggggtggcctcccaactcaccccagccccaaaactctcctctgctgctggctggttagaggttccctttgacgccatcccagccccaatgaacaattatttattaaatgcccagccccttctgacccatgctgccctgtgagtactacagtcctcccatctcacacatgagcatcaggccaggccctctgcccactccctgcaacctgattgtgtctcttggtcctgctgcagttgccagtcaccccggccacctgcggtgctatctcccccagccccatcctctgtacagagcccacgcccccactggtgacatgtcttttcttgcatgaggctagtgtggtgtttcctggcactgcttccagtgaggctctgcccttggttaggcattgtgggaaggggagataagggtatctggtgactttcctctttggtctacactgtgctgagtctgaaggctgggttctgatcctagttccaccatcaagccaccaacatactcccatctgtgaaaggaaagagggaggtaaggaatacctgtccccctgacaacactcattgacctgaggcccttctctccagcccctggatgcagcctcacagtccttaccagcagagcaccttagacagtccctgccaatggactaacttgtctttggaccctgaggcccagagggcctgcaagggagtgagttgatagcacagaccctgccctgtgggcccccaaatggaaatgggcagagcagagaccatccctgaaggccccgcccaggcttagtcactgagacagcccgggctctgcctcccatcacccgctaagagggagggagggctccagacacatgtccaagaagcccaggaaaggctccaggagcagccacattcctgatgcttcttcagagactcctgcaggcagccaggccacaagacccttgtggtcccaccccacacacgccagattctttcctgaggctgggctcccttcccacctctctcactccttgaaaacactgttctctgccctccaagaccttctccttcacctttgtccccaccgcagacaggaccagggatttccatgatgttttccatgagtcccctgtttgtttctgaaagggacgctacccgggaagggggctgggacatgggaaaggggaagttgtaggcataaagtcaggggttcccttttttggctgctgaaggctcgagcatgcctggatggggctgcaccggctggcctggcccctcagggtccctggtggcagctcacctctcccttggattgtccccgacccttgccgtctacctgaggggcctcttatgggctgggttctacccaggtgctaggaacactccttcacagatgggtgcttggaggaaggaaacccagctctggtccatagagagcaagacgctgtgctgccctgcccacctggcctctgcactcccctgctgggtgtggcgcagcatattcaggaagctcagggcctggctcaggtggggtcactctggcagctcagagagggtgggagtgggcccaatgcactttgttctggctcttccaggctgggagagccttccaggggtgggacaccctgtgatggggccctgcctcctttgtgaggaagccgctggggccagttggtcccccttccatggactttgttagtttctccaagcaggacatggacaaggatgatctaggaagactttggaaagagtaggaagactttggaaagacttttccaaccctcatcaccaacgtctgtgccattttgtattttactaataaaatttaaaagtcttgtg

SEQ ID NO: 6073 - DNA, 201 bp, Homo sapiens
agcctcctcaccccagactcctgactgtctcccgggactacctgggacctccaccgttggtgttcaccgcccccaccctgagcgcctgggtccaggggaggccttccagggacgaagaagagccacagtgagggagatcccatccccttgtctgaactggagccatgggcacaaagggcccagattaaagtctttatcctc

SEQ ID NO: 6074 - DNA, 642 bp, Homo sapiens
gaggaaggggtataagctacaatgcctagaagagaatgagcggacagattgaaagagctttgaaaagtataaggtgccatccacataacctggtgttcacgagaacacactaaaggactcctgagtcactaccacagccacctggaaaccacaaggcatttgatgctaccgttctggtcagggattgggctgcttcttcagttcctaataccagaccaagcctcctgatgcctttctgcactgcaactgtgtgattgaaaaatgagatgttcatccaagcagtcaagccacagaaacccagcatgtccctgtcacaatctcatgggcaccttgatcatgtcttaaccttcccttaaccttggggctcccaagccagagtcaaggtctgacgccacctcaaggtgacagctcatctccagcacagcacaggcgtgtgcacacagaggtgttccttgcagccccctccctctcaggtgtcctgagatgctgttcctgggagccccctcagaaaactgcctcacctgagacaagtgcctgctggacagaggtgtgattccaggcctggtgtcacatgacaccagcatgcattgcaggattattagtgtattttgagtctgtaaaaataataaatatgtttgaagt

SEQ ID NO: 6075 - DNA, 890 bp, Homo sapiens
ctgcagcttgcctgcttcagcaaaaacggagattcaggccagcagctggatatgggggtctctcttcagactcttctcgtttctgagaatctagtctactgttggttgagcttcttggcaggacatcagtaccaactagaagtgggtcatagatagattaccagggatgcagtggtgtttaggcaggataggtctttactggccctgactgctgttaataattggcagcagtgctccccagatcccagaaggtccctgctggagtgtttccagtgcacctgtagggaaccaactagacttctctcctggttagtccagctctttactctaaaccctttctgtccaaaatgagtcattttcagttgtaccttagatgtctggtgttgaggatcaagtgccatagcctttattcagggggcctataaacccttccagttcttgccccagggctggcctgctagcgcttcaaattcccaggtgtccctaatttgagaagtaaccttttggaatagcattagaccctggctgtcccctccccaccaaataaacatgatatttcattctctgtccagcagtcatgaaccccttcacctccaatgacctgatcatttagtttggtgggggtgggggtgggggtgggggtggaagcagccgcaggagcaagggcccctcccacatacacaggaggagtatttcatttctccttaatgaaggctctggccctaacccctcagcactgtctccagataggaacatgcacaaagcagttaattaggcagcctggagaaaaccagagatccagtacagaaaggaaaggatatttattgattaacagaagttgtctttttaaaagtgtttatttttggcaataaagagcacaacataatctc

SEQ ID NO: 6076 - DNA, 1648 bp, Homo sapiens
tccgggcctcctggcctggaatcctcagcctctctggccgccagtagcctgaggctacggctcctgctagagagggtggcaggcctgctgctggaccccagaggccactgtgaccgccaaggggccttttccacttccacggcctctccaggcactgaggggaaggcattgctctacctctccctgacattttgctccggggcagatccaaccttacctggggcagcaaactttgtcctggtacctgggcccagctcgccagggatgtgggcagagcaccagcctgggcatcaggaagccaagtttcaaggactgtctttgagtctgtctgtatgaccttgggcctgccacttctcacagaccctaggtatccacagctgtgacatgggggcaagcggctttgtttcagcctaacccaggagcttagtaaaaattgcataagaccagggggaagagtgtcagcgtggggtgggaattcccgcggcctccacctgcttgctaggggcaggatctcattcaggctgccctggaagcacctgcttggccctgccaccttcctccaggggagggccagatggcatcctggcttggggcgggtgggacctacccaggctctgagactttactggcctatgcctgaggcctcttttcctttaactccctaaattatgatgactccaagtccaagcccacccttcccaaagattgggaggttccgccgttcccagaggctcctcctgcggtgctcccaagacttccatagaccatctggaccagtagcccatcccgcagttttcttgggggcagaggaaaacgcttctttctcctccagctgaatcagctggatcccagtgtcctggctgtttggtgattgggcaagattgaatttgcccaggtaggcgtgagagtgtgggttttaaattcgaagctcaggccatagtttcagagaatcacccttaccccagaccttcatgagacagtgctcatgaagccagtgcgtttcccagaacgaacactaggcggcaccgttggtccacactcagaggcccttggcgccaagactgcatctagaatcgctcaaacacctgtttgcagaccccatgcaccagctggaggggccgtaactgcaggactgcgcctactgagtgacccatttcctccaggaggaaaggcaagacacgcttacacggccatttgtctcttttcccaatgcggcggtgcactttcgctcttgggggctgcaccccagacatagctggcaccagagcagggtgctcaggtggtgggtgctcagggccctgccccaggccactgggccgttttgatgacctcgaaggtcacaggcagaaaataggagcaggatttcccctggggaaaagttctcctgggacatcttctgctcttctgtacatttctagatgcaaataactccttcaccaggcagtgagtggcgtaggctctggagccaggctgcctgggctccaatgccagctctgccacttgctagctgtgagactgtggacaaaccactcagcctctgtgtgcctcagttttcctatttgtaaaatagaggccatagtggtacctattttgaagactaagtaaaagaattcaaataaagagacttggcacagagtaagtgctcagt

SEQ ID NO: 6077 - DNA, 1450 bp, Homo sapiens
gcctccagcccacctgcccatgtgatgaagcagagattcggcctcgtcgcacactgcctgtggcccccgagcccggcccagccccaggccagtcagccgcagactttggaaagcccaacgaccatggagagatgggccgttgccatggtggacggactcccgggctgggcttttgaattggccttggggactactcggctctcactcagctcccacgggactcagaagtgcgccgccatgctgcctagggtactgtccccacatctgtcccaacccagctggaggcctggtctctccttacaacccctgggcccagccctcattgctgggggccaggccttggatcttgagggtctggcacatccttaatcctgtgcccctgcctgggacagaaatgtggctccagttgctctgtctctcgtggtcaccctgagggcactctgcatcctctgtcattttaacctcaggtggcacccagggcgaatggggcccagggcagaccttcagggccagagccctggcggaggagaggccctttgccaggagcacagcagcagctcgcctacctctgagcccaggccccctccctccctcagccccccagtcctccctccatcttccctggggttctcctcctctcccagggcctccttgctccttcgttcacagctgggggtccccgattccaatgctgttttttggggagtggtttccaggagctgcctggtgtctgctgtaaatgtttgtctactgcacaagcctcggcctgcccctgagccaggctcggtaccgatgcgtgggctgggctaggtccctctgtccatctgggcctttgtatgagctgcattgcccttgctcaccctgaccaagcacacgcctcagaggggccctcagcctctcctgaagccctcttgtggcaagaactgtggaccatgccagtcccgtctggtttccatcccaccactccaaggactgagactgacctcctctggtgacactggcctagggcctgacactctcctaagaggttctctccaagcccccaaatagctccaggcgccctcggccgcccatcatggttaattctgtccaacaaacacacacgggtagattgctggcctgttgtaggtggtagggacacagatgaccgacctggtcactcctcctgccaacattcagtctggtatgtgaggcgtgcgtgaagcaagaactcctggagctacagggacagggagccatcattcctgcctgggaatcctggaagacttcctgcaggagtcagcgttcaatcttgaccttgaagatgggaaggatgttctttttacgtaccaattcttttgtcttttgatattaaaaagaagtacatgttcattgtagagaatttggaaactgtagaagagaatcaagaagaaaaataaaaatcagctgttgtaatcacctagcaaactgg

SEQ ID NO: 6078 - DNA, 915 bp, Homo sapiens
gaaggcacggccctgcaatatggactcagctctggctctctgtgtgaccttgggcagctccgtgcctctctctgtactccctcagtttccttctctgtacaatgtggctggggagggagaggatgggaccaggttggaccacgtggcatcagaggtcccatccagatccaactataggtccaagagtccacgtaagcaggtttgcaaggctctaaagttcctatagtcctgagaccccctgccagcaaagagtgacagtcacctccatgccctgccctcattgcaaagccctcactcaccttctggtctcagcaagggaggagagtctgttgctggcatagccctggaaggagcccccagcctctcccctcctcctccttgtcactggcctcccacaactccccttctggctgcctgtaaccttgaggggcattcaggaggccagcgttccctcaggcactgggggtttgttttggggggtgggagttgatcctcccacccagtctgcccctggtctctgcccatccaatcagagcccaccctcctggaagagacccccgtgttcagagtgctggcagccctgcacgtgtccagggacactgcatttcaaagaaccactgagtgggtgagctaccttgggcaaaccccccactcctgactctgactgccacgtgggtggcccgacctctgacctgctgtcatcgtagaggtagaaagcaaacaatctggggctcagcacacctgggggtgctcccactcattcagtgtgtggggcccctgagcagaggctgggcattgccactaggacctgagctcctagagaacaaggacctgggtggcctcgcttactgttccagcccaggccaagcacagggtctggctcgtggcaaaccttgaataaatatttgttggctg

SEQ ID NO: 6079 - DNA, 197 bp, Homo sapiens
tgtccctcctggggcctcagccagagctgccagagaaaggaaacctcttcccgcagcctggctcctgtgttccctctatccagccaatgcctgtttacacagacacctggcctcactgccagcccacctcccctacagccctgtttgttcctgcttctcatgattttcctgtaaataaacacactcttaatttgcca

SEQ ID NO: 6080 - DNA, 304 bp, Homo sapiens
ggaaagcagtgggcaggggcgctcggcagcccacagggcctggcctcagcccccactcctgttccttgtgcacccactggcccatgagcctctgcctggcccctgctgctgtcctgtggccgtcctggaggaggtgatgctggtccctggccacctctacagccctgaactcttgagacaactctctccagcaatagctgcccagctttgcccaactgttgcttcttggggcagcgaactgagccctggggctgctgctgtaatttataaggcaaattttattaaatttgtaactattcccagg

SEQ ID NO: 6081 - DNA, 687 bp, Homo sapiens
tctctggaaaggaggctgactcccaggctgccggacggtgccacctcaggtcccctggccagacagaggacttatggtggcaccagccatctccccaggagttcagcctaactagaaataaacctaatgctcccttagagacacacgcaattgtctctgtctgtgtgtgttgcacagcctgggagagggtcagggccacaggatgacagtatcttacccttgcccgtccccggccaactcctggaggactggtggggggttggagaaaaatgtctggtgacctggtttgagagtcagggtgtaagccgcaaggtccagccagaattgagatccaagagcaagagatgtgctccagccccttgcctgcagccccacacccaagccccctccatttcagatcctgaatttgagccctaagaagaaagggagagggctagaaagctatttttaggtgcctttttgaagctcttgtcatactggtgtgctctggggggcttccctgtgcctggggtccccctgaaggtgtgggagcaggctggggcaaggggagctggccaggcctatggccttgattcctgtgacgcaacagaatgtagagtctaaacttgcatgagatgcatgaagccactcagagaagaaagttccccgctctccaaagcaccaccaataaacatgtcatttaagcaa

SEQ ID NO: 6082 - DNA, 1372 bp, Homo sapiens
gcaccagaggccttcctcctccagggccctctgcagaccaggctgagatggaggaacctgctaaaatcgatggagatgcttctagcctcccagtaggaggccccagccatgccttcaacctggcaggaggtgtagccactcctcatcctccctgagtgctgatattctctctctctctttctcttcctcttctttctctctcttctcctctctttctctcctctgtctctcttcctctcctctcttcctctcttctctcttcctctcctctctctcttcctcttctctctcttcccctcctgtctctcctcccctcctctcttcctctcctctctcttcctctcctctctctacccctcctgtctctcctcccctcctctctcttcctctcctctctctcttcctctcctctctcttcccttcctgtctctcttcccctcctctctctcttcctgtcctctatctcttcccctcctctatctcttcctctcctctctctcttcctctcctctctctctcttgctttcttctctctctcctgtctcggctgttgtgggttgcaggttgggtgctgctgttgtggtccttcccagaaactgccagtagagggcagcctgggcatcctaatgcttactctggttgttacacaaagaaaatattggggtcactggcgagcccacccacactcaccagaatctccactgtagtccccctaacaaacagcccttcacttcctctcccacttcagcaatttgtattttgatgccattggcctcagatcagagtgttttaaatcatcacgccctggcttatccctggtcgagccaggacacggggtgcttcagtgggtctgtcaccctctctccttgaagcatgttgcttttatttatttacttttactctcaccctgctcctgtaccagcaggggccacttcaaagccaaggtacagggtgataacttgtggtccagcatcagttttctccacttctttctcccactcacccccagcaaggtgcctggggagacttgagcagatgtttcattttggcctggccagtggctgaaagccaggcctccaatgcactgtgacctctggcttccccagcagctttcccagagaggcagaggggccttccacagcccgggttctcctgctgcctcctgcctgctgcagctgcaggcattctgaggggcaacgtggaggaagggccagggatgcatgggattttaattgtttcatcacaccttccccgtggcaaagaaacagtcagtcctcttcaggtgtcttctggatttctggtgatggacagagaaatctttttacagtttcaaattatgttcaacaaataaaaattgcattttttattttgg

SEQ ID NO: 6083 - DNA, 1452 bp, Homo sapiens
ccacccagcgctcctgctaacggtgctcagggggcgcctgtggttctgagatggctcccaggggctccctccgcccccaggtaggggcccctctcagccctcacacaccctgtctgccccgccctcattatttatgtccaggtgtttgttttgttttgtttttggcaccttacttgaccatttgtttctgtttccccgactggggcagggtgtttagaattttctaaatgtagttctgctccagacagggaattaggcccccatcatcctctggcttggccacagccaggggagcagaggggcagaggcccacattggaagagcagcacctcctcagcctgaaccccagggctgtaactgccaggctctctttgcccagttggagactgtctggcccccctggtcccctccttcccaagtgagtctctctgggccttaggaagagccttccacccaggggcagccccaggccaaaggggacctggaagggaggtgggccgtggcccttgagtccccattgaggcttggttccttcccaatccagtggacttcgcagtccacttctgacagcctcagtgaccctggctccttgtgccagagaacccagcccacccccggcagcagcccccagctcccacctccccttgggcccacacctccttccctctctggagaaagggccctgggcctgcctcaccacggaccaaagggagtctgccagggcccctctccccagggaagcagcagcctcgcccctggcagagatgcctccctgagctagaaccctctgttccttccctgtgcctcctccctccctctccgactcacaccactagcctcaggggtctgagctccagctcctttgggcttcagctgccagtgtcctgagccccagggagagggggctggtgggtgcctaggcctgggcagtggatggccgtgaatgggtgcccacagtgtcaggcactgggcatgaggggttcctcccctccagctccctgtgcccccagggtcctgggaggagagacactggtggggataggccagccgcgcatcagactgtgaaccccacgaaggagcccattgtggcctaagaggctgccctcctgtgctcagccctgaggacagatgcctccttcctcttttccttcccaaagcaagcaagaggccgtggctgctgtgggaaatggtactgtacagctggctctacttccccatggccctgagcgagtggagtctgccacccaggatccccaaggcacttgagggggaaggattctgctggcctctgcgagtggtttcttgtgcactggcaccaagtgcgggtccggcagcttctgccccctgcagaaccggagagccagctaaggggtggggctgcgggggttccgtgtccacccccatacatttatttctgtaaataatgtgcactgaataaattgtacagccggc

SEQ ID NO: 6084 - DNA, 4051 bp, Homo sapiens
ccagaggcaggccacggcttacagaccactacatgacctataaaagtaatcagctcctttctagtcacgggctcctctcactgttccctgtctgcctggtgttcccaaccccccacccaggctgcgtatcatctcctgggccacatctgcccatggggagtgttttcacagcctggcccctggaactgttaccactgaaagaaccacagggcactctaatggtttgacacttgttagccagcatttagttcacaagcatagtgaaagtgaccttcccacacctgggagagggatagaggagggagagccagcccagtgtatgccatgggcttatccgtggcagccccagtgtgcaactatcaaaaacagacatcaaaacagcatggtgaatgcctggcactcagcattctcagtttactcttcagtttggtggggtagctcctggactagatactgctgcaaaagaaaacaagcacgaaggaaaccaagatgatttcttcgggctgatacaacctgttctgacctgcaaaaatcctaccttcccccacctccccaccgtaatagtcatagtataagggttgtacagacgcctcaggagacctgcctgattcctttacatccttctccctaacatctagactatctctagagctgtttcctagtcgtgaatgcgtgatggtccttctttgtccctgcaagtatgatccaacatggcccagttcagaatcagaatatgtcttctgtgtcatggtggcatttggtccatggtgggagaaagaaatcaacttttcccagtggtggagtgaggacaggggagggccggccctctcagccttggatgtgatccatttgctgtagtcttccaccttggtgtacagaaacaggccagggcacgtctcaccaccgaagttcaggactcctctcagaacccacagatcgaactgctgtagctggcacatcattgggcttcctgggtccccctgtgataaaagacagaaggcttcaagtcttagaaaaactagtttttgttgtaaatctatccttgtgcaatatactgtttgttctagaaatgttttacgctggttctcactggaaatggggcaaattataggatacaatttcaaatctaggcagccaccaccacaaattccaacaagatgacttttccttttattatgcaaattagctgtggacttctgctgattgcctatagcttcctggttcatatttcattttcttgcccctttccagtcctttggccaaaccttccctctcttctggcttctcattcctgaaatgttggtgtttgtttctgttttgtcctgaaatgctcacattttcccttctctgccttgcttcaacccttagtgtaagccacttcctgccacctggcaactgcttaccagcctggctggccgtgctctgggtcttccctactcccaatggagcagtcctctgggacttgggaattctgccacatacactttatctaacttaaagtgacggagtagaagcttggcatcattagctagatatgggaccctggcaagtgaccaaatcctctctgagccaaggtgggaacacagttaatgcctgtaacacgtgctgagcacagcacagtgcctggcacacagcaaacactcaatagaatattagctaccatcatcctgatgtcgctataaaggccagcatttttctgaaaagttggggaaaatgggaaaagcaacaaggcaactagtaggtatcacttaccttacctgcccagaccccacacccctaggtctcctctcaaaggaattcctgcccctcccatggcccatcttggtccgagaagggggtggtcatccccaggctagccagccacttctgacctgtgtggcctgcctggctggaaggcccaggcaatgacatgttgctctcgcagtttggactgagacatggaatggggccgcaattaacaacaggaaacaatctgaacagactgaaccacgagcagcagaaaggcagaagagcagccgcttcagccccttaccatccgagacctgggtgtgtggtctgtcttggtcactctctctgtctctctttctctctttctttctctgtccccaaggctggagtgcagtggtgcaatcttggctcactgcaacctccacctctgggattcaagcaattctcccacctcagcctctcgagtagctggggctacagctatgcgccaccatgcccagctaatttttttttttttttttgagatggagtcttgctctgtcccccatgctggagtgcagtggcatgatctcggctcgctgcaacctcctcctcctgggttcaagcgattctcctacctcagcctccccagtagctgggattacaggcgcccaccaccacacctggctaatttttatttttagtagagatggggtttcaccatgttggccaggctggtctcgaactcctgacctcatgatccacccgcctcggcctccccaagtgttgggattacaggcgtgagccactgcacccggcctaatttctgtatttttagtagagatggggtttcacgatgttggccaggctggtcttaatctaacttcaagtgatctgcccgcctcgccctctcaaagtgctgggattaggcatgaactaccatgcccagtggggtattctctttcaataaagctcctcttttccaaggaagccacaccagaacagagatgaagaccagtgggaaaacatgggagcaactccgtgggcaggccagcggggaggccatgctgcaaagctgccgtgattccctggtgatctctcagcaggccaaggccagacatgtgaggaaggccttgaggacttcattctgtgcctctccttggatggaagggggtgctttagtgtggcactcctgacttttcaattgactggtgaagaggcccttgtgtgcacctcactatgtctgcctaggtcatgggggctccctggccaagaatgacgtggttccccctttcatcagtccgattcgcagtttgtcttaactgtagtggtatagccagagcaagaaaaagaatgtgatttaggacaaatgattggatgagtgattggtagatgtcctcagctatggcgtggttttgcaggtcactgttccacccacctgggcacagcatatacgctttttctcttccccataatcctgtaggggctgcgacttctgaagcacaagaggcagaggcgaacagctccaggtgcccctctggagctaccctacctcatctcccaagggagcggccacagcccagagtggggtctttcattttgtgatcttttcccttgacattcagcaaaagccctgacagtggtagaataaaggcaggatgggtgagtgcagagtgattctgcttttgttgggtttcagggaaacccataggcagattctgaacctggtggttgattctacatgtgggaattgtggctttgaagacctctggacatgagaacatatttccaagacagaggattctatggggacgggtcaccattaaatggtgtgcaagcataattctgttcaaaaatgaaggcatgtttagaggtgtgtcacagttaaaaaccaacctgaactttgcagttagattttaaaagatggtcagttagagtagaaatagcttagaatattccattgagtctaagatacagttagaaatcaacatctttgaaattagggtgtgtcttttaatcagttgatgtcagagtttaacgggcagcatttttttctttcttgggattacaaaaaatgatggtgcattctataattggcagcatcttagatctgaggaagtatgatacttgtttgacggaatggttgacggcagaattttgttaaaaagctatatcttcactgtattttaacacattatctaatttaagaaattgttaagatcccccacctggcagaggacccagtacaaaataggcactcaatagatgttacaccaactttggaagggcaaacatatttcttaatgagaggcagtccttcatgttttgcaataaaatgactttt

SEQ ID NO: 6085 - DNA, 1402 bp, Homo sapiens
aagccggaagaacacagaatggctcctcacagacgtatccctccgtgtgtccttgataggagctggttgaccttgtacagaaccagaatcctgtcccatttcatggcttatttcctgtggccatagagaattatagggaactggacatgctggaggatgtgggtgtccctggctctgtgagtcttccaggaccgtcccaccctgctgacccacagcccaggccctttaacccaagaacccatggccaaggagaaatcaaagtccttcctaaataagaatcactgccatataatatatcacagtagagttgcaactgagattccttgtgtctgggagtttggacagcttcagatgtacagtttcactagccacaaagcacaggtacaaactgggtcatcgcctgttcacaaaatgctctcttgatcttatttgcctcatcttcctcatggttgtacagaggatagcaccccaccatgccagcctgacttggagatatctcctgctgcctgcctgcagggagttaccccagtttccaaaaacagtcgcccagataaaggaggaaaagggaaaggcagacgaatggcatggcttttactaaagaaaagatgttggcctcatactctatactcagggcttaatgaactggaatctgcataactcagcagtcaacccagaagggaaatggttaaactgagcttgttattgcctcggagagcctaagagcacccgcacacttaattctactccctgtctagaaaagctgtcagggagtcgtttggaattgcaatgtagttattaagggctgttaaccagcctgcattacatctggaagtcaggacttgggtgctgactatgaagggccctgttttcaaaatctaacattgcaagtgtaaatgggcaagaagcctccgttgtgctttttttttcctcttcagtaacttttgcaacattattgcatagaagatccctgaccatttactaggaacctggttaagcaagcactaatctcttttcctggagatcaaggatgcaacctcaggttgagaaagaaacagggttccctgggcccattagactgtttgcagggcatcactgcttccccctgacacctcacaactagcaaaaattgtctttgtctttggaaattatagagggatttgggtatccagattgtgcagatgcaaacttaggctgtcttgatgcaaacttagaaccacagaaatgcttttaaaatgcctgttttaagatggaattgttgtttttataatttgattttagtgctaaataaatgattggctttgtacatgaatatgttctgtacaagtgctctttcactagtactacagataatcaaagctatcagaattgtgtctttgatcatatttgacggtaatacacaaat

SEQ ID NO: 6086 - DNA, 2042 bp, Homo sapiens
agcccttgatcccgctgacgacgcccacgtcgaggccccaccgccatccttgcgccggctcatgttccctttagtttatttttgtgagggcaaaggggaggaaatggggttctgtttgaaaaaaatgaggggatcttagatgctgcagcagaacagtctccaggtgttttaaggggctcagtcctcctcatcccatctcactctccgtggtaacttagccaacttgacccctctcatcccactcccggcggcccaggcacagaagggcagggccatagggagggagattcgctacggatccaggccattcctgggtgagcccttgggcaggcatgtttggagatgagagaggcttcgagagggtgggtgctgggccacaggggtgcggggccagctcaggcactggcgtgggagccctgggagaccccttcccccaccctccaccaagcacacctgtttctgtctcatagcacatgtgacaatcatctggacaacagccacaagggggcgctcggaccaggcagccactttcctggtgctctctgggcccagctggtgctgtagggccacgcaggcaggggcgtcaaggggtttctctgcccaaggaagacagaacatggagaaccgtcagggcaggaaccccacagactgtcccttccagcccacactctgccacctcctggccctgtcccaattctgagccaaggcctccccgaggcagaagttgcctggtcctctgtccccacagtgacctgactgggggtgagggagaaggaggagagagcccatgtgtggtgtgtgtgcccctgagaacttcgtggtgactgcctttgggagcccgcaggtggccagaggcaggggtagctgagttcctggagaccccttttttgcccccaggttccccagagggcaacgccatcagtagcagtgtggtgtttcaggcagagctctggccaggctgtgccagtgtgtcccggacgcatcactaaggaagagagagtttatttagtcaactggcccaaggcagcgaggcttctacagtcccacaccccatagccgcctgggctggggcttactgggggctgaaggttctggacatgaacaagggtcaggtagaagagaaaggcttcccctacaccccagcctcctgctgtcccctgaagcccaggactgcgttgtatgctttccatccactcaccttaccccatagcatcttgcggcccagaaaccagagccatttgtctcagaccctaaatcaataatcacaaaccccaaaacgggagagagcagtgaaaacatgcagggctgtggacgggggaagggttgtggcgggtgttctgaggctgagaggacacctatatgcgtatttcctctacacacatcaccccccttctataatcttaagccatgactagcctggtggcgtgttagtttctgcccagttctaccccctcatgtgcttcttctgaatactgaatgtgactgtttgaaagctggtagaattcatccctcttactgtagataacactgcaaatcttggaattttgttttttgctgtttccagatgtatctataaatatctatacattatatgtgtgtgtgtgtgtgtgtgtgtgtgtgtacatcgggtcctcccatgtgtggtgttcttctggaggttgtctctttggtcaaggtgaacttttaatgtttattattttcttctccgcacaaagtaaagagcctaattttgtgtattctggtggctgctgtcatgagatgataaaatgtaaaacaaaactctagtcaacgtagaaagagttaactgtgctgaaaaactaataaagaacctaagaagaattccagtgtggtgatgccatgcccatcatgggaggcttttggagaaacagaatgtttgggcaggggctgctggtgctgcttgggttttgggttgagggtgctaggagaggatggtctccacccatctttctatttccagtacacgtcacattattttaccggtgagatgagaatgtcacaaacattaaaagccttatgtgctc

SEQ ID NO: 6087 - DNA, 617 bp, Homo sapiens
cagtttccctgttccctgaaggaacagcaataagaactttattctaagctaatactcattgatgtttgaaaaagaggaaaatttggatctttcttttgcttactaaacaccaagaggaaaagtagcaaagttggtgtgctaggattaactcaggtaagggtgatgtgttttaggattgagaacagcagacttgggaatcactgctaattgttacttaaagcatgttacagatgttttgttctcagttttaaccaaagccagtggacatacggtagtaataagtaagtcttgttgtgtttcagcatttaataatagactttggaggtagacccctggtttaaatctaagtctagtttgaggaagtcacttaacctttattgaaaagactctggatttaataagctgtgtaactggtactcgatagttacccaaagttcagtctagatggcacaaaccacctctcagggaataaaccctaagacatcactcaaggaggacttcaattatttaattttgaactgttttgtcctctctggccataaaacttgacagtcatgaaaggtaaggcaaattttaagtgggttaagtttttaaatacgtatctactcattttcttt

SEQ ID NO: 6088 - DNA, 1616 bp, Homo sapiens
gcggccgaggtcactctgggcctggggacccaaaccccctgcagcccaggccagtcagacgccaggcaccacagcctccaaaaatggcagtgactccccagcccagcaccccttcctcgtgggtcccagagacctcatcagccttgggatagcaaactccaggttcctgaaatatccaggaatatatgtcagtgatgactattctcaaatgctggcaaatccaggctggtgttctgtctgggctcagacatccacataaccctgtcacccacagaccgccgtctaactcaaagacttcctctggctccccaaggctgcaaagcaaaacagactgtgtttaactgctgcagggtctttttctagggtccctgaacgccctggtaaggctggtgaggtcctggtgcctatctgcctggaggcaaaggcctggacagcttgacttgtggggcaggattctctgcagcccattcccaagggagactgaccatcatgccctctctcgggagccctagccctgctccaactccatactccactccaagtgccccaccactccccaacccctctccaggcctgtcaagagggaggaaggggccccatggcagctcctgaccttgggtcctgaagtgacctcactggcctgccatgccagtaactgtgctgtactgagcactgaaccacattcagggaaatggcttattaaactttgaagcaactgtgaattcattctggaggggcagtggagatcaggagtgacagatcacagggtgagggccacctccacacccaccccctctggagaaggcctggaagagctgagaccttgctttgagactcctcagcacccctccagttttgcctgagaaggggcagatgttcccggagcagaagacgtctccccttctctgcctcacctggtcgccaatccatgctctctttcttttctctgtctactccttatcccttggtttagaggaacccaagatgtggcctttagcaaaactggacaatgtccaaacccactcatgactgcatgacggagccgagccatgtgtctttacacctcgctgttgtcacatctcagggaactgaccctcaggcacaccttgcagaaggcaaggccctgccctgcccaacctctgtggtcacccatgcatcttccactggaacgtttcactgcaaacacaccttggagaagtggcatcagtcaacagagaggggcagggaaggagacaccaagctcacccttcgtcatggaccgaggttcccactctgggcaaagcccctcacactgcaagggattgtagataacactgacttgtttgttttaaccaataactagcttcttataatgatttttttactaatgatacttacaagtttctagctctcacagacatatagaataagggtttttgcataataagcaggttgttatttaggttaacaatattaattcaggttttttagttggaaaaacaattcctgtaaccttctattttctataattgtagtaattgctctacagataatgtctatatattggccaaactggtgcatgacaagtactgtatttttttatacctaaataaagaaaaatctttagcctgggcaac

SEQ ID NO: 6089 - DNA, 56 bp, Homo sapiens
ttttatattactttttagtttgatactaagtattaaacatatttctgtattcttcc

SEQ ID NO: 6090 - DNA, 283 bp, Homo sapiens
tcgtgtgttgcatcgatgcgtttgtggtcaccacgaagatgaggaccaacttgaaaagattcctgggagtcgaagttgaaaggaagctttcccccgccaaggacgcctaccccgaaaccggccccgacgccccgcagaggcccgcctgaagccagcccggcgccctagcagatgcacgtgtctgtcgaatcgctgcctccgagcccacccccgagctcgcatgctgtcacccattccagcctaaatgtgaccataaaattagggctgctgcttttatcgagaa

SEQ ID NO: 6091 - DNA, 153 bp, Homo sapiens
cttggaggaggctcctggtgtctgaaacggcagtgtattttacagcaatatgtttccactctcttccttgtcttctttctggaatggttttcttttccattttcattaccacctttgcttggaaaagaatggattaatggattctaaaagcct

SEQ ID NO: 6092 - DNA, 1253 bp, Homo sapiens
aggcctggcgggtgccttggcaacctgagccacacaggcctccacccctgcgcctcacaggggtcgctggcgttggagcggaggcctggacttctgagttgcagagggggctgcggacacagcaggccccctacagcctcaggttctgcctgagcccagcctaccaggcttgcccctcagctcagcactgttgaccacgctgcgtatgagggcatcttgggtatcccactccttctccccatttctgtcccacaggccttcagccctttaacgtctctgccaaaaaccagcacaaggagacaaagcagagccttgtctgtatctgggcagcaggtgttccatgctgctaggtggcgggggtcgggggtcttctgtttcactaacaggaacaaagacagaaaccatgacagggctgccccgccaggccccggtgggtttgtctgcacttggtgctcctgcccacaccagccactttggtgacaatgacccttccaagaatctttggttcaaggagcaccagttccctcttcattcttgaagcagggagaaattgacctttgccttgtcgcccaggaagtggggctcggcacccataactaacacctcccacccttggaaaccatgtcttctgggggtgagatgaccattctgggtctaagactgtttcaaagaagagctcatagactgactggtccagaagacagagggtacaacagtggcatcacagtgacagtgtcatggggagctgggcgggcccagccaaaccctccttcttcctagagcccagccagcaggcaggagttcctggaccctcaggacagtgaacttccagacctcagggcaggtctatgggccactgcaggagatgagaccagccttctgtgttcacctaacgatttatactgtgtatctgtctttgatggaattttgtaactttttatatttttttatgcaaaagcagcttcttaacagatggcattttctgtgactctaggcctcacaaaagagccagagttctggacccatgtttggagcatttgtagccttattctcttgcgtgtgaatctcttaccctgaaaaaaagccataatgaattaagccagactgaccacttgcttggagtgtgtgcttgaaaaaaccagagcaatactgttgggtattgtatcaggcttcagtacaaactggtaacaccaatgtggatcctgacagctttcagttttagcaaaaatacacgtgaaatctgactaccattt

SEQ ID NO: 6093 - DNA, 646 bp, Homo sapiens
gctgcccatctgcctagccggccactagggcaccatcttctcaagggcttccatgtcagcagacaccaaaccatctgaggcttcctccctggggggtgctggggaccctccttcagccagtttgctccttggtcaccctggaggcttctggatgggacccttgagtctggggcacccttcagctgccctggggacaggaaggacaggagctaagcagggtccaagcctggggctgcctctgctctccaagacccaaagaccctgggaacctcctctggtcttccccactggcagtggcagcagccccaccccgagcgcacactgtgatggaggagactgagctccctggggcgggcagctgacactaccagagagactcaagcaataattagaggtgggcagagctgccctctcggcattacctcttctgcaggctctgccatgcacgcacctcactgccaggccattaaaatcagcacccagcatgctggaggtgacgtggccttctccctccagccacctgctgccacgggcaggccctggctatagcttatacagtatctccccttgtccccacccagtcaccaaagccacctacatgacagtccatccctgttgaattaataaattaatgtatccatgcaac

SEQ ID NO: 6094 - DNA, 2078 bp, Homo sapiens
gaatctcccatcctattgtcaaggttaacataaatgctcttctaaaatgtttcacttactcctaaactagctatccaaaccttactattaaaagcgcaggcagatttaatttgctaaatagactaacaggaggaaaaaaacaaacagcctagctttaaaaaacagtgaaatagcagtgatttcatgtccctgtatgttctgattaagtcttatatgcagagaggacagagcataaagtctatagaattggcttgggcttgtgtagccccagtcatttgataaagatgttgttaaactgtgtcagcctgagccttcaaagggtaaatttaatcatgattctgagaataaagaacttcaggagcttcttaggtcttgccacaaaaatctgcaaatttgataattctcctgaattcacaatcatggacttgtagactatgaagagatattttatttgtttgtcttttatttaaattactaaggtctaggtttacaaagcatactacaggacccttttctatgcaatatcctaacttttttttttgtgattatgcttgtgagaaattttgtaatactacattctagttctgttttcgtttattttaaaactgaatccttaaacttgcaaacacgcctactgtaagcatgcttggaatgacttgttttggttttcagctgataggatctatgcctctggaccagctgaacttactggtgcagctttttgtgccctctactgagtcccattccagaaactttgagccatgctaggaggtaactagtctatgccttaactcctgacctttcctgcattagtaaaatttcctcctgggctgagcctttgggggttgattcacagcatttaagctttctgattatacctctcaaacattcttctgtcaattccacacaatccttctacctctgctatgctgaacccctcattcaccctgcacctgccaactgcaaaatattgtctgaaagaatctttcacatgttcctgcttcctatggctgcaggaaaggagaaaatgtgattgcatgtggtagttgtggtgatagacgtttagacaggacaggttaatttagcggattgtggacttaagattcaacctctatctggagaggtgaaaacacaaaggcttaaggacaacagtttctaaccaagtttctctgaatcctttcctgagaggtggtgggcaggagggaggagtgagacttatcagatgggacgcttgccccaagactgtgggataaaccaccattgctagtcctcaggaattagaccatatttagtataggagttggggcaaaaataaaagtgtaatttgtaatggtttctgtgggctgtagactctttgtatttacttggaaattcagttatgtggatccattttggagatgaatttcatctcatgagttgctgtggcatttaaacaacaggaaatgtgtccctaaatggaaacaaatataatcccacaaaaccaacaattttatttgcctctactacgtcaggcagaattcttcaattaagttgaactacatttgttgatcccttttctcatcttacccctttatgccacctactgaaaagaaaaacaaatagctaggtttggtttcctgttttttgtctatgtcccagctgacattcagtcaaatgttgggatacttctaatttggtggtgtttctttgtacatttttcagtgcaactgtttagtcatgtgttttcatctaagaaattatcttttgaatatttaagccttgatccttttattctgaaaccattaatattccttcttggctgggtgcagtagtttacgcctgtaatcccagcactgtgggaggccgaggcggatggatcacctgaggtcgggaattcgagaccagcctgaccaacatggagaaactccatctctactaaaaatacaaaattagccaggtgtggtggtgcatgcctgtaatcccagctactcgggaggctgaggcaggaaaatcacttgaacccgggaggcggaggttgcggtgagccaagatcgcaccattgcactccagcctgggcaacaagagtgaaactctgtctc

SEQ ID NO: 6095 - DNA, 1064 bp, Homo sapiens
ctccctgtgccggggaggagggggtgggttcgctgacaggcgagggtcagcctgctgtgcccacacacacccactaaggagaaagaagttgattccttcattcacttcgccattcattcatacttccgtccatccattcagaaagcatttattaagaatttactcaggcatgatggcccatacttgtaatcccagctattgggaaggatgagatgggaggatggcttgaggccagaggtttgagaccgaccagccagggcaacacagtgagaccccttctcaaaaaaaaaaaaaaaaaagagagagtgtgtgattagaagctaaataggaaagttttgagcttcaagtcagtgaggagtaaaaaagatttttaaaaagcaaagaaaacaaaatataagggaaaaatatgagaaaaataaaaataaaaagagaataataggccaggcactgtggctcatgcccctaatcccagcacttttgggaggtcaaggtgagcagaacacctgaggacaggagtttgagaccagcctgcccaacgtggtgaaaccccatctctatgaaaaatacaaaaatcagacgggcacagtggtggtgcccacctgtgatcccagctactcaggaggctgaggcaggagaattacttgaacctgggaggcagaggttgcagtgagctgagattgtgccactgtactccagcctgggcaacaagagcgagactccgtttccaaaaaaataagagagaatagaagaagctactgcatgatgttagttaccaagcctgccatgggtcctctcttgctagacacactccatagatccccccactgagctgtggatgggcaaaccccggtggaatcccaccctccccaacaccccactgagccctgggccccctcctcccttcctcacctccaccttctccctgccttctctcttctctcgtctgagcccccaggccttttccactttgagggaggtgcttcgaagaatgttgcccacacctaagtgttagaagcctatgtccgttcatccctgagaggtctgaaagaataaaaataaattct

SEQ ID NO: 6096 - DNA, 2100 bp, Homo sapiens
ggccaggcctgaaccttcttggctggggcaaaccactcttcaagtggtggcagagtcccagcacggcagcccgcctctccccctgctgagactttaatctccaccagcccttaaagtgtcggccgctctgtgactggagttatgctcttttgaaatgtcacaaggccgcctcccacctctggggcattgtacaagttcttccctctccctgaagtgcctttcctgctttcttcgtggtaggttctagcacattcctctagcttcctggaggactcactcccccaggaagccttccctgccttctctgggctgtgcggccccgagtctgcgtccattagagcacagtccacccgaggctagcaccgtgtctgtgtctgtctccccctcagaggagctctctcaaaatggggattagcctaaccccactctgtcacccacaccaggatcgggtgggacctggagctagggggtgtttgctgagtgagtgagtgaaacacagaatatgggaatggcagctgctgaacttgaacccagagccttcaggtgccaaagccatactcaggcccccaccgacattgtccaccctggccagaagggtgcatgccaatggcagagacctgggatgggagaagtcctggggcgccaggggatccagcctagagcagaccttagcccctgactaaggcctcagactagggcgggaggggtctcctcctctctgctgcccagtcctggcccctgcacaagacaacagaatccatcagggccatgagtgtcacccagacctgaccctcaccaattccagccctgaccctcaggacgctggatgccagctcccagccccagtgccgggtcctccctcccttcctggcttggggagaccagtttctggggagcttccaagagcacccaccaagacacagcaggacaggccaggggagggcatctggaccagggcatccgtcgggctattgtcacagagaaaagaagagacccacccactcgggctgcaaaaggtgaaaagcaccaagaggttttcagatggaagtgagaggtgacagtgtgctggcagccctcacagccctcgcttgctctccctgccgcctctgcctgggctcccactttggcagcacttgaggagcccttcaacccgccgctgcactgtaggagcccctttctgggctggccaaggccggagccagctccctcagcttgcggggaggtgcggagggagaggggcgggcaggaaccggggctgcgcgcagcgcttgcgggccagagtgagttccgggtgggcgtgggctcggcggggccccactcagagcagctggccggccccaggcagtgagggccttagcacctgggccagcagctgctgtgctcgatttctcgctgggccttagctgcctccccgcggggcagggctcgggacctgcagccctccatgcctgaccctccccccaccccccgtgggctcctgtgcggccggagcctccccaaggagcgccgccccctgctccacagcgcccagtcccatcgaccacccaagggctgaggagtgcgggtgcacagcgcgggactggcaggcagctccacctgctgccccagtgctggatccactgggtgaagccagctgggctcctgagtctggtggggacttggagaacctttatgtctagctaagggattgtaaatacaccgatgggcactctgtatctagctcaaggtttgtaaacacaccaatcagcaccctgtgtctagctcagtgtttgtgaatgcaccaatccacactctgtatctggctactctggtggggacttggagaacctttgtgtccacactctgtatctagctaatctagtggggatgtggagaacctttgtgtctagctcagggatcgtaaacgcaccaatcagcaccctgtcaaaacagaccacttgactctctgtaaaatggaccaatcagcaggatgtgggtggggcgagacaagagaataaaagcaggctgcctgagccagcagtgacaacccccctcgggtcccctcccacgccgtggaagctttgttctttcgctctttgcaataaatcttgctactgccca

SEQ ID NO: 6097 - DNA, 612 bp, Homo sapiens
gggtggctatgcaggaaggagccaaagaggggtttgcccccaccatccaggccctggggagactagccatggacatacctggggacaagagttctacccaccccagtttagaactgcaggagctccctgctgcctccaggccaaagctagagcttttgcctgttgtgtgggacctgcactgccctttccagcctgacatcccatgatgcccctctacttcactgttgacatccagttaggccaggccctgtcaacaccacactgtgctcagctctccagcctcaggacaacctctttttttcccttcttcaaatcctcccacccttcaatgtctccttgtgactccttcttatgggaggtcgacccagactgccactgcccctgtcactgcacccagcttggcatttaccatccatcctgctcaaccttgtgcctgtctgttcacattggcctggaggcctagggcaggttgtgacatggagcaaacttttggtagtttgggatcttctctcccacccacacttatctcccccagggccactccaaagtctatacacaggggtggtctcttcaataaagaagtgttgattagacctgaatttctccacctat

SEQ ID NO: 6098 - DNA, 2321 bp, Homo sapiens
tcctggttccaatttaggtggtggtgatgacctcaaacttcgttaattaatagcacagcagatgtgtgctgcccatctttacatacacattgcttctagttggcagaaataattgattaaaagaccagaaactgtgataactggaggtactacggtctatttctcaaccttaggcagtaatagacatcacaaactgccatggttttgcactatgattataatacctgcatttctaattttttaagcatgtagccagtaataatttgaagttttttttctatgcaagcttaccttgttggcattattttagggagttgaaactatcaactgtaaagctccttttcttccactttaatttaaaagttcatgtcatttaaaaacaagtcaagaaattaaaattgtatcagagggttttctctaatcattttttctatttttttttttgtacttctagatgttttggttatacagcttcattttagatgagcattcttattttttgttttgtttgccccatttccttttgtgtttttatagtctatagcattttaaaactgctgatgttgtttgcattatttacaggctaaaaacttagtagcatagagctgtctgccacagccttctgacaaagtttacagttattaaagttgcagtatccttttaaatgctagtaatcagcactctttcttttttttttttttaatagagacagggtctcgcagtgttgcccaggctggtctcgaactcctggcatcaagcgatcctcctgccttagcctcccagagtactgggattacaggctctttctttttaaacataaaagttttaaattggtattaactctgtactctgccctagattgttttagcttctgttctgtaatcatgagtttggttggagatattctccatagatgatcttctactgaaatgcctaaagaagtcacaggctggcttctgttttattcagggatttttttaaaaagtcaatcagaaaagggatactggagcttcttcatgtatgtaacagcatattaaactggagacagtgatgaatcagctacaaaggtaatattgtattaaaatcatgtttaagatagctgcttttatgtgtattttatattgcatgcttttgtaaaaacatgctgggtgatgaaagattagttttagagagaaaatgttcatctgtgcagaggatgcattttcttccattaattctggaaaaaacgttcacagttatatatatggtattttgcaaaaggactattaatagaaccttttgagatgaattaatgtaagaatattttttaaataggcttactgtcaaattgcaactttttttttagatacagagtggaaaacagtgctaagtcatttggcacctccttacaaatatttttcatggtcacatttattaaatgttactacatttctgaatttttgaaaaatgtattttatcattaaatggcattattttaaagggtgaaaaactgacacagtcaattcagaaaatggactgaagtctgaataaggtcattgcatttaaaaagcatataactgtacttgactgatgagggaggtgttactttcattgtatataggtcttatttcataaacagatatcctgtatcaaataaaagtatttgttatatatttgaagttatgcatggaaaggagtgtgtttaaattgttacaaacaataatgcgtcattaaaggccatgctgatcttgcataactataagtactatgaatgaatttggttggttttggtgttgtacagctcacatgtttacacactcagtgccctaatttcccctgagggaatcgctttttaagtgatccttacagtggtgttttatgttactttattacagagctccttggttttttacttctgcacttaaatttttttaaataacatgatgatggtacattttcctctattgtctagctaagggctttcggtccaccagtaaataagatcaaatgctcttaaatgttcctgttaccatcctaatgtaaatactggatttttctgtcatttagcaccatgctgcttctgtctgtcttaatgctggcattaagatcatgagccctttttctccagtagtacaggctttgaaaactacttctattaagttattgatgcaatttgatattttttcataatctatatttaaacaaaattacatcattgcatcatcttttctaaattcatctccattaaaacttgccttaagctaccagattgcttttgccaccattggccatactgtgtgtttgtttgtttaatttactttcacaataaacttctgtgtagt

SEQ ID NO: 6099 - DNA, 322 bp, Homo sapiens
actattcacccatgggttcctggtgcccctttccccccactttcagggctcaccaggcactggcagggagggtaagggctggctccagatacccctcccccacagattcctagcaatgaaaatctaatatattcttctgttgcccctggggttggagagtcagtgcctgcagtcaagtgcctcccagcctcggctcagcacatcccttgccacaaatcagtgtctggggcttggccaccctgccgctgcccagccacatcccttggttttgtattttatttacagagttttacagaaaataaaaaagcaaaatgtctttcct

SEQ ID NO: 6100 - DNA, 1406 bp, Homo sapiens
ggacaccaccacccatgcccctctgtcccgtggaactgtgcatcacatcctgctcagtgggcctctgtaccaccctgtgggttttcttggacacctggccagtgctgaagggctgttgtgatgttctgaggttgggctcaggctgggtgctctgccatgggctgagtggcccagatattcttctgtccatctttggcctgctggtgccagcaggggacacagactgcaaagagaagcacaaagtttgagccttgattcctggacccaggagctctcaactaacaaggaggcaggagaggtcaacccttgtcccatgcacattgggaagacttggggctctttctgtgactgaggacacaggcacccaggataaggacaaggtcctgcctttggctccacattgccacatgacccttaaggcaagcaggtagcgtgtccatagtacttggttgcgacatttgcactacatccactttagttacttgatgagctggctgtggccagggtggcccacctgcccttccctgttcctttcttgcacgcgctccctgcctgggcacaccaaactggttgaaacacagctttctaccatccaggtacatgcccaggcctggttctcacccctgttggagtcagctttcaagattgcctgtgcccctgctctgccccatcctggctggcagggctgcatgtttccatcctgtttgcctcttttatttaatgccaaagttttagccaaagacatcttcctacttttgttgtgtttcagcattctgttctgcactgtgggctggctctctgccccaaccctgggcactggcccctggctgggccatttcatggctcaaagcctctgggggctcaaggaaggctgggctgctcagtcccttcatgggtcttgctaatggaaagtagcatatatgtgctttaaaaatattaatccttttgaaaagaactgagaagaaaaatgtataattttatcccatttttaatattttggtctagcaacttgtgatacatagatgacaattttgtgagtttttcaaatgtgtgtacagatttttgtaaatatgactcttttgtaattaactcatgtacagcctcatcctgtatagtttaatgatgaatgtgcaggggacctgtctcaggctcctatatggttcctgggccttatagccaggtttgtgtggcgctcccgacttttgtgactgactggtgtcttcccatttggactgtggcctggccagagccccttgcatatccccactgtcaggggcagccaggactgttcccatcctcctggaatgggggaaccttccttatcccctgcccacatcccctctccaataaagcacctgtgccctcagcaatggcctgccatgtgctgttgctgggatgtttgtatt

SEQ ID NO: 6101 - DNA, 354 bp, Homo sapiens
ttgggcgacttctctcccccgtccccgtggacgtaagcgctctgagagggaacggggggggtgtccaggcgcgccccgagtgctagtgccttcttttgggattgttgccccccgggtctttaccgagttgggaactgtgatggcatcgggaccagtcctgggcgccctgagaccactcgctgctctcaccctctgcagacgccccacccgctcggtcctggacacactgcccccctctcttgcctccacccctctgcggactctgcagctccgcggccccggcgcagggagagggagggcacgggcgcgggccgggcctcaagggtgagtgtgaaataaacaaatcctgcagtg

SEQ ID NO: 6102 - DNA, 160 bp, Homo sapiens
gaccccgcgcctctgaaggggcttggaaccagtccgccgctgcacatccttcttggcttcctggcgccccctatcgggggtgagcgaagcccccactactaaatggcctctctccactaccccgactatccctgcacataaactccgttttttttttttc

SEQ ID NO: 6103 - DNA, 667 bp, Homo sapiens
aggccagagctctgacaggcggtgccccgcccatgctggataggacctgggatgctgctggagctgaatcggatgccaccaaggctcggtccagcccagtaccgctggaagtgaataaactccggagggtcggacgggacctgggctctctccacgattctggctgtttgcccaggaacttagggtgggtacctctgagtcccagggacctgggcaggcccaagcccaccacgagcatcatccagtcctcagccctaatctgcccttaggagtccaggctgcaccctggagatcccaaacctagccccctagtgggacaaggacctgaccctcctgcccgcatacacaacccatttcccctggtgagccacttggcagcatatgtaggtaccagctcaaccccacgcaagttcctgagctgaacatggagcaaggggagggtgacttctctccacatagggagggcttagagctcacagccttgggaagtgagactagaagaggggagcagaaagggaccttgagtagacaaaggccacacacatcattgtcattactgttttaattgtctggcttctctctggactgggagctcagtgaggattctgaccagtgacttacacaaaaggcgctctatacatattataatatattcgcttactaaatg

SEQ ID NO: 6104 - DNA, 794 bp, Homo sapiens
ctgacagggacatgccctgtgtggctgggacccagactgtctgacctgggggttgcctggggacctctcccacccgacccctacagagcttgagagccacagacgcctggcttctccggcctcccctcaccgcacagttctggccacagctcccgctcctgtgctggcacttctgtgctcgcagagcaggggaacaggactcagcccccatcaccgtggagccaaagtgtttgcttctccctttctgcggccttcgccagcccaggctcggctgccacccagtggcacagaaccgaggagctgccattaccccccatagggggcagtgtcttgttcctgccagcctcagtgtcttgcttctgccagctccttcccctaggagggaagggtggggtggaactgggcacatgccagcaccacttctagcttccttcgctatcccccaccccctgaccctccagctcctcctggccctctcacgtgcccacttctgctgggcctttagccctagaacctgcaggtggtgggggcggctaccaagaaggaacagaggtctctggggaggagtctgggtggtccagccctgatgattggccccacctcctgctgccccataaccctctcttcatttcggctttttcatttaccctcatttagagccatttgcagagatttagaaagatttacagtaacgaatggattcctatataaagattatttttatactttttgcagcaaaaggaaattgtaatatttgtacagtgttcaagtgaataaaaaccatgcctaaggct

SEQ ID NO: 6105 - DNA, 146 bp, Homo sapiens
cagtgtggctggccatgggccacagctgcggccactgcagcagccatgaagggcagtgggtagaggagtgcaggcaccctgaccagcagagattgctgcagaaataaagtctgcttggctcttgggatatgttgagccagctctgt

SEQ ID NO: 6106 - DNA, 165 bp, Homo sapiens
ccattgacattgtggccacaggccactggccctgggtggctctgtcagggtgcacagcccctcatgcctggagcaatgagggtctagtccaggggccaaaagcagtctgaggtattgggtatacttatactctatagggtcgttgaataaatggcttagaatgtg

SEQ ID NO: 6107 - DNA, 980 bp, Homo sapiens
ctcaaggcctcggggaggagcaggaggtggaatccctgtgggaagtgctccctgggtgatgggtagagccctcgaaacttgacatggggccagaagggcctgggttgaagtagtaattgggcttccttggagctagtcagaggggtcacctaagctggtcctcacaggggcctttctcaccacctccctgctcctaacccctgccactttctgtttcattaaggcctctactctggctcaggacccagtccaggccttctacgggctaggcccagagacttgggttgctggtcccccttccctagtgggttttcccggggactctataggcagctgctcctgcccgcaaagcaagagcatcattcctattcttcagtggatgccagccttccctgccccaactccctccccagcactgggtcagtggtgtcctggcagtgaggctccgtgaggggctggcccttagaggaactggggtgggaggtggggcaggcctcacccttgggctttgctgccctgttgggtcagctacccatagtccatttttttagggcagtgggaacctctgcctccacttcctgctttagccccttccctttgctgccaggtattggggtaatatttcctccttttccaagaccaaggccaagaggctgggccaggcttcagttcaggcctgttgcttaactggggtcaccctgggatctgctgctctgggtctaagtctagacctttctgatccttgggtctgggttttttgaggaggggacatagtggcctctgggctgccatgtcaccacctgaacattccccaaacagagaaggaacccagcatctcagggccactgctccattgctctgggggctgggatgcctggctaagcaggggctgacagggtggcaggtgactttctagggatcagcacctgccctgtgttttgtaccttgaacctaagatatattaaacatctctcagatgg

SEQ ID NO: 6108 - DNA, 671 bp, Homo sapiens
gcccgggactggacgagcagtagatccagcagcctgcagctccaaggaacattgcctctctggatctgctgtgaccagggtgtggctgacacctgggctacctccaacctacatgtgcaacgctgttgactaccctttctgatgtgtgtggccattggactaactggcacggggcctctctagggaagtctggttgtagagcctgaataggctcctggccccatgaccccttctcctgtccccagctcccatcccagttgtgggttaagaataggctagagcagacattgggtgtttccatgctgtaggctggtgggggaccatgtgcctctaggcagtgactagggtgcccccacccctcaggaagaacacaggtgggctcctagcagctgatccccaatgcctggccttaaagccgagctcagttaccatagggacaggtccacctctactgggccctcatgcttgcctttcctggcccccaggcccagcccctttttactggggcagtttcgttattttgacttgatgccttttgaataactttcaatagaattgtctaaaattatcttactggttgttaggcctttggtgtctcagagaaggagtctaggtctttgatgtgtgatttaatcttttatttgtttataataaaaaatagactgatatgt

SEQ ID NO: 6109 - DNA, 109 bp, Homo sapiens
agctagcatggaactcacaccacagcttccctggtccacagaggctctcaccgccattgccaccagtatggtggtatgtactcacaaagattaagaaagaaatgtattc

SEQ ID NO: 6110 - DNA, 546 bp, Homo sapiens
gccatgtgcacctatggcccagccactgcagcacaggaggctccgtgagcccttggttcctccccgaaaacccccagcattacgatcccccaagtgtcctggaccctggcctaaagaatcccacccccacttcatgcccactgccgatgcccaatccaggcccggtgaggccaaggtttcccagtgagcctctgcgcctctccactgtttcatgagcccaaacaccctcctggcacaacgctctaccctgcagcttggagaactccgctggatggggagtctcatgcaagacttcactgcagcctttcacaggactctgcagatagtgcctctgcaaactaaggagtgactaggtgggttggggaccccctcaggattgtttctcggcaccagtgcctcagtgctgcaattgagggctaaatcccaagtgtctcttgactggctcaagaattagggccccaactacacacccccaagccacagggaagcatgtactgtacttcccaattgccacattttaaataaagacaaatttttatttcttct

SEQ ID NO: 6111 - DNA, 1312 bp, Homo sapiens
tggcggagccttgtgcgtcgccaggacttctctgggctgtgtttaaacggcccgcatcttaatttttctcccttctttctttttttggctttgggaaaagcatcattttaccaaacataccgagaacgaaaacttcaaggatgatgttagaaaaaaatgtgatttaactagaacttgctgtctgatgttagcaaatcatggaatgttctgagtccctgagggtttactgtgaagtgctgaggacagtgttgacaactaactcgttttcctagatggaaacggagacattgacccctccctccatgtggtaaaccactccagaatggccaccaggcttcccagagttctatggtcttcttcccaagagagtttttaattgtaaatgcatacttgggaaggacttagagttttaaactgttttttgcttttgcttttccctgactccctttgcttggagtcagctgcacaccagtagtatggcatgctacgatcaggttctgtcctgaaagctttgcctctttcttggcaaagtttctggtatggtcaagcttgtaaataactttttttacattttaatcttttccattaattaagaggttgaaaagaagtgcagtgtaagaaaacccagcattttaattacttgcaaattaagttaccacagactctgtagtgtgtaaatgttgacaaggaattggatcacaatcatgtagcagaatggcacccagaccactgcccaccagtgacggacatgcacgtggcagatcatgatttccagcccacggagccagcatttgaaccttgtataattaactttcagttatgatttcccatcgacattttctttgccctgtttgtagctgattgttgtgttttataaatcttctgttaaggcagaagggtgattatgagtggttcacagcagcccttataagctgggccagaaaatttcactaggtcagtaatttaaaccttggatcttcaaaaaataaaataatgtgaagcaaaaccaactaaaaagtgattcttgcacatgaactgtcacatgtttaaaaatgtgttttttagagagcctcagtcttactgatttcaaacacttttttcttctgtgtattgcttttaagagagccatcagttagctatcagactctaggttgatgcattttgtacttagctgtactgtgtgatatttttcattattttaggacgccaacatgagacctgtaataaaatatgtaatggggttgaaagctggggaggaggatctactgctgtacagctaataaatcataacggattaacaagtgctccaaag

SEQ ID NO: 6112 - DNA, 49 bp, Homo sapiens
tcctctcctctcctgccgcatgagattattttattaaaaaactcaaagg

SEQ ID NO: 6113 - DNA, 130 bp, Homo sapiens
cagtcaggatgaagccccatgccactccacactgctgggacatggcagggacttcacagtgggggtttttagctggctcacagggctccctcagcctggggaacattaaaggttttctacaaatacagtc

SEQ ID NO: 6114 - DNA, 158 bp, Homo sapiens
ctgtcccgccccactggtggctcccctccttccacgcctgaatttggcttcaggcttcctgtgggcctaggccctctggtggcgggggcaaatttggcacctgcccccacttgggactttggtcttgctgaaaataaatatttttctttttcaaagac

SEQ ID NO: 6115 - DNA, 74 bp, Homo sapiens
gaacttgtgggcagcctgcgtactccagtcctgctaacccctagcttttaatataaaagtgtttgtctgaatcc

SEQ ID NO: 6116 - DNA, 695 bp, Homo sapiens
actggtgccccggcagcctgctggactcccagaccccatccagccaggggaccgcaggccattgttgaactcctctatactcctgggcactggttgacagtactgaggcttaaggcagctggactctcttgctggtgacctggcatcctcaattgtttcctcctgaagtggaagctggggccttagactctgccctggtgacaccagcaattatgactttgtctacccttcctccccagttattgttgcagattctggttaagcagaggcttcagaaccactgaacttgaaacttaccctctagggatgcaggtgggatgtccagggactataggtttgggaaaaccataccttaaggttggtcagcagtcagacaactctaatgtgtgtagtgataagagattcaagtaacatcagttctcctccttttcatgcttttccttcccaggtgcagcctgtgattctgatggggactggtaaatctgtgcctctgcctcctaggacttattttcccaggaggccatttacaaggggatctggatgacctgctgatggagatccagcttgccagggacttaggtttatcctgttttgtttgctactggttacaaattctattttctgtacaattagtcagactaaagttttcactgtgtttgtttggcaaaacaaattaaacaaaaagtaaggttttt

SEQ ID NO: 6117 - DNA, 402 bp, Homo sapiens
cctcctctcagctaggcactcacgctgtttcctcctccctcctcttcccaatactattcccactcctccagatgctccaaatatcatgcacaaatgagcagggccgcggtgggagtgggcgcagtgcgctgctgccactgaggtgttgtgcatgatgtttggatgctagactagttgcatctgacgggagaagtttgtgttgtaccagcgcatgccttggaaagacttaagtaatgcaaaaggttgtccttttttttttttttttttttttaatctactgacaagttgctctagtaacccaaagaagtgaaggagaaagcagctgcctcaccgcccagacattgatttgttcagatgtttcaatgcctcatgatacaataaaaccacaaaaattttcttaac

SEQ ID NO: 6118 - DNA, 354 bp, Homo sapiens
ctgctaagcctgccttgcccaggggtgggatggcactgaaggccagcagacaggcctaggctggggcagggtcacggctggcctttacctgctcaggcccccatctctggggtgtttgggggtcagggagcagggagcactggccgtggtctacagcgtgtggtagtcagaaggtttagctgggcccagggcaggtattgcgcctgcttgggttctgccatgcctggagcatgaccctgagatcgtgacaccacttgagtggaattttccatgttcctttttacctctaatttggatctttttgtttttgaaaaacattgagaaattcaattaaatgcttttggaataaaatgg

SEQ ID NO: 6119 - DNA, 108 bp, Homo sapiens
cttgttgggttgggtagcagcgcccgtacctccagccctgctctggcggtggttgtccaggctctgcagagcgcagcagggcttttcattaaaggtatttatatttgt

SEQ ID NO: 6120 - DNA, 2035 bp, Homo sapiens
gccgcctggctgtgcacacatgcagcacgacccagcctggccacacactgtggtgccatctgggtccgatgccctctctggagataggcctatgtggcccacagtaggtgaagaatgtctggctccagccctttctctgtgccttcagcagcccctgtcctcaccatgggcctgggccaggtgtgacagagtagaggtagcacagggggctgtgactccccctgaactgggagcctggcctggcactgatacccctcttggtgggcagctgctctggtggagttgggaagggataggacctggccttcactgtctcccttgccctttgacttttccccaatcaaagggaactgcagtgctgggtggagtgtcctgtggcctcaggaccctttgggacagttacttctgggaccccctttcctccacagagcccttctccctggtttcacacattcccatgcatcctgatccttaagattatgctccagtgggagaccctggtaggcacaaagcttgtgccttgactggacccgtagcccctggctaggtcgaaacagccctccacctcccagccaagatctgtcttccttcatggtgcctccagggagccttcctggtcccaggacctctggtggagggccatggcgtggaccttcacccttctggactgtgtggccatgctggtcatcggcttgcccaggctccagcctctccagattctgaggggtctcagcccaccgcccttggtgccttctttgtagagcccaccgctacctccctctccccgttggatgtccattccattccccaggtgcctccttcccaactgggggtggttaaagggagccccactgctgctacctggggaatggggcacctgggggccaaggcagagggaagggggtcctcccgattagggtcgagtgtcagcctgggttctatcctttggtgcagccccattgccttttcccttcaggctctgttgctccctcctctgcagctgcacgaaggcgccatctggtgtctgcatgggtgttggcagcctgggagtgatcactgcacgcccatcgtgcacacctgcccatcgtgcacacccacccatggtgcacacctgtagtcctccatgaggacatgggaaggtaggagttgccgccctgggggagggtcccgggctgctcacctctccccttctgctgagcttctgcgcacccctccctggaacttagccatactgtgtgacctgcctctgaaaccagggtgccaggggcactgccttctcacagctggccttgccccgtccaccctgtgctgcttcccttcacagcattaaccttccagtctgggtcccactgagcctcaagctggaaggagcccctgcgggaggtgggtggggttgggtggctgctttcccagaggcctgagccagaaccatccccatttcttttgtggtatctccccctaccacaaaccaggctggaacccaagccccttcctccacagctgccttcagtgggtagaatggggccagggcccagctttggccttagcttgacggcagggcccctgccattgcaggagggtttggttcccactcagcttctgccggtcggcagcctgggccaggcccttttcctgcatgtgccacctccagtgggaaacaaaactaaagagaccactctgtgccaagtcgactatgccttagacacatcctcctaccgtccccaatgccccctgggcaggaggcagtggagaaccaagccccatggcctcagaatttccccccagttccccaagtgtctctggggacctgaagccctggggcttacgttctctcttgcccagggtgggcctggtcctgagggcaggacagggggtttggagatgtgggcctttgatagacccacttgggccttcatgccatggcctgtggatggagaatgtgcagttatttattatgcgtattcagtttgtaaacgtatcctctgtattcagtaaacaggctgcctctccagggagggctgccattcattccaac

SEQ ID NO: 6121 - DNA, 294 bp, Homo sapiens
ctactcttcctgccttagtcacccctccatgggcctggtgctaaggtggctgtggatgccacagcatgaaccagatgccgttgaacagtttgctggtcttgcctggcagaagttagatgtcctggcaggggccatcagcctagagcatggaccaggggccgcccaggggtggatcctggcccctttggtggatctgagtgacagggtcaagttctctttgaaaacaggagcttttcaggtggtaactccccaacctgacattggtactgtgcaataaagacaccccctaccctc

SEQ ID NO: 6122 - DNA, 585 bp, Homo sapiens
tgaacgagataattgggagagacatgtcccagatttctgtttcccaaggagcaggggtgagcaggcaggctcccctcccgagtcctgagtccctggatttaggaagatctgatgggctctaacagtgcttactgcagccttgtgtccaccaccaacttctcagcatgtttctctccttggaccttgggtttccaactctgcagccttcaggtctggggccaggagtgggacccaccatttgtggggaaagtagcattcctccacctcaggccttgggtagatttggcaaaagaacaggagcagcataggctgtttgagctttggggaaatgaactttgctttttatatttaactaggatacttttatatgatgggtgctttgagtgtgaatgcagcaggctctcttgtttccgaggtgctgcttttgcaggtgacctggttacttagctaggattggtgatttgtactgctttatggtcatttgaagggccctttagtttttatgataatttttaaaataggaacttttgataagaccttctagaagcaaaaaaaaaaaaaaaaaaaaaaaaaagaaaaaaaaag

SEQ ID NO: 6123 - DNA, 403 bp, Homo sapiens
tgaagattcagggactttattctcccaagtgtcatgaaaaagtttctatggattgcttattggcatatggttgggcttttaaataagttgttattagaaatatatgttaatatataactttgccaggtaccacggctcacgcctgtatcccagcactttggaaggctgaggcgggtggatcacaaggtcaggagttcaagaccagcctggccaacatggtgtaacgctgtctctactaaaaatacaaaaaattagccaggcatggtggtgtgtgactataatcccagctactcgggaggctgagacaggagaatcacttgaacccgggaggtggcagttgcagggagctaagatcgcgccattgcactccagcctgggcggcagagcaagactccgtctcggg

SEQ ID NO: 6124 - DNA, 1399 bp, Homo sapiens
ctcctgtgccacaggactcctgtggctcggccgtggacctgctgttggcctctggggctgtcatggcccacgcgttttgcaaagtttgtgactcaccattcaaggccccgagtcttggactgtgaagcatctgccatggggaagtgctgtttgttatcctttctctgtggcagtgaagaaggaagaaatgagagtctagactcaagggacactggatggcaagaatgctgctgatggtggaactgctgtgaccttaggactggctccacagggtggactggctgggccctggtcccagtccctgcctggggccatgtgtcccccctattcctgtgggcttttcatacttgcctactgggccctggccccgcagccttcctatgagggatgttactgggctgtggtcctgtacccagaggtcccagggatcggctcctggcccctcgggtgacccttcccacacaccagccacagataggcctgccactggtcatgggtagctagagctgctggcttccctgtggcttagctggtggccagcctgactggcttcctgggcgagcctagtagctcctgcaggcaggggcagtttgttgcgttcttcgtggttcccaggccctgggacatctcactccactcctacctcccttaccaccaggagcattcaagctctggattgggcagcagatgtgcccccagtcccgcaggctgtgttccaggggccctgatttcctcggatgtgctattggccccaggactgaagctgcctcccttcaccctgggactgtggttccaaggatgagagcaggggttggagccatggccttctgggaacctatggagaaagggaatccaaggaagcagccaaggctgctcgcagcttccctgagctgcacctcttgctaaccccaccatcacactgccaccctgccctagggtctcactagtaccaagtgggtcagcacagggctgaggatggggctcctatccaccctggccagcacccagcttagtgctgggactagcccagaaacttgaatgggaccctgagagagccaggggtcccctgaggcccccctaggggctttctgtctgccccagggtgctccatggatctccctgtggcagcaggcatggagagtcagggctgccttcatggcagtaggctctaagtgggtgactggccacaggccgagaaaagggtacagcctctaggtggggttcccaaagacgccttcacgctggactgagctgctctcccacagggtttctgtgcagctggattttctctgttgcatacatgcctggcatctgtctccccttgttcctgagtggccccacatggggctctgagcaggctgtatctggattctggcaataaaagtactctggatgctgt

SEQ ID NO: 6125 - DNA, 4491 bp, Homo sapiens
aggtcagaggtggctttctgaggcctggaaggcaggccaaccagcaaaatcctgataacaagactctgtgggcccaactctcctgaattaaaggagccttttgacccaatcatatagtggggctcagggccagtgctcactcttattggtaagctataggagactcaggatctgggccaacctcaaggtgggggcttcagagggtggggggaagattggggaacggggggaatggtcatttagttttactcctgataggtagatgcagctcttacagatatttacttggtaaagtgcagtggggaagagggaatgctaggttgatagggctggtggcttctgaatttggtatttgaactaggagtccctatagaggggctgctttatgggaagtttttctctgaccaggtacaacacctgactttaaaggcctgaaatgctaccatttcttcctctggctcaaaattcttccctggggagagagttatattcccttatttattgatatttagtccagaacaccagttctaacgaagcatgcgtgtctcttcatctacaggatgcaataggctgattgtatttaaaaatcaaagtacccaaaactgagtccctttgggctcagaaatgtctgtggtattgggtcagactctgaccacaggttttatgctgtttagcacaatttctattgagtcttacctgcaacaatgaaccttaaagatttttttactcacgtacctgttacactttagcatacagatagatcatagatcacgttacaagcacttggctcaggtccagcaaggacagatgaacaaattcctgagtcagaagtctgttaatattgctgttttgaaggacaatcctttattttacttgagaccttacatctttgttctagctgacagtaaatctctgggtttctgttacgaactctaagagggctgaaacttctgatattcaggtggatcacctgaattctctcagctgtcaatggcttggagaacatctcatgggcccaagtcatcaaataacctgttcctctctgtaagggcagtgtgagggactgctgtgcagacccaagcaatcccaacctggtgctaggtcatttcacttttctgaaaacctcacatcaggctgcatcctcttctgtccctggcaccaggctttgtttacacttggagccaccttggtgtgggtcaccgggacagtgtactcctctcctgccagcctccccttccccgaggtgtggtggctgcagtctcaggaagagcttggtacttgtggggacttctgttttctccctgtggagatcagtgaagactgggaggaaagctgcttcaacctgagtccggctcttcagcaggctgcacaagtggaagcaactaattctggtgctcaggctgggctctccacccaagttaggcctgctctggcctaatggatcttactgtatgagcaggacggctgcattggattgtacaactgttttgtgatgcccccagacactgtcatcctgggccgagaagaacctgctagcttgacataccccatgggcttatccttaggttttggaattggtcaacagtgaggcagtctcccttcctgaccattcttctccacccagtcacagataagggaataaccttggccatatatttgctcaataaagattgaaggaagcatggtcatagttgccctgggttcagagcataatgcatatgtgaagcatggggtgacattcctactgtcatgggtttgggatttgtaacggcaaattcctgcccgacgacagggtgtcttatgcaaaggctgacttgcctgaacgctaagaacatgacttctgtctgagctaagctggcacccatcccagggctcctctggagctaatcctttaagcaaaatgtgcttgccttttaaagatccctgaccccagctttagctttctccaccagataaccagctaatcccaggaatttgctgccccccaccagtggcttctagggaaagcaaggacctcacatgccaggtgccctagtacttgcttagtgagccatgtcatcctcctttcatttttggatggtgacagcatttttcccctctgtgctggatacagacttctcccaggatcctctctttgggagcgaagccagaggatccctacagcactcaagcttcatggtggaattaatttctgccagctctttgttgtctgtctccttaaatccttttcctggtgtgcttattatcccttttgcagtgagtacagtttattaagttgtcagccctttaatattggggaaacttaatgagtataaatagcagggagcacattgtaacagcacagtgttttgtttttttcacccggttgctgtatgagaatggctttcaatcctttgtttctatgcctacagacagaaagcaagatgtctaatattagacatacaagttgctgcctgttataacggtgaattatacctttgtgcatgcctaggatgtttgttgttttaattagctgcaatatatacggcctgtgtacacagaatttaatcacttcggcaggttgaacaactccatgtagataagagcaagtgtaggcaaaggtttagaaaatggacataaagtcaaagaatgatggcaggtaggatgaaggagagatacttaggaaatcctaaaagaggcggcaagaaggtacctccctgtgtaactcaccttcccccatgacagtgagtaagagacactcacaggctatgagggtacacccctagctgaatgttctgtgttgtttccttagacctgtggtgtccgctgcaacagctactagccacgtgtagctaattacattaaaatgaaataaaattaaaagctcagtttctcagttgcgctaatcacatttcaagtgctcagcagccacccgtgtctactactacacagtgcagacacagaacatatcatcactgcagatagttctactggacaatgttacgctagaataaacaccaaggcagtcagttaaggcagctatggtttggaaaggcatacggacagagtctgcttagaagagatacaagttgttaataaaattgatcctgttgatagtagtttgtttttgtggtgggtgctgtgaagagtaaacattactcagtggaaagctaagttcagaaggtactttgtttttcctcccttgccttaagtccttggtatttataatcaatgctgaaccttctatttcactaccgctccctgttttagatattcagatttaaaaggttttcaaagaattactttcttccatgttcaaagctagattttactaaacacatgtatcacattcatatatattgtttcttggccccactgccaaaggaagtcagtcagtaatttcacaaccgttatcagagtttggaagcagaaatagctgttaactaaaatctcccactgctcagactactttctgccctaatggccattactatccagtctgtattgctacaagggacccactggtaccccttttagattctatcaaaaggaacagggttttcctagaggcaggcagcctggtggtatggcacagcagaagcttactgctaatgaaatgggaacctccccctcccttgtggtttcagcacagaacctgaatgccaggaaaaattcctgggccaagaagctaaagctaaagaaaccttccttttttcaacgtttttttttctttcaaactgtagggtcacttttgattgaggcaaaggggtcctactgtaagtggaaaagactcactcccctaacataagttttcactgtggtgggatggtgccgcccgatatgcttgatatgcttttccttccacatgttaagctaggaaacctaacaggatgtcagcagggcagttaactctggactcagagccctcaagggcatgtggcagaacctcatggacatcacaagaccatcagtctgaatccaggtcgtgggggctgtcatagccgaactccttctgcacatccagagggtacttgctccacatccgctgtctgctgctgcctctttcctcctcactcaggctgttgtagtcagcagagcctagaatgacatcccgggagtggattctaaatgtgattttcctaggctactgcaggagccccttctcttctcagaaaggtctgtttttgttcccgattgtaatgcaaaatccttgctcaataaataaaaaagaatatagaattcttttttttttaaagaaggaatcactttcctatcatctaaaccaagttccttcacactggagtattttgtcacttctcccctccgtggagtattttgtcacttctcccctccgtataggattttttgttgttgtaagagttgtagtcatattgtaaatatttttgtacctttctccttttaacgtgttattgacaaacctccccaaaagaatatgcaattgtttgattcatttctctgttatcagacaccaataaattctttttgttgggc

SEQ ID NO: 6126 - DNA, 35 bp, Homo sapiens
ccactcttgagcaataaagtggcctgagggctggg

SEQ ID NO: 6127 - DNA, 2437 bp, Homo sapiens
gaaccgtgaaattaaggaatttgcagaatgctttagctaaaatgttctgattcaggatcagaggattcttagagagcttgggaatgtaatgaattacgtgtgtgtttatacgttgtgtgtggagaaaactgccagtagacagattttttttttttaacataaagacacattctcagatctgattacagactagtgtaaaaacagctacatgtatgtagctggttggggatgatatgcctgtatgttggactttgcttttgaatatatgtatgcaggatatcatcaagtttcaacatcttgacttgtgacccccaatgtcaacagcttttttaaaaagcaaattcctgcagtaatgaccaaaacccattttaaaaattgcttgacaactgcactcaactgcagctcttacattaacttcaccatggaaaccagttccaactccaggaagtcaccattcaaagaattagatcaactagcccaaccacttcattgtacagatgaagactgaaagccaaagatgtgaagtggtttccacagtatgatacagcctataagggtaaagctgggttaaaaatgcaggtttcctggatttggggccccatggccttgccagtgaaaaggttatttttggactcagagggctttaaaataaattttaagatgtatcagatacacaaacatttaatgggcacctatgggttggacactttgagaattcttaaaagtataagtgggagcaaaatgtatgcaaatttatcacaaactatttaaagcaacttcttggaggcttacaaaccacaatttaacagaaactgtagatggttgaactactagtgacttttttccccttttcccagttacaattatactttcagctaacatatgccagtttcacagaactattaagtccccttattgtactttttatggcatgcccatgaaaaagcactttcttaagcctacagtatcagatcaatgggaaaacaacagaaaactaagaggagaattttcccgttaattttcttgcagaaaagttaagtctaattgcccattgccataaattttgccttgtactcagagaagcaacatgcactggctcattttatgtgcaaagaaaagatttcaccattaaaaaaattaacttggctaggtatggtgtctcacacctgtaatcccagcactttgggtggctaaggcagatagactgcttgaacccaggagttcaagaccagcctggacaacatggtgaaaccccatctctttaaaaaaaaaaaaaaatccaaaaattagctgggcatggtggcatgcagtggtagtcccagctactcaggaggctgaggtgggaggatcactggaacccgggagcagagactgcagtgagctgagatcacactactgcattccagcctgagcaacagagcaagacacacacacatcaatttattttagttgtataatgcttttctattagtaaagcatcagctaagcttcagtggcctgctccatcccctaatgactcccatgggctatcctaaaggaacttccagaacctttgttggtgtgttgacattgaccatgcagaccaatttgggcacaactggacattgattccttttacacaagagctgcctcccaaagatagataaattttcccagccctaaatatgaatcatggggcaagatattggtcgtattgatggtgaacctttcctactggattctttgcatgccacatagcaggattcattgcctttctctcatcatggatggcatgcagcagcacccaagtattcttcattctttgcagggaaaaaattgtgcatgggggctgaaatgtaatatgtgtagctcaattagtctctcctctgtgatgcaaaatggaatattcaatggcagatctgcccttctgagatgctgaccatccaaaacaccttgtttatggtgcaccatgattagctcacacacaatgccaaggctgtgcttctattatctgatacatagtttgacaatgggtaattctactcagaccctccctactgattggctaggatgcctgtcaggaactcattatgctactggttgtttggggatccccatagtggactactttcaggaatggcatgaattgtaaccaactgagtgctgcccccactgttacggaagtttataaaaccttagttccagaagacccaaaggagagtactggtttgtgtttggtgcttggcctagatccagccaccactctgaaactcagcacatcttcattgacagggagggagcccaggacatatgtgtggctcattgaccagaaggctttcttagtcccaacagccatgaaccatgcacttatggatacccagccttttagggctacgtgaaatgcatccttgtaacatcattgtattctttcaataaatagccttctgagttgaatggg

SEQ ID NO: 6128 - DNA, 638 bp, Homo sapiens
gcggcctgcctgcagggctggggaccaaacgtcaggccacagagcatctccaaggggtctcagttcccccttcagctgaggacttcggagcttgtcaggaagtggccgtagcaacttggcggagacaggctatgagtctgacgttagagtggtggcttccttagcctttcaggatggaggaatgtgggcagtttgacttcagcactgaaaacctctccacctgggccagggttgcctcagaggccaagtttccagaagcctcttacctgccgtaaaatgctcaaccctgtgtcctgggcctgggcctgctgtgactgacctacagtggactttctctctggaatggaaccttcttaggcctcctggtgcaacttaatttttttttttaatgctatcttcaaaacgttagagaaagttcttcaaaagtgcagcccagagctgctgggcccactggccgtcctgcatttctggtttccagaccccaatgcctcccattcggatggatctctgcgtttttatactgagtgtgcctaggttgccccttattttttattttccctgttgcgttgctatagatgaagggtgaggacaatcgtgtatatgtactagaacttttttattaaagaaacttttcccag

SEQ ID NO: 6129 - DNA, 2042 bp, Homo sapiens
gggactcgagagaggcgggccccagacccatgtgctgggaaatgcagaaatcacgttgctggtggtttttcagctcccttcccttgagatgagtttctggggaaaaaaaagagactggttagtgatgcagttagtatagctttatactctctccactttatagctctaataagtttgtgttagaaaagtttcgacttatttcttaaagcttttttttttttcccatcactctttacatggtggtgatgtccaaaagatacccaaattttaatattccagaagaacaactttagcatcagaaggttcacccagcaccttgcagattttcttaaggaattttgtctcacttttaaaaagaaggggagaagtcagctactctagttctgttgttttgtgtatataattttttaaaaaaaatttgtgtgcttctgctcattactacactggtgtgtccctctgccttttttttttttttaagacagggtctcattctatcggccaggctggagtgcagtggtgcaatcacagctcactgcagccttgtcctcccaggctcaagctatccttgcacctcagcctcccaagtagctgggaccacaggcatgcaccactacgcatgactaattttttaaatatttgagacggggtctccctgtgttacccaggctggtctcaaactcctgggctcaagtgatcctcccatcttggcctcccagagtattgggattacagacatgagccactgcacctgcccagctccccaactccctgccattttttaagagacagtttcgctccatcgcccaggcctgggatgcagtgatgtgatcatagctcactgtaacctcaaactctggggctcaagcagttctcccaccagcctcctttttatttttttgtacagatggggtcttgctatgttgcccaagctggtcttaaactcctggcctcaagcaatccttctgccttggccccccaaagtgctgggattgtgggcatgagctgctgtgcccagcctccatgttttaatatcaactctcactcctgaattcagttgctttgcccaagataggagttctctgatgcagaaattattgggctcttttagggtaagaagtttgtgtctttgtctggccacatcttgactaggtattgtctactctgaagacctttaatggcttccctctttcatctcctgagtatgtaacttgcaatgggcagctatccagtgacttgttctgagtaagtgtgttcattaatgtttatttagctctgaagcaagagtgatatactccaggacttagaatagtgcctaaagtgctgcagccaaagacagagcggaactatgaaaagtgggcttggagatggcaggagagcttgtcattgagcctggcaatttagcaaactgatgctgaggatgattgaggtgggtctacctcatctctgaaaattctggaaggaatggaggagtctcaacatgtgtttctgacacaagatccgtggtttgtactcaaagcccagaatccccaagtgcctgcttttgatgatgtctacagaaaatgctggctgagctgaacacatttgcccaattccaggtgtgcacagaaaaccgagaatattcaaaattccaaatttttttcttaggagcaagaagaaaatgtggccctaaagggggttagttgaggggtagggggtagtgaggatcttgatttggatctctttttatttaaatgtgaatttcaacttttgacaatcaaagaaaagacttttgttgaaatagctttactgtttctcaagtgttttggagaaaaaaatcaaccctgcaatcactttttggaattgtcttgatttttcggcagttcaagctatatcgaatatagttctgtgtagagaatgtcactgtagttttgagtgtatacatgtgtgggtgctgataattgtgtattttctttgggggtggaaaaggaaaacaattcaagctgagaaaagtattctcaaagatgcatttttataaattttattaaacaattttgttaaaccat

SEQ ID NO: 6130 - DNA, 1454 bp, Homo sapiens
aattgaacaaaccagccaccgtagtcccttctaaagcgacgtggtctgcgggcatcagtgcccttcctctctggctatagctcttcggcatctgaagaaagttatcctaactattgggtgatccagatttgggcactgtctgctatgatgatgccagctggtcgggaaggaatataaagtataggctcaacccttccacagtcactgtactgggaattcaggcttttcctctctgttgatgtcaagaattaacctgtagataacattcttttttttttcttttttttttttttcaatttttccttgttcttgtcaaaggctgtgtcgcttaaaaccaaatcttgatagattcttcatctttatcactctctatgagaagtaaatatgatttaagtgaaccacagtgagaggcctgtcctcactacagcaaataagatgtgtcccaggtgacaagtccagtctccttttaacatggtgcccagaattccacatacctgagctttgggggctgatacaaagccactgcctctgatcccacggaatgacctgaatttactatcagttttgccacaatcagtgcagtttgaggatacgtagacccctgagatgaggcctgagatagatgttctgggaaaccccaaggaagctaaagtacctgccatggtttctttcatggcaggttgagtaagccaagctcctgagaatgattggtcacattgtctttgctgttaaggtttcttggtttacagatggtgaagttgcagacaagttagcaaaccaactgaattttaataaaggaagctttaggaaaatggatgaagatgcagttggaaaattaaagtcatgcttccttgatacatacctcaattctggcaacttctcacttggaattttccaaagtcagtttttggtaatcttgccatttgtattatctttatttatatagttctggttatgcttggtgtgtgccagctgttttgggagtgatgtttttccttatttctcttggctcctgttaagtgttaaattgctgaaactgacctttaatgcttccaaagcaatcagcatctttctctctggatggcttttagaagtggacacagtttactgatttagccagtgaagagaaagctttccatagtgtggtttactcagagcaggtgacaaaaggatgaatttctggctgggcccagtggctcacgcctataatcccagcactttaggaggccaaggtgggcaatcatttgaggtcaggagtttgagaccagcctggccaacatggcaaaaccctatctctactaaaaatacaaaaattaaccaggtgtggtgacaggcacatgtagctactcaggaggctgagacaagaatcacttgaacccgggaggcaaaggttgcggtaagctgcgagcatgccactgtactccagcctgagctacagagcaagactctgcctc

SEQ ID NO: 6131 - DNA, 2399 bp, Homo sapiens
catggcccccaagcagagcgggtaaagtgcaatgggtaagggagggaaggggaatggaagagaaaagacagggtgggagggaggagggagtgctgtgttttagtctcttaatggtccaaaggacaaatctaaaatgcaaagaacggtgatgtagtatggcctgacagctctgtttagaggaggcaacactgatcccccagatgcagggctgcaggggattctgtgttttcagactgcctgtctgcttgcatctgcacataggcagtagcctcctcctgggctccagagggcactcagaagttgtgctaaaccaagttaagtcccattcagtggcaacttgtgataggtacctgagtgacggcaacctgcggaaggaggttctcccagcccatctgaacacaaccagaggtggcaggagaatttctactgagcgagctgggccggttagtgtatgtcacccccaccccacccctaagtagtcatcaatgcaataagattgcgcctgagatacaaggcccagaagcctgatctttgggcatcagaaaacagggtccaggaatggtgctttatgtgagataccccactccacatcaacattccagggatgagccaaaccagcagggagttagcactgaactgcttttaaaagtgcacattaaaaaggaaagtttgccaggaggaacaaagagattgtggtggtgctaaaggaggccataagctacacagaggccttgggtgttccacctggaaactgctcagacgtctagatgggttcttagcttgtctgtgatctctgctggggagataaaaagattaagccccaacatgttcagaaaagaagtgaagtcttgggtattttaacctgtatactcttgaattcctctcaaattcagctctgatctgaggctaagacacactccccacttcactttcttcaaagccacattttttgaggtatcactgcagtcacctcttctaccctcatcatcataggtaaggttttcaaggtggcaattggggcggagccccggctcttatagaagcttcagcaggaggcaagcgtgttctcagcacatatgggaactatgaggagcctctgatcaaattggctacaatcttggagctgcttggacggattccttggcagccgggttagcatgtgtgactttcaggctactgttcttgacaatcatctccaatggaaagcttttcagtgttcccaaagtgaactctcaaatccaaaatggttatctttgagaccatccattctcctcagtggcttctccagggaattcttacagccaagttgtgacagtcactgcatttgcctgcttctttccagaaaccaaactaggagatgaaactggttcctacatcctaaggttcttgctttctctctcatgcctcctgaggctgtttttggctgttttccctctgctgcttttggggaatgaggggaagccattttccagtgacttgcaatccaggctgttctcagcgttttgagtttaaaacctgggatcctgactaagcctttgacttaagggttgcttgcttgccctccaaatgtcctttctcagaggggccagctaacccgtgcagaaccagcactaaggtggacagcagacaagagggcaagcctctagtgtaccaagtgcttcctacaaagacgcaaggtgtgctctgagccacagatgggcaaaccctggtgctttccttcatctcccacgaactcaagggttttccaggtgtagctaacagttgccacatcacacagacctcgagtttctggtaagactgctggttgacatcagacccaacccatgaaggctggaaggcagcaggcatttgctaaggcagctgatccaggcaatcgttctgctggccaagaagttaaactattttgagcattagaatggaggaaatccggtcagccaagtgcagagttcagacttcgctaagggcttgtttttcttcagcatttacttgaagattaatgtaggatgacaggctctcctggctgtcctaccatcagctctgccttgcactgtggtcgtcaactttcctcaaatcaaaaacaggcaggtacaggtagtgggctcacaacgtttgacctcgactggtttttctaagttattttgtacatttttcagcagcaaaaccaaactgggtcttcagctttatccccgtttcttgcaagggaagagcctttatacaattggacgcattttggtttttcctcattgagaattcaaatcctcttttgtattgtttctacaataatttgtaaacatatttatttttacctgcttttttttttttttttaattttcaggtcaagttttttatactgcacttatttgtcaaaataaagattctcacatatgccggttatctcg

SEQ ID NO: 6132 - DNA, 252 bp, Homo sapiens
gctgattctccaatggtgagcaggggactacatgtgaactgggacctgcaggccaatgtatccctgaggaaaagtccacaagaacaattcaagaaactagtaagaaacaatgggcagaaagctgtgggacgaaagcacagcaggcttctgggaggctggagatcctttctctcaagggcaggattattcccacctgccacagttcacatgccacaaataacatctcaccttcagtcaagaaaaacgcaaagg

SEQ ID NO: 6133 - DNA, 83 bp, Homo sapiens
aacagggcactgtctgtgtccttccttgaactgtctaccctgttgcttttcacaaatcatggtaataaaacaagttattcttg

SEQ ID NO: 6134 - DNA, 8127 bp, Homo sapiens
gcaacaaaaaatcagaaaagagccttgactgtcacaagaaatatttccacctcaaaaaaaaaaaagcacaaaaagaaactctttgctctccttcagcacagtgccttcccaaggacctgcaaataactgctgaaccataaccgtgtttaaagaagagcctacctttcacagtctaccttggccagatattctagcactctaaaaggctccaaaatgaagctgttgatttattctcatttcaaaatatggtttatgagtaattaggtttatttctactgctaaaaagaatggctcattgttttctttttttttcattgttttcatttttagacataatcaaatacccaagcattgttttctttttcttctccctgtaggatttgtgttgtgcttagccttgatctcttgttcagaacaattgtcccttcccaggtgctagcttgcagcagcctgttgcttcctgagcattccagataggtcgtatgtcttggaatttactgtcctcactagctccttccaccataggaagtccttgaattgtatcaccaaagggttgttccatttgccctggatctccctctatctcagcctggccatcacttcccaccttatcccaagctttgccactgtctctaggacttagaacttgtaaatttgatttgccttgccttctacttcctttctagtggtgactgagttgaaaagcaagttggaagccactgcttttaaagaaaagttttgcttggtttaggtttttccaattttatttttgttaggagccaggggataagatttattttaaatgaaaatcctcttcctaggttaagccattttttttattgcttaccaaatgtgcctttggttagggttagtggagctttattagtcactatttgaataactggaaatcactgccatttccaggagatcacctatcctagttttgaggaatagtcattgaggtgggtttccttaatggcatctcttctagtaggcagatctgtttgaacaagataaatcctaaagagccagcctgcttgaggagtagacttggtgggtgaagccagcaattccgcacaaacgtcatgttgaattgttttgggctgcccaaaaacaacaggatgcagcatcctggctgtggcctggccctttgtggcagcagtggcatggacaagcaactgctaattcgagacttactattggcttcacagcacaccctacagtgagcagggtgatgagaccgtggaacagctacctgcttttggttaagattgccagatatcattaggacacagtagcagcaagaatgctgattttgtagtgttagaaaatgaactcagcttgtttttcctaattttgaaggtggtatatatctgcaaacatttaaaatggtataatatcatataaaatgtcaaaattagcacagtccctggatctcaaagaataggtaatattgacttggatgttctttatgctctctgaagaaaggtctagggaaagttcttgtttgcttgattgatcaagagtgccacggaagaatgtgagcgctgtggagggtggaggagggtgtcacttcagatggggcaggcacagggggagaaaagaagagaaaaacacacctgtgtgcaaaatgagctatttggtttcagtgcggcctgaccgatggggaggacccatgagcagagagagttctaggtcaacattgtaactccattgtcctccttcacccataagtcagtcctccttcctcattacagtgaaaccaacaatatgcagaggttggggagagatgcctgttcttcccccagcttcatataattgtcaaagttccaaaaatgaattatctgaactgcttaaaactggaaattaaaatctagacaagaatatgtctttcaagagctttttatgttttgaaagttcataaacctaagattggctccatctgagataaattttcttttctttttttttttgagacggagtctcgttctgtctcccaggctggagtgcagtggcatgatctcggctcactgcaacctccacctcctaggttcaagtgattctcctgagtagctggggttatagctacccaccaccacacccagctaatttttgtatttttagtagaggcaggttttcaccatgttggctaggctggtcttgaactcccgacctcaagtgatccacctgccttggcctcccaaagtgctgggattataggtgtgagcccccgtgcctggcccacaataaattttcatttcagagaaggaaaaaaatctcttgaacgtccagaaatgatttctggaatcagaatttcaatatgtaataccctcaggtaggcaatcttgaaccctctatgcagtgagagcattattaatatgagatgttgaatgatgcctttacagacttcagcagcaaagccatttggttgaggttttctgtgttaatgtgaaaagctaagccactgagatttgcaggggagcttctgagccaccctgcttgttggttatatgaggatgtaaaataggtggaattaaaatgtgagcaggaaaggcaaggcatgtgtgcattttcactcattttggtcaaggttaaactgacatgtatagcactgaggtctgtagggttcttaatatcttttgagtcttgctgtgaaatgaaagtgtgggaggtttcctttgtccattagcagccccaagaaccagaacccttttgctgcttttcttacatacctaacagctctccagtcatgatgaccaaggttgttcttcaatcaaatgtgtttgtgggattttcagtccgcaaatgaagtgctctctaatgaatgggacaccatgataaatatgtatttatatttagatgccaaagtatggcaaattatttccaaatgataactacaaatgggaattttcgatattctaccttttttatagaaccagctcacttttcatttctttttcattttgaattaagaaaattgttgaggatgtggtgggttccagtgtgtggaatggaaaggaaactgcagaatagtgtctgctccccattcagagggactgcttcctgtgccccccagacccggggcttcgacagcttctccacattccacacagatgcctaggagcagcgagttggtatatgaaaagtctcccaccttttctcctaaaacttctctcctttctctccataaaaagaaaaggaaaggaacaaaagaaaaacattcagtttttctttttctgaaaaaggtaagtcctttcctgaagtcatcaaatgaaacattatctggaaattagtttctaatgttgtatatgaagaaatacttaaatataagttcctgcagtatttattagatagttgtaactgtaaactcacctccctagtagataagagtttcaggttaaatactggaacatatataggcagtcaaaaatactactttaaatgtcattcacctattttaaagccatgttttagcactttttaggccaaagaaggtctgatagtgcctgtttttatgttctgtactctcacaaactttgttactcaaaattattgcatggcaggagagattggattatttatttcttatatttttataagtaaaaaaatctttctaaacaacaaatacctaacattattactgattgttttcctaatttatcctcctaagttgaatggtaacaaagcttttccagctgaatgaatgcacttagctgataaaccagaatttgttcttttttttccttcttttttttttgagacaggttctcactctgtcaccgaggttggagtgcagtggtatgatcatagctgactgcagcctcaaccttctgggctcaaatgatcctttcacctcagcctcctgagtagctgggaccacaggtgtgtgccaccacacctggctaatttttatggatttttttttcttttttttttttcgccatgttgcccaggctggtcttgaactcttggcactcaagcagtccttctgcctcagcctcccaaagtgctgggattacagatgtgagccactgcacctggccccagaaattatgcttaaaaaaaaaattaagctgtgtggaatctggacaaggctatgtttctcctagaaacaggttttgctgtaaatggttttgatgggcgaaagtgtgagaaaaggttataatagattcttttttttaattttgtgagaaattccaggtcttcttgcttaacttatatgcatgtggatatatttgttttcaaagccatggaagaatctctgttcatatattttaatgcaaattaccttgtatgctgctatgcaaattctattaaaaggcctacctgcttaagaattaaacatttttgaaactttcagggaagacctgtagactcaagcactttctctgcttttttgtatcttatcttggacacttatgctgaattatgttcttattattttcactggttataagctattccttgtacataatatttaaactatccaaatatccagcatacatttccatgtggctgccatcggctgttgatgccatgaatgaaatggctggttagaaagccaaaggtcttcttttttcaattcctaatgaataagtaaaatgccagatctctttggtctcaaagcaaattgctctgatcagatcaaatatctatgtaatgaaaagagacttacttaaatttgggattctgcttaaactttaagttgaatttgactgtagtcattcattctttttatatatctctgtcaggtatgacattaattaccaggtggtattatactctactttgagtttggacatcactttcagttaaatttctgttgttattgtggcttttttttttttttaaccccactgaagatggaagtagagcagtctgccatctcctgctgttctttctctgtgccccctaattgcttggtaatctaaaattattctgactttccacatactgtctttaaaaaccaattgtagcaatctgcccgcctccaccctttaagctaaatctttcactgtgctggatacatagacactcgataaatgtgtgatgatagttctaaaataattatgctatatatcagggttctgtatttttgagcaatatcattattcctatgctgtgatgttaaatggaatttattttacactagtaatagactgcttaagtggctgatttgaaacctttctctaaaaaaacaaaaacatctggcagatgagtgacacaaattcattctcttaaaggatagaatttcaagttaaggataaggcacaataaataggcacatagaggacatctgtttttgtttttggttttggttttgtttttttttgtctctctgactagctaaactgccaactagaagaatggttgttatgtagtaactcagaagaatcttttaataagtttcttcttttgtttcaaaacaaacttgagcttcatttcttgccacctctattctttcttcccacgttgggtgactgaactgatgcttattctagttttagaagaggatccacatttaatgtaaggcataaatatgccttttgcaaattattgcttgttctccagtgaacatttgatcatattcaacagaaatccaccatataaaccataatccttgaattgccccttttaaaatagattggttaaaaccaaaaacctataagagagaaatgatatttcattgtattgtaggtttgggaatcctggttagatttataatttctggccgggtgcggtggctcatgcctgtattcccagtactttgggagcccaaggtgggtggatcacctgaggtaaggagtttgagaccagcctggccaacatggtgaaaccccatctctactaaaaatacaaaaagttagctgggcatggtggtgcgcgcctgtggtcccagctactcgggaggctgaggtgggagaatcccttgaacccaggaggcagaagttgcagtgagctgagatcatgccattgcactccagcctgggcaacagagcgagacttcatctccaaaaaaagaaaaagaagaaaaagatttataatttctgagtcccctaagtccctttctcagtttgcaataatcttacgtccatgctattgacactaattttgaaactggaaagctaattaatgacatattcatgtgttctttcatctaataaacatttattaatgtatagttctacaccaggcattctgaagggtccaaaagaaagttcctgccctctagtagcacataatccgttatttctcagcacaccatgccatctgtttatcattcagcagttaagtaattcatcacttcatatttttaccaaagtatatttacaagtctgtttatctggatctggcaaactggaaaatgtttgaagggatactcaggctttgatccatgccaacatgaaaggactccaagcacatttaagtaggctggtcttttcatcatgcatgattttttttttagtgcaaatttagactttagtttgggaaagagaacagtatacagtatcctttgtaagataaatcacaacaacaaaaattaagttttattgcacaaagtagataaatgagaaagtctttcttaaaaaatgcttctttaactgtaacagcaaaactaaatgcatattttatcaaccccttatttctaattgctgtattcatttccacccttaaactatttaagcatttcatctgctgaaagtccttatatacatggtagacggaatatttctccattaatgatagatcaaaatgaagatatttaaaaattaacaaaatcaggccaaggcaggaggatcactttagcccaggaggtccagaccagcctgggcaacacagcgggaccccgactccatttaaaaaattaaaaaaaaaaaaaaaacttttaacatttaaaaaataaaaattaacaaaatttcacttattccaggacacgctggcatttggactcaatgaaaagggcacctaaagaaaataaggctgactgaatgttttccataattttcacacaataacagtccctttctatccagcttgccttccatttatctctagggttagcttttcaggcaacatccttggtcattgcccagaaagtacctgagctatcagtgattggaatggcacaggaaaccgaatcacatgggtgccctccccttggttttcaagtatcttggagttgtgcacaaaaattaggtcatgccttcagtgtcttgttctttaaacctaccctttgacaatcaggtgctaatgattgtatactattaaaaccagcacataagtattgtaaatgtgtgttcctcctaggttggaagaaatgtctttccttctatctgggtcctgttaaagcgggtgtcagttgtgtcttttcacctcgatttgtgaattaatagaattggggggagaggaaatgatgatgtcaattaagtttcaggtttggcatgatcatcattctcgatgatattctcactttgtcgcaaatctgcccttatcgtaagaacaagtttcagaattttccctccactatacgactccagtattatgtttacaatccattggatgagtgcagcattataagaccttggtgcccagaaaaatctgtcctttttggtaccaaacctgaggtcttttggaagataatgtagaaaaccactacctattgaaggcctgttttggctaatctgtgcaaactctgatgatacctgcttatgtggattcttttccacactgctttcatttttaagtataaagacttagaaaactagaataatgcttttacaaataattaaaagtatgtgatgttctgggttttttccttctttttagaaccctgtatttaaacaagccttctttttaagtcttgtttgaaatttaagtctcagatcttctggataccaaatcaaaaacccaacgcgtaaaacagggcagtatttgtgttcctaattttaaaaagctttatgtatactctataaatatagatgcataaacaacacttccccttgagtagcacatcaacatacagcattgtacattacaatgaaaatgtgtaacttaagggtattatatatataaatacatatatacctttgtaacctttatactgtaaataaaaaagttgctttagtc

SEQ ID NO: 6135 - DNA, 733 bp, Homo sapiens
aagctgcttcacttgggcaatggtgaaggtgggaggttgattggggcaaatccaggcactccccatgtcaacagccagacagggctccagggcttgtcccagtcaatacagagttccctctgctgtctggccgtctgccagggagccagaaggaagggccttgcagccacagagacactccactgccctggggcacacagtggacactgctcttcctacttcctcctctcctggatgctcatcagctccttctgcctcccccccttttttttccatcttttgttcccctaaattaatgctgcttggattttcatcttatttataaagataaaatcacctggaagtgtcaaggagtggggcggggtggcgggggagaagcagccgtgctgccaggtcacccagacctccagacagccggctagccccactgcccgttccttttacgcccaagttttgctccttgagagcagattggctgatgcccctgcaaccccagcccaagctctgcctcaaagaccgagtgacataagccattcccaccctcctaggttcacatccagggctgtgtcttccttgggggaggagatggtgtcgtttagatcagggtaaggcagtcaggcgggtgttcaccactgccttttcttcctctgagcgtgagaacactgaacccagccactgcccctgggtccctgtcctggaaatggtctaataaatccttttcccttcttgagct

SEQ ID NO: 6136 - DNA, 1452 bp, Homo sapiens
aacgaagccattccaaggacagacggctgtatggaaaggccgagctttgtttcctgtgtttgtgtggactccaccatcatgttgaattttgtcaacactctggcctcttcagggacttcttatttactgtactctctatcactgacaaatgcaggctggattcttattatatacagagatggctcaaaaatggggtttcagatctttgtgacgaaatagaatactgtttcatatttgaatcagagggcttcttgttctgagaaataggttcaaaatcattggaaccaggaacaagaatagcttattgttatctgtgataacactgttttctaaacacaaggattttcttttttattaatatgcaacatagacattgccataacagaataataaaccacatgtggggttttaaaaatgaaatttggctaataggagcaattcagctatttttctatacagtaattggtgtgtggtatagaagaaaaacgggttcaaaccccacttctgccacctaccagctatatggccttgaatgagtcattcagctttaataaggttcattttcttctgtttaaaaagacacaaaacttgaaaatcagctttggccatctacctgagaattagaaagtctgatttttggaattagaaatcatgattgtaggctgggcacagtggctcgcgcctgtaatcccagcactttgggaggccaaggcggacggatcacttgaggttaggagtttgagaccagcctggccaacatggtgaaaccccatctctactaaaaaaaaaaaaaaaattaggtgtggtgacacatggctgtggtcctagttacttgggaggctgaggcaggagaatggcttgaactggggaagcagagcttgcagtgagccaagatggtgccattgcactccagcctgggcgtgacagagtgagactccatctgattgtaaagcatctagtacagtgtacagtgccttggaaatgataggtatggaataaatggtaattatttttatattatatatattatgtattcctgttattaagtgtagagttttatgagtataatttgattttattaccttcttttttacaagctgttttctcagtatttttcttggatgggatgacgctaggctggaaagtttttttcatcactatgattttataaaacaattttttctatgaacctttacttacttgactggattggactaaaagcactgatcagaggccacgacataaaaattcagtccctttgtccttccccgtgcctcccaaagttactttaagatccttagaatatttctttaaatattttatagacaaaaaatttaaagactatctgtattgcaaaattaaactatttctttaatgaatatattgcttattttaagttccaaaggtgaagtctttaagaataaaacattaccaactcctgcttttatatgt

SEQ ID NO: 6137 - DNA, 3744 bp, Homo sapiens
ggaggccttgctgaagttagaaagtgcatccactttggggcgaaaactagagacttgcttgggggctgcagaagtgccctctcctcgaatcctgccagttgcattcttcccccttggagccaagacgattggccagacatcacctcagatctgagaccagcgtcttccatctctcagagccttactcccaaagtacctgctcactgttccgtgttgaacaattgccggtgtttcctctcttcactggtttccatgagtacccttatatttcacaactttctgttcataagttatagtgacattgctctttggtaaaaatgcctgctttccaatactttgattgcatattagacattcttaacagggcggcagtctagtgttgaaagttttatttttccatttttcttttaagtaaattttttttaaaaaattctgatttagggctaggtgtggtggctcaggcctgtaatcctggcactttgggaggccaaggtgggaagatcgcttgaggccaagagttcaagaccagcctgggcaacatagcgagacccctatctgtattaaaaaaaaatctgatttaattcttttatttatcataaggggtttaattcctgaagtaaaggtttgcacctattaaacttaaaactgccaaatgatttttgttcttttatgtgcgtgataaaaatacaaagaatggtgtggccacctcctccctttcaagctagggcagcaggtagctcttcccagcccctgagcccagccccttcccaagtggtgccggacaaaaaactacatggccctttcgtgtcttgggggtggaaaggtagggatgaattggggtgatagaaccctggtgaattcagagtaatctttctttagaaaactggtgttttctaaagaaacaggataggagtttagagaaggcaccaaagctttcactttggtttggcaccagtttctaaccatctgttttttctaccctagctatcttttattggtaaaatataaatgtataattatgtttgtagagctttaccaaggagtttccctccttttttgtttgttgattagcaaatttttgattctccattttccaaaagtaagagactccagcatggccttctgtttgccccgcagtaaagtaacttccatataaaatggtatttgaaagtgagagttcatgacaacagaccgttttccatttcatctgtattttatctccgtgactccaacttgtgggtttgttctgtttttccatgagaataaaatactggcggtttttttctcagatgtgtgttcattgagaagtaggttactagaattatgttactgtgtcttattggttcaatgatgatttctctggcatattagacttttattttttcccccatggaagcacttgaggaaataaatagtacactggctgttttctgccagcaactgtggtgatttttctccctgtcctttgagaattgctagtctgcttctgagccattgtcatatccagcagggagcagcttggttcaagaaggaccatagaggctgctcagcatctcctccctccctcccagcttgccagggatttgatgagacaggaaactgcccagcaaaccagggactgcccatgtaaactatttaagaaaaagttcaacccaggtcttgtatcctgtgatttagcagttgaatgaatacagaattcatcaaaataatattaaccttgtacttgcacacttggatatatttgggagtaattttaggagatttctggctgacttttattatcagggatatgggtttagtaaagcttttatctttagaaaaatgtttgtatgcattataagatgctacttttaagacaatattgaaaaaaactttggttattatttaacaaaagtggtatgacttgatgcttctctatttaaaggcaaggaaggattggtatatgattgcctgtaataaataaattgcgtgattattggagtacattggggtaaaagtaaagaacagaggagtattgaggagcttgaaagggaacattcaaactaaagccaagcctgaagataacttgaatcagttgtaaaagtgtgttggcaatgtccgaaattgaatgaaaaacatctggcttataagaaatgttaaagaactaccatcttaagtaaaattggtgtttttgttatttttaaggtaaatgccaatgcaaaaggtatgtttttctacttcacattggttttcttttcctgtttacatctgcacttgttttttgctgagagccagaggaaaagataattagactttgtctcttccacccatgaaatcccccagtacccagggcttcttctgaactactgccgatgtgatgtcactttgtatctggaaaatcactttggggtccatttactgttattttgttgcctacaaaaacagccaggtgaaagctaaatcttgtgtgagagtttgcagaggtttttctatacaataaagtagtatagcacactagccaaatccatccaaaaggaccttttttttaggaagtagacttgaattcacaaaacagtcttgacatgggtagctggtgaaaaaccctctggagagcaagtggagccagtccccattggctgacagtgccacctggagctggtctctggggtgttcggttgtttattcctgaggaagactagctgctgctgctgctgctgctgcaaactgtactgtacacatcatggctgctggacacgaaggaggaggtgagagaagtttcatgctaccgaaatagagggtgttggtaccactgcccctggcctgagagccagggtttaaacctgcctcagtagagtctagtttgaaatgacaccaaaattcctcagcccctactcagcaattggttttggtttccaaatgacttctgcatttgtaaagataacagagtggtggggtcaaagtttatcttgtgtttagatctcttcaagactgcttaagcaaaaacaaaaatcccttggaacctatcgtttgagcctgtaaagttgttttagcagttgtcataaatgcatatgttgtgaaatcagaacactgtcgagtttatactcatttagctgcaatgtgggacaatgaaaaatgctttacaggcctggagtatcattacttatggtatctcctgctttaaaatctcaagcgatatctatctggttaaattccattttaggagattgagatgcagaacgttaatgttcattacctcctcctaccccaagagaaatggattcagacatgtcttgtctcaacaagaaattgatttttttttaaactatcttattctgttgccaaatatcacagaagtaatgaggagtttagttacatttggctgttgtgctctgaaagagccaggtttggaatttgtgggggtgatctaggaagaaggttccaaagaagcagaggcatttgtcaagttacctaccctatatccagcatcctcctcatgagcttcagtagctgctctttgcccacgcttgtatcctacgtttgctatttgggcaaaccattacttcagttatttaacttccctttttttttaacttcacctttgactatgaacaagtaacggtaacattccttttgtgtattcaataatgcagttagtttacctttttcagaatattttgaacaaagatctttgtctctttctgctggaatgcgcacacagtgaacgtttgttagaactacacacaataaagacactgttttcctttt

SEQ ID NO: 6138 - DNA, 8291 bp, Homo sapiens
aaattccacgaagaaaatcctgattccaagatgtcctgagatcttgtggttccatgagaattattactttaaaaacaaaacaaaatataaaaaactgtgtttgagtaaactgatagattttactctgactgcaaaagagcacacctatgctgcttgttgcagtaactaaccaccaatgttaacatcttcatattttatattcctaataacagtgatgactgagaatctatttgagtttccagctggcagaattaattgttattattttcctaggcgcaatttccttaaacgtacagtttaaattcaaggctggaccactcagttattattgctattagaaaataatatatcatgtttacttttgttcttcattattttctttcctgcattgttttagtcaagtaatggcttttgaaaaagtaaagttcaataataactaaggctgtgatttttttcaatataaaaggcacagctgttggccaaagtgaaggaatcttttttcagttttattggagaaactgaagggtaacattctaacaagtaaactgtatgtgcagataaaagtactcttgatttaacacaaaggcagatgatacacttataaaactgggaacagctggaatgcttcttgattttattttttcagagagttgttagttctctgggtttctactaaggggtttagccataactgtgcatagaaaaataattatctgtaaaaaatgaaggggataatatatgataaattatgttctgatatcctcctacagtagtttaaattgacagaaaaatttgaatgttttcttcttaacccagtcttaggctggtattccctttttatatatatctatattacttttcacctctttttcactttactttagagaactattaatatactactggcttcatgaccctgtagcatctttggccactttaatctagggtgacctagcaatcctgcagcacagggcagagagtactgtcttaggaattattaggagttgattcctgagaaacaacacatttttccccatgaacggtgctgttctgaagtcttcaaatttttccctctaataggaaacagtataaattttaattaaaaaaaaaaggcaaactaaaatttcttgaaatatcacttctccctgatctgcagtgagtataaattcacttgtcacctcagtgctttacagtttgaagtggtcacttacctgatggttcccacaagccttaggctttacagggttgtatcattgacttaaaatgaagaattaacttgtgttacatctataaagagcaaaataacacactccagaacttggcagttgtagcattagttatacagttttgggtgttcttgccacccgtgggatgcctgcttctcactaccacctgtgtctggacacatgcttatgtctcattttccttttggcatgtggaaagctgtcaatgcagtgtaaggccaacgtgtgtgtggcttctatgtgttgagataatgttttggtatccttgtccgtttcatttattttttaagtgtacaaaaaataacctgttaattgttgaaggctacttttctgttctttttttttttttttttctatcctgtacatttagttgaactgtgcggaattgtggtgttggttttgtttacacagccagatttttccttctttttgttttgtgatgatcttcctttgttctttgaatgtgctcttttgtctttttctcttttttctcatgttttcttccctccacctccacccctttctttctttctctctctgattgagaggcattgaattacgttttcagtagtacaggcttcttgccgatatgaagggaacttttcagaaagagacctactctgggtcatttaattttgaatacagttttcaatcgttcaagttttggatggtttatatctaatgtgtgtttcatttttttggaaagctatattttgtatttaggaaatggtatactattttgctatttgtactgagtgagtacattggcataaatatagaaatttatatatatacatatatataaactattcttttttgccacacatttttgtggtaaatttgtgagtttgtctgatgttctaccacaacgtggcgtctgataacagtgagggggggtggggtttgttatgtctttattgagtatttaagtatcttttgaaacaaatgacctgttcatctgtggccattccatcaggcagttagttccttgatgtcagtagtgggctaaaggcagcttactgtgtgtttgctggagctttcactcagccaagtgttagagtcaggaaacccattgaggcaatggcgtcaaatggtgtttcacaagaatgagccattcagtctttgctcactatatatttaatattttattattgttgttattgttattattaattggctttctgtattctatgccttttatttataaagacactaagaaaacccatgtttgtaattttaataacatttttcccatcttgtaatatccagagctactttataaattctctgaaccaaaagtattttcctcagtgtatctcttctcccccagcccctattgggaaaaattacccagtatagttcaggttatgaggaggatcagccacacaatccagtgcttcagtttgaaaatgtaaaattctaaccctaaagtagggttggttgaaatttcagacaaagcaaacccagcaggtataaaaagtagtataaatacaaatctgtaagttatttttgaattttctgaacttttttctaagagattacataggagactaaagaaatctatctgttcaagttctaattaggatgattgttaatactgcactgtggatgaagtggcgactggcttgtgtgctgacttctgtggtttagcaagaggtttattgttatcaaatgctaattggcaatgccaagtcactgggaccaattttctgttttataatatctaagtttagaacagaatatatacctgaactgtagtggtttgatcggatggagacagaaaacccgatttttattctcataaattttgtggttatttatacaagggctgtgctatgctaccatattcttgttcaataataataggtttgttgttttttttacattgttaaatgttccttacccctaaaggtcaatgttaagtacaacattctgaaaatacaatttggctacgaagagtattcatcttctttgaagctcagtggttgatatttgtgctaataatgcaatttcctgattactgttacaagttatagctacatatgggagagactcagtgagccagcaaaggccatagaaacaacaatttattaaatgtatttatggcagaaggacctaaataaactgtgagccaccttttcttctttatattgttacatttaagtgttcttgctttcagcaactcacattaatgcttggagcttatctctttctctctctctctctctctctctgtgtgtgtgtgtgtatgtgtgtgtgtgtgtgtgtgtgtttccttattgtcattccattatatatccacaccaacatgggtgacgataattcaaagtcatattttgcctctaagcttgatcatgttacctttatgattaaagtatcatgttatttagccaatgcaaatctgttttaaaacaaatagtttaaaaaaagaacaagtttttaagggctttattatagaagaagtattaatgaaggactttccttcctccctccctttcctcccctccctgcctcccttcttcccttccatctccccctcctccctgccttctttgtttctccttcccttattcctccctccctcctttctcccttccttcctttcttccattcatccttccttgccttttatttttattttttgtaatatcacatgtgctgtagtttggaattttattctagtgcatttcttgctcatcagaacctcagctaatctacctaggaaaaatagtatcaaaggaaatgagaaagttgtatctgagtccctccagaactaagataattctttttgaccatttaagcctttataaatgcgttttgaccatttaagcctttataaatgcttgttttaggaaagtgaatctgttagatgcatcaacaaataatgaccaggacaaaacgatttaataattaaagtctcaaatcaccatggttatacattttcaccagaaatagtaatcttacaatttttcatttttctgatgaagatttctgttccaatatctgtttcctaatagattttttaaattaattagctttcctctgctttatgaccacaggttttatccctaaccgagacagctgtcttatatctgcatgccttagactgtgtggagggactccatgaagaaagaccataggttagaaaaataactcatagtatataccctagtaagtgggttagtagaatctcataacatgtattaaaaagaggttttcttctctgcttgtttgtgtcactagagcaaaattgtagagataatgctcataatgcagtaaatatcagaataatatctacaatatcatttgtggatggtcccaggtcccagtgctctagttactttacttctttttttttttttgagatggagtcttgctctgtctctcaggctagagcagtgtgcgatctcagctcactgcagcctccacctcccaggttcaagcgattctcctgcctcagcctcccaagtagccaggattacaggcaccctccactaggcccggctaattttttttgtatttttttagtagagatggggttttgccatgttggccaggctggtttcgaactcctaacctccagtgatccacctgcctcggcgtcccaaagtgctaggattacaggcatgagccaccacatccggcctaattacttctttaatccccatttatttttatgccattctagcctcatttattaataaaattatgtttttactttctctttcaggaaattttttaaattaatattttatatctagatctaatgctatggaaaagtgcctttttatcatttataatttcatttttcactatttccaaaaacacataaacaaatagtttcagtaggtcccagcttttactttttccatttaaaccttcttttctccatttcttccctttggcttaagaataaaagaaaaggtacattgctagaattgtttctttgggagagggtaaaagattacagaattagactgttcagcctttatataaactaaatttgtcttcatctcaaccagctaatggtaggtcttatctgaatactcatgagaattttagcatctgtgaaactccatgcaccagatgtgtgtaaatttcaggaagaaagtgttgaaagcattttctctgatgttaattagatggaaataaatcactaaaacatagtttaggtaaagcctgattatgccacttttttttaactagacagggcaaagttgtttatgttagtgtacttcttgtctatcctcagttaatttacctagacaaaaagtgtcaaaggaaatgagaaaaaggttatatctgactccctccagacctaagataattccttttgatcagatacagtcagatggagtgccttggtttttgttaattttgcctctattccagctccttaccacagcggtggtgcttaaagaaaggatcatcagcaacaggtcaggatagttctacctttgggatagggctgctttccccgtgctagtatttctgtgactgttagtggcactgaggactgcaaacttttatgcaatattcttaataccctattgatattatgcactttaatcattccaaagaagccaagaatgctgtatagtgatgattccttcctaatgaattcatcttaactatttagaatgttatgtcccttttcttttggatagccaacttggtataaatgttatatggatttttctaaaatgactatataggacttaagactttgaaatgtaatttacttataaggggaaataattatgctttagcacatcattttagaaacgtcacattttagaaacattcagcttgctaacctacatgtttgggaattcattaaaaccagttgtctatatattttgtgccatgtatataagaacattacaatatatctttttctacatatgtagtatgtgcaaccagtggttctcagagtatggttctcagcccaccagctagtatcagtatcacctgggaactagttagaaatgtaaattctttggccccatcccagacatactgagtcagaaactctggaatagggcccccgcaatctgttttcacaagccctccaggtgattctgatgcacactttaaagtttaggaaccactgggctaagactctgttgagatatagagtttttcttccactcagactgatatagttatacattgttcttcatgtaaattcagcttaacctggttatctataatcttttattggcaaaagttaattctcagtactgcctatagagatacagtgtattttatgtacatacacaattagtctaattcttgataattcagttaatttagtttggcattttcctaccacttactaaaaggtttacattaaatgactgatttaaatatataggtgcaatgttctatgtttattttaattgttatgacatttaagtagctaatataattgaccggtgctaaagtctcctgtttatccataaaatgggtacattatgggcagtgtaatacaagctttcttttcattgcctagtactttaccagcagaccacagttttgccctggctagaccaaccctcagaacaaaatcatcattccttgtatttatatttgtatctgagatagtaaacaagatggctggccaggtcaacatggcaccttaacttatttttttaataggtaaaacttcttcaaaagtagcttgctttgtataagaactaagctatcagtatagatatagctatccttggagcttatgtttcagacaagaattatttactaaaataaataataaacaagataatgcattatacaatttgggcatttctcgtttctcaagtgtatgcatcatggtaaatataaactaaccacaagataggtagattgattcatttcattttaatctccttgtgtaattcagtacctccataattgttctaatcttcttcccactgtttacaaattaccagttaattaactcgtgaaagaaaaattcacatatcagaataaaaataaatgtatactcactttataaaaatcaccactgctgtctttccttaatactagcagtggaaatgtaagtggcttactctacaaattttggtgctggcaaatacataggcaaactgttgggagctgctctagttacattcctcccttcttattccctttttctcttcctcactttattgcataacatattcctgtacccaaagcattctaccacagttctatttgactcccacttgtaataactcctttaaaaaattccatgtttaaccatatgaccctgcttgcttactcatattctccctccctctccccttcctttctctctcttccagaagtcatttgcctggtttgaaatattttgtagggattgcttattatattattttagctgatgaacctcaggacaacgtctacacacacacacatacatacacgcacacaaaatctcagctgttgaagagtgggcttggaatcagacttctgtgtccagtaaaaaactcctgcactgaagtcattgtgacttgagtagttacagactgattccagtgaacttgatctaatttcttttgatctaatgaatgtgtctgcttaccttgtttccttttaattgataagctccaagtagttgctaattttttgacaactttaaatgagtttcattcacttcttttacttaatgttttaagtatagtaccaataatttcattaacctgttctcaagtggtttagctaccattctgccatttttaatttttatttaattttatttgcttgagcacactgatcaaccactgaactgccttcttccattgtcctgcaatgatataagggttacatttttgtgtatatggctttcatagttgggatttcagagcactgataccagatattttcagtttgttctctgggggaatttcatttgcatctatgtttttagctatctgtgataacttgttaaatattaaaaagatattttgcttctattggaacatttgtatactcgcaactatatttctgtaaacagctgcagtcaaaaataaaacactgaaagtt

SEQ ID NO: 6139 - DNA, 1800 bp, Homo sapiens
ccgaggccgcccctcccacgccccccagcgcacatgtagtcctgagtcctccctgcctgagaggccactggccccgcagcccttgggaggcccccgtggatgtggccctgtgtgggaccacactgtcatctcgctgctggcagaaaagcctgatcccaggaggccctgcagttcccccgacccgcggatggcagtctggaataaagccccctagttgcctttggccccacctttgcaaagttccagagggctgaccctctctgcaaaactctcccctgtcctctagaccccaccctgggtgtatgtgagtgtgcaagggaaggtgttgcatccccaggggctgccgcagaggccggagacctcctggactagttcggcgaggagactggccactgggggtggctgttcgggactgagagcgccaagggtctttgccagcaaaggaggttctgcctgtaattgagcctctctgatgatggagatgaagtgaaggtctgagggagcgggccctggggcgaggccatctctgcctgcctccctagcaggcgccagcggtggaggctgagtcgcaggacacatgccggccagttaattcattctcagccaatgaaggtttgtctaagctgcctgggtatccacgggacaaaaacagcaaactccctcagactttgtccatgtataaacttgaagtggttgtgttgtagggttgcaggttttttgttacgctgctgtcactttctgtccaggagctggcaccccaggtgttctgagaccttgagggacccagacctttgggtccaagagtttcccaaacagccacgcctctcaggaacccacctggcggttccgtgagctcaggcaggcctgacccggcggcacagcctggcagggacctcgtccccaagcctggcagaatgagaggggttgaggtcccgagcgccactcctagccttgccgccttcaatagagaagaaatccctttgctagatagggtcccccaggcagtccccagtggcgggacacaggggtccggctgtggagctcccctgccagcccctggagctccaggagggcctgttggtcccctgttcagaatggagtgcagcccgccagcggaaagtgttcattctgcataggtgtgaggctttatctgcacacaggacatgaaaaccagcagaaaggccctgagctgctgcatagccccatctgatttctgcagttcccgccagcctccaacacggggactctgccgtaactggaatcttcataggtcatattgaaatcttcaaggtgaccatgccccaccggggtgctggggcagtagtcatggcagactcccggcctgggcccccaggattctaggacccccaggcagccccttggactggtcccgggtgccttccaagcacagtctccatgctcccagattctcgaccttcccccggcccgggaggtgcagcctgcgtctgcctctgtcgtgtgtgctgatttgagtggcttagcttgccacagcgcagcctcttctgtccctttcagtcatttgctgtacttccctgtggcacgttaccatggaagccgctccagggtgggtcagggtgcaagctgctggtgaggtttggaagcatcaggctcacgggtgttcatgtgtgttcgtgcgtgtgtgtgcgtacgtgtatataactgaagtgtctgtacggaatgccctttgctagccatgggctggtcaccagattgttttgtaatgcccgccccttgcctcgatattgccagtttcttgtgcaataaacaatcagcagctgt

SEQ ID NO: 6140 - DNA, 1553 bp, Homo sapiens
gtcatcaactgagaagacctgagactctggaactgacaccatgagtcacccaatggcttcttgaaacggtccctttctgcggaggtagcatagcacagtgacgtttattccgggtcacttgattgcttttcctatccacttaccttaatattgctcccatgtcttaggacatattagaattattagaagatctctgggaaacaaaaggcgcatgggaggccaagatttagagtgttgatgcattccgccgtaccctatgcccagcctgtccctaaaggcagagtgcttcttattcggcagggcttcgtgagaatgccgccaagttatccaaaaccaaaggatgagagaggcttccaagagagggaagactgtccaagttcaaggagaaggggtttggttccctgtctgccagggacagaaagttctttccacatgtgtctcctggtcccgagagctttcaaaaggggatgtattctgctccaagaaagaatcacctcccagtaaagtagccatgaagggctcctgtataaaatatgcacacttcccctgccctgagtttgtggagggaaaggctgtcggaagtagggactcttaggagagcccgtgtgccctgtttggttcagctgtcaggcgtgtgccacacacatcccacctcatcttctggtcccataattctccatggatgggctgcttttagctccagttttccagtagaatgcttgagttttccttttttccgtacctcctggaggatgaaactcataacctgtcatcatcagtactcactgtgttttccactttgacttgaagtcaaatgaagttaccaaagttaaacatggacttctcaaattagaaaaaaacaaacaacaaaaaaacaggttaagtgttttgttatgaaaattatgaaaatgttcttattattatggaaaatttcaaatagatatagagagaataatgttacaaacccccacatactcaacatttagcttcaaaaattatcaactcatggcgggttttgtttcatctgtacaaactagtcggcacactatgatggcctgtggacaaaatccggccctctgactgtttttgtaaataaggttttattggaacacagccacacatatttgttgacttattgtttttggctgtttttgtacttcattggcagagttgagtaattgcagcagactctatggcttgcaaaacctaaaataattactttgtgtagcgctttatagaaaaaatttgctaactcccgatctgtaacccccaacctatccgccgcaccctgatctaggtaattttgaagcaaatcccaaatgtcacatcatctatccatatttcactatgtatttctaaaacatattcttttattcaaaataaaactctaatatcattaacagtattttgtttatattatcaaatacccagtcaatatttgactttctataattgtgtcacaaattaaacattgactttaacagtatgtattacacacttgtactttgtgtactttataacatgtgcactttaaaacagcaggagctctgtgt

SEQ ID NO: 6141 - DNA, 373 bp, Homo sapiens
ggcctgaccacatggctccctcgcctgccctgggagcaccggctctgcttacctgtctgcccacctgtctggaacaagggccaggttaagatcacatgcctcatgtccaaagaggtctcagaccttgcacaatgccagaagttgggcagagagaggcagggaggccagtgagggccagggagtgagtgttagaagaagctggggcccttcgcctgcttttgattgggaagatgggcttcaattagatggcgaaggagaggacaccgccagtggtccaaaaaggctgctctcttccacctggcccagaccctgtggggcagcggagcttccctgtggcatgaaccccacagggtattaaattatgaatcagctg

SEQ ID NO: 6142 - DNA, 373 bp, Homo sapiens
ggcctgaccacatggctccctcgcctgccctgggagcaccggctctgcttacctgtccgcccacctgtctggaacaagggccaggttaagaccacatgcctcatgtccaaagaggtctcagaccttgcacaatgccagaagttgggcagagagaggcagggaggccagtgagggccagggagtgagtgttagaagaagctggggcccttcgcctgcttttgattgggaagatgggcttcaattagatggcaaaggagaggacaccgccagtggtccaaaaaggctgctctcttccacctggcccagaccctgtggggcagcggagcttccctgtggcatgaaccccacagggtattaaattatgaatcagctg

SEQ ID NO: 6143 - DNA, 4402 bp, Homo sapiens
tgccaccagggcagcctcacctcctccccatcatcttgtcctagagtgggcgtcaccttggagcttctcttccttccgcctctgttcctcttctggagcctttgcctcccatctcttatctccttgatataattttgaacttgacctactttaaacttttttgctctgcagccttccttgcccttccacctcctcctcctaatattcactctgggctcttcttcccttcccacccctcactcagcttctcgtggtggcaggaggtatgtctgacaggacagaagcaagctccactgtggacatgagtgatggtgacagctgctttcaaattctgcatctcaaggcagggcaagccggggtggtgcaggtctcagggcacgagtccctctcccttgggttccattttcttggagcagcctattagttctggtggggttgccgtgtgtcggatgcagccctgaggggcagctcgtgcctgcagcccggcagctcgttctcctgttctgctgtgctgtgggctggcactcgatacctctggcaagaggatgattatctacctcactgataagaggcatcgcatggacgttctctggtctgtagtggagacaagcagttaacctagcaccatcctcatcctccctgcagaagccattagcagacctttgggccagggcagcctccctataattttcttcatctcttgctaatctctataataaggttgctttttctttcttagttgagtaaacaagtaagccacagtgtttgaaagggaaaaaccatattgccttgtgtgttgcttttcccagtcaaaagggtctgaccttagaaagtccccaccagtgatgctgagtgttctgctatggaaacaatgctgcttttctctcagctgtccaaagttcagccgttcctccttccccttctcccagtgcgtttgactttgtcaggtcagcctcacttgtccctttcacagttggcccataaagtcatgtttctctccctttagaatagggaggggaagggatcaggtgtgttgtcctgggcctttcaaccttgcgggctgtgctgagttccagagagctgccggaattccaggtttgactctccagcacagagcagagctacacagaggtgacccacgttagtccactgagagttctgagtccaaagggtgtacgttgcataaggctagagaccgcttttcctcctttccccccaggctctttgtttccctccacccacccttccatatcctctggagcaggagacaatgtgggtgcccagaagtgccctgcgctttcaggcagtgtctctgttttcccaaggtgaaacttagatatcatggactgttgtccagcctcaatgcttcattttccccttgcatatcaactgccctaatctgactttttttaagtgcaaataaactgctataagacattttggttagtaaaactctagcctttggcgtgttggtatcttggaagcattagctctgataggtctataagtgtattaagggacatccttccatttcattagagcagcttaaaatgctcaggtgtctgccttctctggtgtttctttgggatctctgtttacccacttacgctggctccttctagacatttcttgccacttccccaactagaccactcctagtgattactgactttagtgcctaaacctttttggaaggttctggttggcttgttagaggagcatatgattagaattctgtttgggggtctagttgtcttggagcaagtatgtacttaactagccgagagatgctgcctctaggcagagaggaggagaggtgttgccggctggagggccaaccagtgaacaccagctgtgaaggccttgggagaggaggaacaggcccttgggcagatgcaggcattaccagcagggagcagacttacctccgaagatggagacaggtgactgagagctgcaggcctcctctgctcttccaaacacgtagcatttgcacccctccaaagccatctttgtaaaggaaaacgtatttgtaattgaatccagaagaatttagttacacatagacataactcttcaaccttaactatggcaatacatttgtgctttaactgttacatagcagtatcaccacttaccaggatccaaatcgaaataataaaagctgtctccatagtttaaaatcgaatagtgccatcatcacagtatattagtcaaatagaagcttcatcagaaatgtatcccacatagagttttaagacttggattctcttctgcccttgttaatctccaactaattactacagattgacacgtttttaattagctgtcctttgtaagaagtcaggaaatctgatgctgtgtccaaaattatgcactgtttgttgaagtagaaccagaaatcctgacctcctgttaaatgacatcagtttccccctctgagcaacagactgcttgtcttgctaggagaggaggatggggggctgagcactcaggctgtccattgaaaccccttgtccatgaatagggtcatactcctaagactgatggggtgttgatcttctaggacatcacttgtttattcagtgccccaaacacagatttctcttctagcactttagagttgatccttgaagtctctcctggttcattcaaatacaagctgtgtgagtctggtggttttctgtgattggtctaatgtgagctctttgaacagacagatctgacagtgaatgactctcccctgcttctggcataactgctttgcctctgtctagtgtccaagcatcttagctgttcaagaggagagggcagcataacttcctgaccaccggtgtcagatatcagagcattctggactcctgagaggcagtggcctcttgagtgaacaggggaggccagtagatgccccagatccagagccgtggctgcaaatccagcaggaataaggagggacaaccacagcctcctcatccatgtgtcatttccaagggtttgccttgtgtctcagctcattctgggcagcacgtttgtcttctgtccctagagatttgaaggattttggactcttgtgaatgggtgactggacttggctttacagagttgggtgcttttttctctctgcaattacctgtcatagcattttgtgctcaccacgaaggatggtctctgccttctcttgtcggtgtatgccatctgaacctaggaacacaaagtatattggcctcaaacggagacccagggttgccagttttccgtgggccttcccctcccttgaaatgtctttaattacctccccttcatcgtcaggccacgtgtgacttctgttcttagcactgccagggtcattgacttccatctaagcttgcatcaggaagatgttccttctgtgatcattggtactgaagccagaaaagctctcattcaggaactctgaagagcaaaaagggacaaacactaactgctgagctgggccatttgatctcctttcaccttgcattgctgtcacagcaccttgtatgatggcaggacaggctccagcagagagaactgcacagtgaccactgtatttttcacgctcttccagggatccctgtcccccgacattgaagagatctcattcaggccagagacacagagaccacatagcccagtgattaaaccccggtttcactctggccccaggagtggagcctggccactcctgtttggttctcactgggaggcccactggccttggatcatctcctcatgcacacccggagttttacctgcttgcttgctttcctggactgctgtttgcaagaaagtaactaaaacatgaaaagtaaacctccagcttccacagtatattacctgccgttgcatgcatttgaaagttagcctcctcccttgccaccgtcttggtggcagtagcgatgcaagaatgatgggagctttccgagagcgttcagtgtttcactgaagacaggacccatagccttcatttctggctctgtgtctcctctggcatatggacacatttcctggcatttgcctgagtctacaccactttttgagaacctgaaatagaagggaatcttctgtggcccacagtctccatattggcactagaagactggcctggcggaggaatttgcgttggcttgctttcaggggttagctacaagattcagctttatatctctgttgcttcttggccagtgtagtcaataagggtcttctttaacatctaagatagaggtttggttggccgggcgtggtcgcttactcctgtaatcccagcactttgggaggcccagtgaggtgggagaattgcttgaacccaggaggcagaggttgcagtgagctgagattgcaccactgcactccagcctgggtaacagagtgagactcttgtctc

SEQ ID NO: 6144 - DNA, 1390 bp, Homo sapiens
gaagctccaccagccactgatgccagccctggcactgcccctgcacaggagacaagtgcatttagggcacaggccccgacatcaccccaaggacaacggcagaagtagagagaaactacctacctcacttcaaattatgtttggacttgacaaaaataggtgcaaatgatggggggcaatagaagaaaaaatttgcattttggaaaattgggtcctttccccacttttttaaagccacattcccccatctttataataatctggtcacagtggtagtcgctggccccaggaccccctcctgattttggctaggcatcgtggaaccagctccagcccctgaagaaacgatagatgtgcaggttgtgcggaagaggctgagtggaaaatggtgtgagccccaccgctgtgcatcgaatgagggaagtggcagcagagaggccagagctgccccctctctgtctcttcaatggacccttcacaagtgtttctcctgcccttggggctgtcttccttctcctgaaatccagagactttcttgctcatcccttctccctttcacttctgttctctgctgcagaaagcagacttgcatatccctgatgagcagctcggctacttttgtaaacttcagatttggagagaaacacgaaagtctgaatcctgaccccttgagagagagtgatctggcgagggccgatgaaggggctgggcctggtcttgccttctcttctctcggttgctccctctgcctaggcccctggtactcagtcacggcagccaggagaccccaggtgagtttctgagcgcatacgtagttggttcttacccccaggtgtcacacggggccgagagctgagcaagaatttggaatggaagttatgaccaagggaattatgctgttcatttataatagtggacattatggagagctctgattcctacataatatgaataaggatggataggccgggcgtggtggctcatgcctataatcccagcacgttgggaggctgaggcgggcggatcggttgagctcaggcgttcgggaccagcctggccaacatgatgaaaccccgtctctaccaaaaatagaaaaaaatatagccgggcctggtggcgcacgcctgtagtcccagctactcgggaggctgaggtaggaggatcgcttgagcctgggtagaggctgctgtgagctgaaatggcgccactgcactccagcctgggtaacagagcgagaccccgactcaataaataaataaggatggataaattgtagcgtatgcaccattcattatgctaagacattttaaagtaattatgagaaacgctctactaatgatttgtttttatttgtatttttctgcttattagacaaatatatactcatttt

SEQ ID NO: 6145 - DNA, 244 bp, Homo sapiens
gaagctccaccagccactgatgccagccctggcactgcccctgcacaggagacaagtgcgttcagggcacaggccccgacatcaccccaaggacaacggcacaagtagagagaaactacctacctcacttcaaattatgtttggacttgacaaaaatgtatgcaaatgatgggggatggtagaaaaaaattatttacacaaccttggaagattaggcatgaatacacagagatttaccttttgg

SEQ ID NO: 6146 - DNA, 593 bp, Homo sapiens
agctggcttctctctgcaacaggagaaaacctggagctacagtgtcccccaccttccttgccccatgggaacctccacctcctactccccacccacctctgcgaatctgctcccaaaggaagctgaccagagcaagatctgggcaagcagagagtgcctgggacaggactgtgacctggtggacaggggcctagatgtagcctctgttcctcctggacataggaaggtcccaagcttagtatcccacgtggcctttacaaatcctatggctggccttctcattccacaagggccctggaaagggttgacagccagccttggcatatggctgggagtcccttagcaaggccaaccctgaagaggccctttgaggcattccctatggcttagagttgtagacttacactcaaccctcatgtgagcgtgggagtgagggtggcggtcccttgccaagttggtagcagtgacccagtgattcactgccatcccaggccttaactagcaaaactacggagcgtgccaagtgacctggtgcctgtgggaagtgggttctcaggactggcattcttggaataaattcactctgtccttgc

SEQ ID NO: 6147 - DNA, 484 bp, Homo sapiens
gccctcctttcccggtggggcttgccagagactgtgtgttttgtttcccccaccaccatcactgccacctggcttctgccatgtggcaggagggtgactggataattaagactgcattatgaaagtcaacagctctttcccctcagctcttctcctggaatgactggcttcccctcaaattggcactgagatttgctacacttctccccacctggtacatgatacatgaccccaggttccagtgtagaacctgagtcccccattccccaaagccatccctgcattgatatgtcttgactctcctgtctacttttgcacacacccttaatttttaattggttttcttgtaaatacagttttgtacaatgttatctctgtgggaggaaggaggcaggctgtggtgggactgggtagggtatagtatcactcctgagttccactgctctagaatctaaccagaaatagaaacctagtttttaaggtg

SEQ ID NO: 6148 - DNA, 494 bp, Homo sapiens
gcaccctggatggtgactgcggataggggcagccagaccagctcccacaggagttcaactgggtctgagacttcaaggggtggtggtgggagccccccttgggagaggacccctgggaagggtgtttttcctttgagggggattctgtgccacagcagggctcagcttcctgccttccatagctgtcatggcctcacctggagcggaggggacctggggacctgaaggtggatggggacacagctcctggcttctcctggtgctgccctcactgtccccccgcctaaagggggtactgagcctcctgtggcccgcagcagtgagggcacagctgtgggttgcaggggagacagccagcacggcgtggccattctatgaccccccagcctggcagactggggagctgggggcagagggcggtgccaagtgccacatcttgccatagtggatgctcttccagtttcttttttctattaaacaccccacttcctttg

SEQ ID NO: 6149 - DNA, 691 bp, Homo sapiens
gaaatgaatattcaacagctcaccaactacagaaagagcgtcatgtccttggcagaggcagggaagctctaccgcaaggacctggagattgtgctctgcagcgagccccccatgtaaagtggggacgggggctgcttctccacctcccccaaaccctgcttctgctgccctgatgcgtctacccagactcagagaccgtgagcgccccgcccccacccctacagcctgcacacacctgcctgcagagcaggaaatgagagatagaggatgggcagctggggggctgtcctgagccccctgcacccacccctgcccaggcagtctttgctcagtggatcacacacatggaaggtgatgggggcatgggtggagggtccctaattctcttcgctgtgatgcatgagctccctcgctgtatgatttaggcttctatgtccaacagagtggactcttccctctcgctcccctctgccggtcccccatgccaccacccaccccaaacttccaggttccatccaccaccttgccaatggtgtagctgtcctctcagaactcctgtgtgtggaaggcacccgccctttccttgccttctttactcggcgtgctccttttctctttgggtttcttgtttaccaaagaagagtttacagacaataaaatggaaaggtcctgctgtggaaacttacccaat

SEQ ID NO: 6150 - DNA, 672 bp, Homo sapiens
gagggttgagaaggctttgctgccacctggtgtcagcctcagtcactttctctgaatgcttctgagccttgcctacatctctgagccttaactacatgtctgtgggtatcacactgagtgtgagttgtgtccacacgtgctcaagcagaaggacttttgtgtccatgcttgtgtctagaaaacagactggggaaccttatgtgagcagcacatcccaccagtgaaacagggtattgctcttcttcttttcttgatcttcctgtctgggcagacttcagagactttgtggcctggaggcctattaagcacgacacagtatcagtggaattgatccataaacctccctgtccacatcttgcccaatggggaatggatctttcaccaaagagctcaccagcattttccacagagatgcaaattctgagcccttggagttcccagtggattcaaggaaggaagtgggaacaaggttggatgcctacttatgagcttgaccatcacagctatcggtaatcagaaatatgaaacaaaatctctgcacaaaagagcaagctcttaagttcacagggtgcctgggctgcatttgaatatcacttcccctctgcattttcccatcacatagaagactttgacctgtgaagctgccatctgttaatactaaaattcccaaat

SEQ ID NO: 6151 - DNA, 936 bp, Homo sapiens
gatcttccggaacctaaatgtgaacgcacattgtttctctcaaaaagacaggtcttttaaaactccgcattagacaactatggttttcacacacttgactttataaatgctctctttggactgaggcaaagttaaagaattgaggacgggcatggtggctcatgcctgtaatcccagcactttgggaggctgaggtgggcggatcgcttgaggtcagcagattgagtccagcctggctcacatagcgaaaccctgtctctactaaaaatacaaaaaatcgccgggcatggtggctcacgcctgtaatcccagcactttaggaggccaaggcaggcagatcacctgaggtcaggtgtttgaaaccagtctggcaaacatggtgaaaccccatctctactaaaaatacaaaaattagctgggcgtggtggcaggcacctgtaattccagctactctggaggctgaggcaggagaatctcttaaacccgggaggcagaggttgcagtgagccaagaccattgcactccagcctgggcaacaagagcgagactccgtctcaaaaaaatacaaaaaatcatctgggcttggtggtgaacgcctgtaatcccagttactcaggaggctaaaccacaagaatcacttgaacctgggaggcagaggttgcagtgagcaaactccactccacgtcactgcactccagcctgggtaacagagcgaggctctgtctcaaaaacaacaactacaacaaaaaagataggacagtagattttattagaccctgaagcatactggaggctttttcatttctgcattccctgacagtgctccatagagtaggtcttcaaaggtagatagtaatctcattaccctggactgttctcataatgtaacagatcactaacactgaatcttaaaaataaagttcttttagtaatttt

SEQ ID NO: 6152 - DNA, 525 bp, Homo sapiens
gggtttctaaaacgctctgacagatgcaagtggtggtggaaggtagtctgagccactgcctttcccaagaatcccttgttgtggaagtttccagtgctggaaaagcagcgagccagcgttggtgtggtgggcggagctcccagtcgcatggagcggtgttcatggatgcaacagaccctggcttctggagtcctctgtgagtgagggaccaatcaaaattatttttcaaaaagcaaaaaaatggccggcctcggcggctcacacctgtaaccccagcactttgggaggctgaggtgggtggatcacttgaggtcaggagctcgagaccagcttggccaacatggtgagcccccgtctctactaaaatacaaaaaaattagccaggcgtggtggcgggcgcctgtaatcccagctacttgggaggctgaggcaggagaatcgcttgaatctgggaggcggagattgcagtgagccgagatcccgccactgcactccagcccaggtgacagagcgagactccatctc

SEQ ID NO: 6153 - DNA, 1204 bp, Homo sapiens
aaaagaaaacataggtctcttaaaccaggcaactttcacgttttgggagttgagactgagcaatttctccttgtaacaaagaatctccatgaaattctgtttcatctgttaaccgtcactcagcacaacactccctctgggctctcttcctgctcctccagattctgctgctttccagttctctgttgatcctgagactaacaattggagactgaggccagagcaactggctcctggcagctgtgcttgtccgtttcctgtcagagtgatcccaggtttcctcctggcccgtcccatggtccctccacaggagtgtgagaggatgggggaagcactgtgggaagaccaccaaagatggctggacagtgggagagagcacgttgtgaagcatcccagcctcgtgttgaggttccagacttagaaacagacccctctgtacagggggattgtggtgagtgagaatcaaggccaccttgtgtgttttctcactctcgaatgcaagtgggagagggaaaatgactcgggacgccattgtaacggttcctggaagctgggccctctcattggcatatacagtactcctcgctgcagggcactgtcccaccgggatccagttgcaaagtttgtcttgacagttgaaggcctcgcttagttgtactggattctcagggagccctctgtggccttttgctttgcgtgctgtttcccttgtaccagagggcggcaccgtggaaattctgttttccctgtagcatattgtgttggattgcattactggcagagaaaggacaaggtgccattcaagtcctagggtgggcttccagctgccttaatagaagtactcaagtcttttgggtagtgagctggaaagcctacaggaaaagaggggtacctgttttcatttgaaaactttgattcatggaacctttaaaactaatctcagaaaaatttttggtgcccatgcagctgtagttgttcactgctttcctggatggatgggactcttatgtcataacttctgttactcctttggcccatagctaaggtcatccttccccacaggggtggctttgggattggatgatacagcttttgcttctgtgtagtatacctgtacatacttgtttcaggcagcctttctttaatgttttcagttggtttgtattctgtagctcagtagctgctaataaagttaaagatcctg

SEQ ID NO: 6154 - DNA, 856 bp, Homo sapiens
ggacagcgtctgacgggaagcctgatctggaaccttcccaaggactcaggcaagcctttgtggctggatcatgagaggagggactccatcttgagccatgtcccccagccatggcatggctgcactgtaaacgccaatcggggggtcaccaggatcaaccgcaggctttcttcagtcccttggtcagaccataaactgcatttttgattctttgtggattcaaaccctaggatccatcagtcttgcaaggacattgaatattaggaggaaaaagtcatggaaaaaataaagccatttagaacctgggtttcaacgctagccctttctggtttgccataggccctgccaagatactgcaggtccatccaggcctctgctatctgcatctgcagtgggcttcccaggaacttgactgtctttcatttgatctttatttttgtttatttaatattttaaactttattttaaaaatatttcaaacataagggcggggtgtggtggctcatgcctgtaatcccagcactttgggaggccgaggcgggcggatcacctgaggccaggagttggagaccagccaggccaccatggtgaaaccctgtctctaccaaaaatacaaaaaattagccagatattgtggcaggcacttttaatcccagctactcgggaggctgaggcaggagaattgcttgaacctgggaggcggaggttgcagtgagccaagattgcaccagtgcactccagcttgggcgacagatcaagactctgtcacacacaaaacaaacaaacaaattttcccgtttctctctgtccctttctctataacatggataaaatattcacgtcttatgtatttatt

SEQ ID NO: 6155 - DNA, 168 bp, Homo sapiens
tgcaaggctggccggaagcccttgcctgaaagcaagatttcagcctggaagagggcaaagtggacgggagtggacaggagtggatgcgataagatgtggtttgaagctgatgggtgccagccctgcattgctgagtcaatcaataaagagctttcttttgacccattt

SEQ ID NO: 6156 - DNA, 164 bp, Homo sapiens
tgcaaggctggccggaagcccttgcctgaaagcaagatttcagcctggaagagggcaaagtggacgggagtggacaggagtggatgcgataagatgtggtttgaagctgatgggtgccagccctgcattgctgagtcaatcaataaagagctttcttttgaccc

SEQ ID NO: 6157 - DNA, 414 bp, Homo sapiens
gctgaggctgtccccagagaggatggcagcaggtattgggtcctcagccttctggcgggagccctgaggctgcggacaaagccctttcatctgaggactttcatctgtgcatatcacggccccccagggcagttcctgctggaccagactctctggcagaggaggtggagttcttccatgcaggagcacggcatggcgggagcggggctgcagagtatccgaggtgctgccggggcagcgggaggtggctggacccatcgcatctaaaactggcccaggacacttggtgtatgcgtgacttggctgtggctgtcttttttaatccttgtgtaaagcagcaaaaaagacctaaagggaattgtaatttggttataattcaggatttggaaataaatttattatttgtaaaacatg

SEQ ID NO: 6158 - DNA, 553 bp, Homo sapiens
aacatgtattaaatagcttttttaatttgtaaattaaaatcttacaaactaaatcagtgtgctgctagagggttctttttcacttgacatgcttattagaaagctgacccaacaagagctctctgcctccggtcactcttgctgtggtgctacgtggaagtgaatggagactgatctcaaatctgaactgcagctttcgctgctgtgagttggggatatgatagtcagctcaggcttcagattgtatgagaaaaatgaagagaagtcaacaaatattttggtactcttcattcatttatctctaaaaccaggagttgaattttcctcatcttgaaagactcttggggtctgtttctggtattttacaaaattgctaagtggaatgcatgaattgcattatgttctctggtaacacgtagagttcagacccttctgaactctgttgataataccacaccatgttctggacccatagctctggcatcctcaggggttgtgatccagctccatatattgtttaccttcaaagatacaattaaatggcttgattttt

SEQ ID NO: 6159 - DNA, 3262 bp, Homo sapiens
ggacagagcgcccctgctccagggaggaggctcaccggaccctggggcagagctgagcttgggacaccagcgggaacagggcaccccttctgcactgacttccagatcatggttctcccttcctccctgaggacaccaaattggatgagagcaagtttgagagaagaatgaatcaactgctatccttcccctcacccctcagcccaggagggaaagggcattttctttttcatctttgaaaggcattgtgggtctgtctttaaagtgtttacaaaaaaaaattatataaaaaaaaagtctagtgtcgactggtgttttccctcgtgatgtttacagcttgctgtttgctgcccagccataacccactcagtgacagacgaacacagctaaggcctcgctgccagccttctgacggcgggcgagcacacggtctcttcccctgccccaactggccctctccaccaccaacttctctactttgggtttgtttggttttttccctctatttttctggctggttttttgctcttttctccccttgagaccctaatatcttgacttcattgccaaaaaacaacccattgagaactttcttcctactgatcccatctcttttcccttctttcctcctggttccggtcagttcagaggatttaacaatcacaagtgtcctgcaaaaatgcctgaacattattcttaggccctcgtggattttttttttcagaaaacttaaacaaaaaaagacttactaagaaatatgtacagctacccctgttttcaggcactatgtttgagaacattttagccattgatgttcacacgtggcatcagcccatgcaagataggtttctgtatttatatattaaaatacaaaaaaaaacttataaaatgtttaaaaaaatgttcaaagcttgggagaaaagctttcttcattagtcaaggtgttttgatatggtattaaaatgtctaataaaagatggcactgcgtgattttattttaatgaagtgttatacaatcaagaaatgggggcaagggcctgccccccactccctcacctacctccttagcattccttcaggctgctactcggggctccaggtgtgtgaattggtcctcagatagtcaggcctgggtggagggagtggcaagtcaggcgtgcctcctacaagcttcctaacctcttaagcatcatggaaccagtcagccctctgtggagtcattgtgctggacctctgaaaagatctgcaggggccaagatgttgcagccaccggaggctgcaaggatgtgggttcttccaggtgtgggcccagcccccctccttccagcctttgctccccatcccacgttccactcgccctgcctgttgttcagtttgcgtctcagtgctgactcacgggcatgcttcattgaggcccaggaagaggccctggtttggggctgtgccagctcagagcccttgaaccagaaccaactgctcaggctcacaaaagttggcaaaatgcgggctgggcaggcagctcggggcagggagcagcagtgcaggcctggcctgtgtccccgtgcccagcgggctcccggagcagcattccagagcctcctgcagagccagcgaaggaaagctctagagggagacgactccaccgcctctctgctctgacccttctcaggcccgcctgatgtgctggaccatccccctgctgccacggcccctggctccgcagtcaccctccatcagatgcttccagaagcacctactctgtgcaagggcattcacaacaggccagtgggcaaacgtgagccagggccagcggagaaacactaaagaagactcggtggttcagagcctgggtctcagcgcgggacccgtctggggtgaagaccttggggctgttgtgagtcggtggcaggaacgtgggctctagactgtgcattcaggctctcctacttggcagaatgatcttggggaaacgacttcatctgaacttcagatatttcacatgtgaagcggggacaaaaccatgcagctcagaggtccctgtgggggctgggggagctgccctgcaggtcttggcacatgcacagcaggctccccatagctttgtcaccacaaagggcactgttctattcacagcacctcctgcttctgcctggcaactgtgtctccctgtgctatatttaattccaccagcaaagctggcgaggcagggcccagccctgaaggagatctccttgcctgacccctggacctggaaatggaggcttcatgtgcccgccttggcggcttaagcctgctgctttggcagtgccatgggtgagccgagcagctgtgaggtgggtggggcagggctgtagcccacgccgggtgctattccaggctctaggggctggtgctcatccccacccccagcgacttccgtcctacctggcatgctgcagccctctgccggctgtggtgtcctctgaatttggacccaggttgcctgctcttgttgtgggggtgggattggggctgtctgtgtttcccaggtggagctcatgtttgtgatcctctatctggacagctctccagaatcctgtgttgcccctgttctgcctttctgggatgggagagaaggtgagggagccggcgagcaggttctaccctctctgctaagggcctagcacactttgatgaggttcctggacgtgagaccctcacaaagaccaaccattcctctaatagccatttaacggtactgcagttcatgggaaaatgtcctcattcttaggagatagatgctggattatataggtgaatgccttcaagaaatgtgtaatttaattccaaatagttccccccaaaatacacaaagcaaataaggccaaaatgttcattgttgaatctgcagtggctggtatttcagtgaacagtgtacttgttctttcaacttttctgtatgtttggaatttttcttaataaaagattgtgggaaatggtcatttgctgagcgcctcctagttgccaggcactggagggcgcatcaaagaagagtcctacccaggagggagagcgcagctgctgcaggattctcgcctggaagagtgggtggctggctggctggctggaaggggaggggcgagagggctgtctcggtgatgagcacacgcgtgctggggtggtttggggagagggctgagatttgtcaccagtgagcccttggcacggtctctgctccccaccagggcagcacgggacagaaacgtcacggaggagtagcctc

SEQ ID NO: 6160 - DNA, 1899 bp, Homo sapiens
aactccagccaggtcttactgtggaaaactcctgccagaactcttcaagcgggtgaaaaacctcatgacagtattgagggaacatgggaattcatactgagatgcaatctctcaactcaaaaatgtattaaaaataggatcccatgagaacattatactggaagttacatgtgatacccagctaaagaatacatatcagaatatatccagttgtaaatagccatacccagttgtactacaatgagctttttaaaatcttgaatgaattgagtattctagacagcagcataagaaatatacaaacagtatcctatgaatttagtggttttatgtggatatgccacaaaacacaagtggtatgctttagatctgcacatgtgaatttagcataatcactgggaatttgaaattcttgtcctctgtgataattaggacataacaagattttccatactaaacatcacatgtgtttttcagtatctctgcaatccagtatgcattccaaatgaaatgtgtaacatttaaagtagcatggaacctacgtctttccctactgcttgctggcatatatcagttggtatgaacattgttcttgagctgcctcttaggaaacagaagacagtgttgaagttttccctgcttctggtttgctgaagattttctagaagcactatttacacaaatatgcaaatgtgaaataaccgatctataacgtgaaggaggcagacatgagctgtactactcagtatgcaccacagaataagagtttgccgtgtaaagacaatatccccattcgtcatgctcttattttcccgtgggatatttgcatacaaatgcatgtctgttaccaaaatattgtgtaacacagacagaaaccacctgtttttgtctttccttgtttcccttaatatttcatgaattgtctagcaaaaatggtaggatgcttctgtagttcacaaatgttacatttcagagactttagaggaaaaattattttaaataactgtcaactgtttcattgctttttaaatttttcacgtgcataaccccctttagaagtaaatttttacactattttgttgtttaaaggaggcatttctacttccttgagttttgctgttgccaacctaaaacatttccctttggaacatgagttataagttattacttttcctttacatgtttacacttttataaaaatcagatttttcagtggtctctccagatattaacaagaattgttgtgtaactcaaagatttgcttttatagacttgatttcaaattcttaagttcagcctttccctatcaatcacaaatcatgtattggaaattataaatggcaaccaaaaactggcttttaaaaaatatttttggatatcattgatgtgctgtcacactatatattgagtgactttctgaacaaatttatccagaacatccatagcccaataagcttttgtctaagttgtcatcttacttactcacaaaggaggggaaaacgttattttcatagctgcttttagaaatgtaaattgtaacagcctccttggacaacattgtgagtctgttttaacattaatatactcttacaacctaggaatctcctgggaatctatccctaaggaataaaaagcgccagcacttaagattatatgtttactaatgtatattgtattttttggtaaggaccaaaaaaacaaacaaaaaaaagaccatcagtaagggaatggatgaataaattgtggtaaaaacataccatggctgaatggtatttccttgaaaagaatgtgtgggaacaaactccaaacttctctaggtcaaatgaggaaagcaagaggggagagagagagtgtatgtgtgtgtgtagcagtttttataaaataaagataaacccttat

SEQ ID NO: 6161 - DNA, 57 bp, Homo sapiens
gcccgcggctccctccgaccctgctccccacagagcctcagtaaacccatggaacac

SEQ ID NO: 6162 - DNA, 511 bp, Homo sapiens
gggccattgctgggctaggtgcaccgtaactgcttgtgtatcttgtaaatagccagccattttcagttattataccagaacctcttcacatagacctattagtgcatttgtaactggatttatttcttaatatattggaaggttttgtttccttagactagtaaattatcatacagagttttattttgagtttttctttttgtgcattgtcctcatgcctgtattctccaggaaacttgtccttctggaaatcatattgaatgatatttctatatcgaagtgaggtaggtgcggtattaaagtgaaagggaaggtgatgcatttattctgggttatgcttgaagtgttagatggctaagtattaaaattatccaaattaaatccttagcagtcagaacacttgcttcactagaatatgccaactgccaatcatgttggactgagctaatttgttcctctttctgaaactattaaggtaaataattaacaataaaaattctcttataaaggc

SEQ ID NO: 6163 - DNA, 819 bp, Homo sapiens
ttggcaagataatgagaaaagaaaaaagtcatggtaggtgaggtggttaaaaaaaattgtgaccaatgaactttagagagttcttgcattggaactggcacttattttctgaccatcgctgctgttgctctgtgagtcctagatttttgtagccaagcagagttgtagagggggataaaaagaaaagaaattggatgtatttacagctgtccttgaacaagtatcaatgtgtttatgaaaggaagatctaaatcagacaggagttggtctacatagtagtaatccattgttggaatggaacccttgctatagtagtgacaaagtgaaaggaaatttaggaggcataggccatttcaggcagcataagtaatctcctgtcctttggcagaagctcctttagattgggatagattccaaataaagaatctagaaataggagaagatttaattatgaggccttgaacacggattatccccaaacccttgtcatttcccccagtgagctctgatttctagactgctttgaaaatgctgtattcattttgctaacttagtatttgggtaccctgctctttggctgttctttttttggagcccttctcagtcaagtctgccggatgtctttctttacctacccctcagttttccttaaaacgcgcacacaactctagagagtgttaagaataatgttacttggttaatgtgttatttattgagtattgtttgtgctaagcattgtgttagatttaaaaaattagtggattgactccactttgttgtgttgttttcattgttgaaaataaatataactttgtattc

SEQ ID NO: 6164 - DNA, 555 bp, Homo sapiens
ttggcagctatgatttaacataaaattatgatagtttgttttaatagccaggggttctcaatggaaaaacgaatgctcttacactgaatgtacaggcagtgggcttgcagcactgccatcttgccatgtacaggcttggggtggctccaggaagcctcgtccagtgatatatttctcatagcattcattctatggaacaagaaattagatattgctgttaattttcaactgttctggtatgatctaaaacaagtttaacctgcttaatggctacagtttttacatgtgaaaactgtagccttggtctcttaaccatgtaatacataagttttgttagaggtaaaaattaaatttggactataatgtccttgctttatttgagaacatttgctgtgtttgcttttgtctcctcgtggtgttattcatagacctggaaatgcttctcagatcctgtgtggccggtgtttgcatcttcagtggccacaagcataataaagcccctttgcctttctctgtattatattcaatacaatacatcaatagtcttgaaaaatg

SEQ ID NO: 6165 - DNA, 1336 bp, Homo sapiens
tagttggagctcccagaccaggcagtgctgggagcaaccacctttgttttttaccttctgtctaccctggaaatgtgtgtgggggtgtgtctgtggccagtcattgtctccctaagcaatggggcaaggtctgagggcccaccgatgagagagatggtggcagccgccaggcgagcaggctgctttccctgcccagtcatgcacctccccctctggggaaatccttaggcctccctctcccttccctctgtctcatctcctccacttggatgatgctctagcctctgtcagggactgtcccctccaaacttgcttccgtggtctgcctcctagttgaatctcagccctgagtgtccagatctggccaaggtgtctagggtggcccacgggggtgctggaattggcacttcagggccaggctatgcttgggactggcctgagggtattttaaagaaaaaaactacataaaaggcctaaaagtaagacccacaaggatattcctttgcccttcttgtacttttttcatctttaccctgccagaaatgacccgccctcaatgctggctgctgctaacattaatgagaaggtggccttcagtgtccacctgtggaacccaggacacagcacctgactgcacacagtggctgaaatccagcatttttacataggagatgcacttagcctctaagcctcgttttactcatctgtgaaacagagataagtaaccctctctcatgaactctttgatgaggatttgtaaacgaaaacagactcgaactattgtgtaccaccacatagcacatgcacgtctgtcccagactttgacaacctgcacaagacaagcagcctaaagcaggagagacctccctagggttttgtgtgtgtgcacactaccctcactccccaactggccattaccctagttctgcccttgtttgtggagttacagcctcaaggttgtagcatgtgtgctggcaatcagggccgcagtgtgttctgcgcctgcccagagctgactcctgatttaaccgctggcgtaaccgcgggttgcacgcatgcgtgctgaaaagcctttcaccctcacgtggtttcttttttaaccagtcatcaagcgaggctcgcgcgcaggccccgcgttggaaaatggcggggaagctgaaacctctgaatgtggaggcgccagaagctactgaggaggctgaaggtagtgagggcaagtgggctgcactcctttctctccaaccagggcagaaaggagggaggattcgtcccattacaataatgaaataatgatattctaatttttttaaataaaatgttaagccttttgttattg

SEQ ID NO: 6166 - DNA, 2409 bp, Homo sapiens
ctgaggacccaggtgggagaatgtgaaggatggtttggaagatgaggacccggctgagaaaactcttctgtgccccagtgaacaaatgctgtagtccagtgcgtgtcgtgtttgtctgcagtcagctgagctaaaaagctgttgatcactgttgttttttgaagtgccaatcccatgccatgcagtattatgtccctctcctatctgtgtattacacattcccctctcccctgtatcaaaaccatccatctgtgggttcttcttgacagttctagaacagccttgcaaattaatacaagtcccaggcccaatgcctaagagaccagacgtgggcaaagacaagtttggatggaaaggtgttatcacagagccctgtccagctcctagaattcctcaggccagtgacacttttttgctgctggccacccatgcctctgatgagaacacttgccaatttggccagcagaaagagagtaggccggatgttttcatgagcccacaaatttagaaactctcctagtagtactttttctctctccatttaagagacaactacggtcaaaagtttgagccattctcttctaccccttcagtgtctgaccctttcactggctcttatctgtaaacacagggaggcaggtatggatttttcacagtagacaatgggtcaacagcatgagtttgaggacctgctgtgaagatttctcctccaaaatacatctcatgggcaggattcttcctgctccatatctgtttcaattttaagaaagcaccacatacaagacacattcagaagtcattcctgagcattgctggtgtttgcacacttgccacctgcattaccaattctgtaaatttcaattcctggtggaaagtgaccactttgaccatggatttcccaaagaagagttcctttgcagaccataggtggaaaagtcaatgagcatctccttccttgccaaagcatgtcccaacatgtaacaaactctagggatacaaaaggtttatattcagcatctgatgtcagatgtacagttcctcccctcccatatataaaccccggtgtagaatctgcagcgccctgctcttcggaaaccaaggaacaagccacctgctcacacaccttgttcaacttttcagctcctaaggaaccccacccccatgcaatttgactgtgcttgagaggtgaatacagttaccttcgagaaacagagggagctcctcaccccgtccttccagtccttttggctaaaatgcttaactatcactcacaaacaaatgtggagataccaggagctcatttgattcataccccaactttgtgttctgaaaaacatcagagggattttacattgcccagtttctccaccaacaagccttagggtggacccaaccctttccgcaagtggtaggaacgaatgcatcttagcaattacctgatttccaaagtccttttgtagcaaatgtcacctcattcgtggtctttttacctatcctaagcttatgatgatgagttatgtatgccaaatacttatctgaagagtttctcctcattgtgaatgtgtatgtaaaatatgaagacaagaaagggtgctttcatctgaggaaccaaggggtgagagtatcccaaaggaggacaccagcatcatcttttcttcgtactccaggacccaccaatattccagttctgggtcatttagagagataatggggcgtttattcccctattacctttgctaagtgctatattattggctgtttctcccgtaaccatgctgaaaagggggtcttagggagaactgtcatccaagtggcattcctagtaagttgggtagaaatgacattttccagagctgaaggagtgaagagcccttggccatactagggctctccttcccccggggagtgggaactcagccacattcagaattcacatcgcctttgttatgtccagaggagaggcataaaaaggcactctcccccaccacccctaccaaatctgggtttggtttggttttatttaactagcaaagttaatccagtaatcgcaaattactccagatggttaaagaaaaccctttcagaatacagaacgagaaaactagagtttgaccaataagaccaatttctgccatgaagaaccgggggacgcaagttaattgtttaacgtactctcattttaagcaccttctttcctgtctcttgattgttttttctgaaggaagtgtaaagaatgtctcagtctgccttaaaggaactgtgaaggcttctctgtaatttaagcttgatagaagtgaactgaaacattgtctaatgtctttgtggctttagagcttttgttatattgtgcctataaagcaaattatgtttacataaaaatataaataaagtattcagcatagcaaaacc

SEQ ID NO: 6167 - DNA, 1260 bp, Homo sapiens
gtctttctccaatgtgtcctccaagcaagattcatcataacttataggttcatgatctctaagatcaagtaaaaatcataatttttacttattaaaaaattgcaacacaagatcaatgtccatagcaatatgatagcatcagccaattttgctaacacatttctttgggattttgcccttcctggggtataggggatcagaaatattgatccatgtgcacgcagataaaatggcttctgctaaacagactaaaatctttctctctagtctttctcacttgtacaaacccagtttgttttcaaaaaatcacagtagcaatgcaactcatcactctagaaaagcaagcttaggctacctgaaagattttcccttggaagtttagcgtatgtttgactaacaaaaattccctacatcagagactctaggtgctatataatccaaaaacttttcagcctgttgctcattctgtcccatgctggcaataataccttgtcagcccattacccttattttgaattgctccatctcctggtgggacttgtatcttgtctgccatatcagaacacaaacccctgaagaggttctgatttgattttttttttttcttcatgcctaccctttttttggaagtttccagccgcaatttgaaatgaaatgacaaggtgtatatttgatcaattttcattcccaccattgcattacaacctctaacttaaatgggtaaccctaaggcatatcaaagaagcagattgcatgataaacggaaacagaaaaaaagaacctacatttattttgctttagcatccttactctcaccttttatgagattgagagtggacttacatttccttttttacattttcgtatacttattttttttagccatcattatatgtttaagtctattatgggcaaccaatctttggaagctgaaaactgaatttaaagaatgctatcttggaaaattgcatacgtctgtgcaattttttattctgcctagtgctattctgcttgtttaactagattgtacaaaataacttcattgcttaatatcaaattacaaagtttagacttggagggaaatgggctttttagaagcaaacaattttaaatatattttgttcttcaaataaatagtgtttaaacattgaatgtgttttgtgaacaatatcccactttgcaaactttaactacacatgcttggaattaagttttagctgttttcattgctcaataataaagcctgaattctgatcaata

SEQ ID NO: 6168 - DNA, 870 bp, Homo sapiens
gtggagctcagagcggatgggcacacacacccgccctgtgtgtgtcccctcacgcaagtgccagggctgggccccttccaaatgtccctccaacacagatccgcaagagtaaaggaaataagagcagtcacaacagagtgaaaaatcttaagtaccaatgggaagcagggaattcctggggtaaagtatcacttttctggggctgggctaggcataggtctctttgctttctggtggtggcctgtttgaaagtaaaaacctgcttggtgtgtaggttccgtatctccctggagaagcaccagcaattctctttcttttactgttatagaatagcctgaggtcccctcgtcccatccagctaccaccacggccaccactgcagccgggggctggccttctcctacttagggaagaaaaagcaagtgttcactgctccttgctgcattgatccaggagataattgtttcattcatcctgaccaagactgagccagcttagcaactgctggggagacaaatctcagaaccttgtcccagccagtgaggatgacagtgacacccagagggagtagaatacgcagaactaccaggtggcaaagtacttgtcatagactcctttgctaatgctatgcaaaaaattctttagagattataacaaatttttcaaatcattccttagataccttgaaaggcaggaagggaagcgtatatacttaagaatacacaggatattttggggggcagagaataaaacgttagttaatccctttgtctgtcaatcacagtctcagttctcttgctttcacattgtacttaaacctcctgctgtgcctcgcatcctatgcttaataaaagaacatgcttgaatatc

SEQ ID NO: 6169 - DNA, 309 bp, Homo sapiens
gggggccgcagtggggccgcggacgcacctgggaccctgcacagcccacggacgccacctgcgcggggaggacgcgcactccagcgcagcgcgtgcggtgcaaagtgaaagtaactgttaaggagcttcagggaaaagggtccagggttcccagtaggggccggcccccttggtgggcctcgggtccagcgggggtcacctggtggcttcccggcgcgccctctgctgttcaggatgcagcactgcgcggcgcggcgagggcaaagcggcctcatccccgccaaaaaataaagatgttttaaaaagcgc

SEQ ID NO: 6170 - DNA, 40 bp, Homo sapiens
caaaagaaggaaaaaataaaagatcttgaatagtctcatc

SEQ ID NO: 6171 - DNA, 84 bp, Homo sapiens
acctgcgatggccaaggctgtttaagcgacactgggttggaaacacttggctctctcatgagtattaaaattctatttcaatct

SEQ ID NO: 6172 - DNA, 44 bp, Homo sapiens
tgaacatgaaaggaaaataaaaattcctcacagtcatcttttta

SEQ ID NO: 6173 - DNA, 2376 bp, Homo sapiens
aactaacggtggagtccatgtgtgaaatggcatctaccatttcctctggattaaaactacggactggggacaacagtattaattcgattgaatgtggctgatgatgcagttgcttagcttctttgtgtttctttgccttttgtacttgtaaacagaaatttgcgtataaatgtgagtgtattataaagtttgagatgttgatctaaattgtttttgtgttgcctacatttgccttttcacagctagtcttttcatgttaaaaaaaaaaatgtatttcatatctataaaacctatatagccatttagctgaagcccagcttaccaggttcaagggtacaaacttctcaaatcttcaaaacattttagtcaaagtgtaatatacttaaactgcacctaaaatatctttggcactgcttgttagaaattcctgattcctgttactaatcactaaagaaaccggatgctgccaccgtaggatttaagcagtagtgcttccatgctcttaagactcctgctgcctggaccttcgtcagctttgacacctcttttctgatttaaagacaccaaggaaaactacaactgtctttagctttgaagcagttttcatgtaatcattgccacctcttcgctacatgaactactattgataccagcatacaagtgtacagcactttacacacaagaggtttattgatgtaaaattatcggctagggaagcagcagcgggccaggtgtggtggcttacccctgtaatcccagcactttgggaggccaaagcaggacgatcacttgagcccaggagttcaacaccagcttgggcaacgtaagaagaccgtgtctctggaatttttttttttttttaattagccaggcacagtggcatgcgcctgtgatcccagctacttggaaggctgaggtgagaggatcactcgaggagattggggctgccatgagccatggtcttggcactgtactccaacctgggtaacagggcaagaccctatctcaaaaaaaaaaaaagtcgccagcaacaagcacgtagtgtagtgttcctgctaaatgagcgtaggttatccaaaccttgggaacagggagttatggaaacatgcctatgacttcatcttggggtgtgtcctatgaagatcctttctggtctccacagtaggccagagttgggggctctggagctgtttccccaagtgcatccacaagctggatctgagttttgtcactctaaaattaaacaagaaaaaaagtgggaaaagggcatcccccattaggtttcaatactttgcacttctactaagcttgatagggcaggagtgcaatctacaattattttaaagtgaatttccttccattcaccattctttatcttttctttgaataagaaaaagtatctagcaaggatattacttgtgccttgaggctagcaattataggatagattcatctaaaatatggtattctgcattttggttttttttcttaagtgaataataccagtcttcaaagaaaacaaggtgaagacctattgcttcaataatcaagaatgctttgtgtgttttgaggtaggagcatgatcaagtatgctttggggattttctgtatttaggagatcctggattcttaattgttggctaagttccagtcaagtaggaatcagtgcagcctgtaagttctccacattgacacacacacacacacacacacacacacacgacatgctcctttctgtggcacatgcctgtattactgaaagctaaatcctcaaaacctagtaaggggactaatgattcattaaagtaaattgatggttttgctactaattcctatcccatacatttgacacaaaagaagtgttggtaatggataaataacatatcccgggcagatgagctcaacctagtaggtaagagtttggtttggtcacagttgcctatgagtgtgggtttcaaaagaaacataaagccttaacttagaatttcattatgttttagaatcatcactgccttaatattcaagcatctatttaagtcctaataaaggagaaatgcatgtttatggcttttttgtaaatataaatgcagtgatctatggcttaaaaaatttgtttctgtgacaatgtttgtaaatctagccaatagagtcatttacagaagaaaaatgagcatgtaataatacaagaactgtttccccctcaaaacctgaacctgaattatttgtaaaaactgaaatttaatgattaaagagaagccagaattgtacccttttttgtgaattcttgaacgtactcataaatatgacttattgtattgccttaagttttcactcattgtcttttgaaagccatatgataaaatgattttatttaat

SEQ ID NO: 6174 - DNA, 565 bp, Homo sapiens
tggtgttggggtttgggtaggggaggggagctcggctgtcagaactccatggatatgtttctttggatggaggggagggcctttgttaccttttgcacttattctttctgtgggtgctttgacaagggcatggcaagagagcttgtcagtatcatttctttcattttattttggctgtaaaaattttgtttgaaagtcaaacatttgaacatcaaatatgtattgattagatccagtccttctaagaaacctcctttcctttaacaaaaagaccttgaccatgaatcagagattgtattcaatgacattatcatcatttttagaacgagccactaacctattagagaagaggcagataattatttatcattgtgccttcctctgtctctttctctttcctttgctccctcccatgtttctggtggactaaattgtgtatctgggagttctcactttctagccaggcctgatgagttaagttacatgaccaggaaggttatgccactttgtggtcattccatgcaagtcatggcgtaatataaaataataaaaactttaaagtctg

SEQ ID NO: 6175 - DNA, 2739 bp, Homo sapiens
ggaggaagcagagcagagtgcgagatcctgacccaagagcaccataacatagctccgaaagggagagcagagatggcagctgaaactcactctgtgctgggctttggtatggtaactctttggtggttttatgatgcttacaaacttgagctttagctcttgtttgggagaacacgtaactgttgaaaaactacctgggaggagtgagttcctccagttaaatgtggctgtagatgttggaggctagggaggctagtaaatatcaaaaggaaaagggagtgggaattgctatcatgtaaaatatcaaagttaaaatactaaggtgcattttccctgaagggaactcatgtctgactgctgtattcaaatacgtagctttggtaacaaacaaaatccgtatatgcaaatcaacatatccaaacatgccaagactgcttttccactgcacttggaaggatatattatgcctaaccctgcccaacaaattaaggtttgtgcctaaaatgttagattggactgtatgccagttagtctccatttattcctagtactctgtcctaagaatctttttaaaactatatcatgatgaattgaaatgaagataaaattgctcttttgtaactttatcttagtaatgtaaagattcagtaaattgatgagtcaggttgcagccctcatgtgaactgaaagaagttgctcgcttctgtgttgacttagatcaagacacgtcacgcatcctttctggggtagtacctgtggagccgggaagggtctcctgcagtgccattctgccttctcaatgagcaaaaccattttctaagtatgaggatattagtgagtaggagattttataaaagaaagacctgagtcagacaaataataaaggtctgctgtggctaaaaaagcaaaaacaaaaaagctatccagacaaaatacatagggatcagaaactttttcatataacctgtctgaaagcacacaaagtcttgtttactactgtttagggtttgaaaacttgtcttagaatgcgaatctgtgttaagaatctagtctttgtaatagaagtttcccagtggcattcactagtgagagttttagacaaattatgttacgagtaaagtttggctggtagaataaactacctcaacttaatttcattctgttcatagtagagcaaattaatcttttcctccttccctcctttcctatctctcattctcacctcaacccactttaccccacttctcattgggggaaaaatgtctttcgttcgtggaacgtatcttgtaagatattttgttttccacttgaattacaccaccctagtgtgaaatcggggacttcaaagtgcttgattccttcctaaattgaattttatgcaatgtcaaatttctaatcaatttaatatacagtacttcatttttaattgttttctaaaaaaaaggttttttttttccttttggaatatggctgtaagaagcagcattttgtcttattaacacatgtataaaggtatcctttggttttaagtcgagaacaggaatttcttctagaaacttcctgtatggaacgtttatatgcaattaacatgcatatgaaaaacatcacttacgttctcccacccatagacataaaaaagggtgacctgtgattttttttcttatacctgctggaagtcagtacaatgcgtcaaaagttgctgaaagatgctgtgcctatggggttctagagagtgttgagtgtggtacattaactctccattttagccagaagatacctgataagagaaggtgtaaggtttttatcttatatgccagaggcaccaggccagatgtgccgcacagtcatgtaattcaatcatgtttaatatgtcagtcaaaaccaaattcagaattgttttgtgtaccagtcagctgttgtctgcacattttcgtagtgacagtgtggagatctttttaatgaaagcaaactatgtggcctctgcaaagaaaggaagatttttctttttacaactagatattagttttagaggaaggaaatagctgaaaaactaaatttgctttggtgaaatgtcctgtacagaacagtaccttggcattcagcagctgtaattggggaacattaaaacagtaactgacatccagttaaagccacgatcgtcagcaattctccttttttaatttctgatatttaaagttttttttccagtctacaccaggcctctccaaggagacagttcattatttaggagtgaatgtgttcctcttgcaatattatcagtacctgcatgacttggtaaattcattttataaaaatagtgttttttttttttaatttcagttcattgactctataactgcagaaattagataatgttttataaaataaatttgccacataatatgggatgcaataaccaacaaagctgctaagtgccaaactgttattttactatatataaatattaaaatattgtgttgaagtatagggatgtatttaattttactatgctccaacattaatcatgactcttttgtaaattacagttatttcagtattgtaaaataaatgttgactcatttcatgcaggtttgtgttttaacattccacttatgccttgaaacatcatttcttgataactttttgatacttctttcttgataaggcacttttaccaggtgtgtgttggaattggtggctcaggataggtcttaaattttaaatacaaatatctttggg

SEQ ID NO: 6176 - DNA, 1961 bp, Homo sapiens
agctcccagctcaaggcaggaagacgtttgcaaccgcgacaaaataactcttgactaacagccgcagagcagccggtcctggggtcccaccctggtgccctggctgtgagatagatggggagtctttctgggggcggaggggggagggggtggggagggggcccacaagcacgcccagcccccgccgaattcttttagcttcgtaattggaacctttgacctgatctaaagtggactttgtagcaacaagaggagcatcagcgggtcggggaggggtttgggggtgggctggggggtgggggaccctttgtggattttctttgcctttgtgtttgatgccgtcgtgtgggaaaagtcaactccgatgccaccattgcgggccggacgaaggatgctttcttcctagaggctccgagctgagctgcgaactcgccccccgcccttgggacaagaagacccagtcacatcactgcacccgtcctgtgtcctcaccattgctatgcaaagtgattcttgttgtacataagatttaaataatgcacctatttaagacatgttgacaaattgcgggtctgggacccgcctcttatttatgaagtctttgaccgtcccccccgcccgaccccaccgccctcccgcccccacctggcgtgtagtactgtataaaccagtcagctgtcgggttagtggtagtattattgttatttttttaaaggaaacaaacagacaacaaaaagaagaaaaaaaaaaagaacctccttggaaaaattaattgctttttcgtaatggattctctatgctaatgctctctcgtctgtctgtctgtctgcccactcccccacccaccactgtgcgtttctgatttccaaatgtctccaactccctcacgaggtggggctcaggctggaggaggagggattaagatccccttgctccactaaggcccaagctctttctctcggcaccttttagacttgaatgggaggctgctaacccgccctctccagtccaccccggtaaaagagctgttccccacccccagggagctcctgtccctgtcagcctttgctgtcccctgtccccaacggagactctgtcacccctgggctccccctgccatcgtgtgcttcacgtggccccatgcatgcccgcctctctgcatggtctcttgggaaaagagagatgtgtcgcctccgccagtccgactgccctccccaccccacccccgccaccccccacatgtgaccactgcaacgaagacactccttctgtccccacctgctccgaagacaaaccaacctccgtttcttttataaacagtcggctttttcttaataagccctcactgtacagaacagcccgttgatggtttatttggggtccccctctccccccagcccttttttctgttggtttagcacaaatacttccctcctccggcacctccaaacctaccccacagtcagtgtacttgttttatatatatttaatcttattcaatggaaaccatgcttttgtcgttttatactttgctaggtagactttattacccccccactatgccctcatttttttaaaaaaggaaaaaaaaaagaaactgggttccagtcttaattcattttccgtgccaggttttatttcgtgtgtgtgtgagtgtgttctgttttgtgttttgttttttgttgttgtttttagttgtttggttttcttttctttcccccctccggtcccatacttcacagcactctggtgcgggaagaagcagaagcaaaaaaaataaaaataaaaaaataaataaaaataaaaaaaataaaaaaggaaaaaaaaaaaagaagaaacaagacatgccacctttcccctcgcactgttgcttttcctgatggttaatactactgtcacgtagctgtgtacaaagagatgtgaaatactttcaggcaaaaataaactgtaagtgactcatc

SEQ ID NO: 6177 - DNA, 295 bp, Homo sapiens
aagctggggtatgtgtgtaagggtattgtgtgtgtgcgcatgtgtgtttgcatgtaggagaacgtgccctattcacactctgggaagacgctaatctgtgacatcttttcttcaagcctgccatcaaggacatttcttaagacccaactggcatgagttggggtaatttcctattattttcatcttggacaactttcttaacttatattctttatagaggattccccaaaatgtgctcctcatttttggcctctcatgttccaaacctcattgaataaaagcaatgaaaaccttg

SEQ ID NO: 6178 - DNA, 96 bp, Homo sapiens
gcaatggaagccctcaaagaagtcggaatgtcatagtcttgaaatgaaagggaaactgggaaactgggtttctcattaaagttgtttcccactctg

SEQ ID NO: 6179 - DNA, 1562 bp, Homo sapiens
gaactcctgacgtctgaagcttgactcccaagtttccatagcaacaggaaaaaaaaaaatctatccaaatctgaagattgcggtttacagctatcgaacttcacaactaggcctcaattgttccggttttttattttctttacaatttcacttagtctgtacttcatcattttgacagcatcttcctccctcctttaattaatggaatcttctgaattttccctgaatgtttaaagatcatgacatatgacttgatcttctgggagcaggaacaatgactactttttctggtgtgttaacatgtcgctagccagtgctccaggcacccagctttgtctgtgggttagtattggtgtatgtatgagtatctgtatgtatatatacacggtatttatagagagagactatcctggagaagcctcgttttgatgccattcttccttgcaaggttaagcaaggtgggtggaaactaagacacctgaaccctccagggcctcccgcatcaaggtcagcatgaggacagaccacagagctgtcacttttgctccgaagctacttctccactgtcccgttcagtctgaatgctgccacaaccagccaggcaggtccacagagagggagagcagagaaagaagtcctttctctttattgagttcgaggactacaaccaatttacactgccatctgatgccgtgatcctgagccaaggaggtgaggagcagagcaggcaatttcaccaccaaatgccaagaaaagggctgacattttctttcatgggcaccaacctgcatttgtatgtgtcccgaatccacagtcgtactgattctaatggggacacagatcatggtagagaatctctccctcctcagtaaatgtacaactgcacctgtcatcatggaggtcatacatgcatacaaagaggtgtacaggtaccatcttgtatacacatatatacccacatgtacagacatacatttatgcacattcacgctgtttgtttcatatatacaggcataaaatagagtaaatacaggtagttttaaaagtacccttttgtgtgaattgactaccgttgtttgcaaacccgaaaataaaagacgttcattatgtatgaaaagtaactgatttgtattctgtgagcatgtaaaagcggaaagttagtgcttgttctaagattaccttcttgttgataaaccataaatgaatcatcaaagctcacaccaaatttttctatcaaataaaactagtgacagcttgtggctttttattagagctcgccacgaactagggtaaggtgagtgtcttagcatattttaatgcagttgcttactaaaggttttaaccgcacatgcacacacacacgctttcttatgcaatctatgtttgcacttgtgctttcagttagccttctgtaggaagtagaagtcatatgttgtctttgttgtagtgaaattatacagatagagttccatatattgtatttgtttcaatggtaaatccttttggaacatatagaatgcagagatttttttttccattaaaataaatgggtattggtggtt

SEQ ID NO: 6180 - DNA, 1569 bp, Homo sapiens
gttgctaataatttatactggaatctggcatttttccaagccaagagaagatcgaatggctttttgcagctaactactatgtgtagacaggttttatattataaagtatgcattcttatcacctagtatatagttagtttgtagagtgatttccccccagtttcttgaacatggtatcttcacatcttggaccttggtcagttgtgctattcattattaaacactaaaactttggcggttcttgcataacattgtcagattttttagtgtatttctgtgaagtcattttttttcttgtcattccttttgtagtagttgctgtttggataaaagttgatgtgtgattttttattaaacaaatagtaaacccttcaattatagttagtcttggtgaagtaagatgtttgtagactttagagttctttaattcttggcacaacgtgactgttgagctaacaccaaatagtgtgttggcaatacttttcaaatggctgaaaacacctaaaaattgttcattcagaaatatctgtcactgctctgttgccaaaactcagaatagaacttagacgtatgtctgagtccctgagatcacatgctaaagtcgatgaaaagtaaccactgccactgtcttgtgtcagaacttttacagtacagaaaataacagaatagccttctgtaatgaggcgtttgttagagttttgcatgagattctaatacttcagtaggaccctacctacgtggttcatctacaatggttaccataaaaaatctggcaggattttaaaactcaatcagtctttcctttgagctagtgacttgaaaagaaagagagaaggaaaagagaccatattaagtccatgccagttgcttggctagaatatgatcaacgacttgtagtagactcaagtttttaaaaaacactattttacttaaactgtttcttatctaaattcttgcagagtgtcaatgttatcattgattatagaagacagggataatacctttatctctggccactcaaaaatgcagtgccaggagtgctaaacctagaggccaatactgatgacctggaaggtgatccatatgattgtcaccacaaagtgcttttacacaaaaacttgaaaatttgaaaaacatgatttttttaagtttctcatctcaccagtcttggtgtttatattgcaaatctatcaaagtaagaaataatttgtgctgtatacaaattacatggggaacataaaggagtgagatccttctgtgataaaatgaattcaccactctggttacccaactacagaacctcctttgatcaggccagtaggttgtgatgcaggctggagcccccgaatgccccacacacactgcagcattgaccagaccatccgaaacctgcgtccctggtgatgttctcaagcctcggaagtggcaaatggaaatgatatggccggttgcggttgtaggagagttgtgacttaggcaggagtcgacctcctcaagtaatggaacgatttcaaaggcaggctgccctgaccaaaaatatctgccatgaataaaggtgcctgaaatcct

SEQ ID NO: 6181 - DNA, 691 bp, Homo sapiens
cagtaaacctctcctaaagcacagggccccggctaagaaaacgatcattttcaggaggggccgggagttatgtatctgaagcagctttccaagcaaagccaaagttgactgtgttcttgtcccgcagccggtccacactgtgaggccaggcctcaacttccctcaccctgggcgtgacatgcacccagtgcaagacggttgtgggtgcgggtgcacacaaatgagtgggttgctgtgctgtctccggaagattctgtcgttgcccttggcctggctccctgcccggggctggtgctgtggtacctacatcttcaggaagctgtgcagcctctgccattgccatcccagggggatctggcatcctcctaaggaccggggcgcgtggcccagataagaataggtgttcctttgtgctcataaaacagaatgcggcgatggttgctttagccgtttctcaccatgcaatgcagagggacaaagggctgtgctacacttcccagttacattctgaagctcataaatgtatgagaaggtttgtgattttgcacaaggtgtgtgtagtaagttaaattgttgaacacaaaaatgttgctgcttgaggcataagttggataataggctttaaatgatcagggattcaggttcataatgaacttcacagtaaagaacacgtttgttctgtaaagcattg

SEQ ID NO: 6182 - DNA, 326 bp, Homo sapiens
cactcggccagacccgctggctcccaggccctgagaggacagagatgaccacatccctgctggatgcaggacccgtccaaagatgccccggggaggggtgtcagcccacgttgctggcctttggggtcaagaggagtagggatcccaggctgccctggacttagaccagtgtctgaggtggtaacagcggccgcaggccagggttggcctagacctgggatttgtggggaaagctgctggtgtgaccagctgagcacccagccaggagacctgcagccctgcgccttccagaagcaggtcccaaataaagccagtgcccacctgct

SEQ ID NO: 6183 - DNA, 426 bp, Homo sapiens
cagcctcccagaggcccgtggaggagcccaccagccccttcttcttgtgaaggaaatcccgtttttttctagacagacactttggtgcagaagcttcttttcaatccatcctccacaagaaggtgtttccctgttgttaagtgaaggaggccgcccctgcccccacctgagaaggcagagcagtgtctgtgctgccaggtcctggtgaagcccaaggttgaagggggcggcttcctggagccagcacccctgcctcctggtcctggcctctcccctacccctcacatggccacgcatgacccacactgaccacaccctgccctcttcggtgacattcttctacctagtaggagtcatgcccctgtagtgcccaacctagccaggtagccaccactgtgcccaggcgccaaataaaccctggttggg

SEQ ID NO: 6184 - DNA, 76 bp, Homo sapiens
ttttccccagttatatgtagcataaatggtttaatcataaatgtctcccttaggcatgataaacattttaacaccc

SEQ ID NO: 6185 - DNA, 192 bp, Homo sapiens
agccagcctcggcgggaccgaggtcccggagccaagctgtacccctgctgggggagtgccctatctgaggagcgttgtggggagaacatgggttgtgcggggtgaaactggggctggagggaaggaggagcctgctgtggttgggaggcggctgctgcacgtttgggcttgaataaagaagtatttctggtt

SEQ ID NO: 6186 - DNA, 519 bp, Homo sapiens
ctaggttgcaagaacattcctctactttctgctaagccttggaaacagttgggaaaagtagtttgaccctcacagttcacattcagctcagcagagcaagaccccagagatgcttagagacaggacacctggccatcaaacccagtttggcccagcctggttgggtgactttgtgggagccacttaacagctctgggtccctgttttaccatcctgggagcaaggccctgcagctccacgagacctttaccccgggaagaagccgccacccatgaaagcatttctgaagcccctttctaagacaaggctcagcatcttgatatttttgacagattcctcccaagtctggctctgggaggtatgtacccatctcaaatgttcccaagataaattcatccttcaggaaatggaaatgaacttgcttactaatgtgtgattcctagttgtagccaccggatgtgctgaggcctaaatgttagcaggtgggaggaggccacagaacaataaaaacaaccaaat

SEQ ID NO: 6187 - DNA, 454 bp, Homo sapiens
tggaccgcactccgcggcaccttccctaatcatctcgatctggttgtgactgtggcccctgccgtgtctcctcgtcaggggagacttttaggaggccgcagccttccatcaccggatcagtttttcctcttaggaaagctgcaggaacctcgtgggctccagggacccaggcccacatccatccagcgttcccgctggctgtgggacagacagggaggggcctgtacagaaacaccacactgtttattaaatcacaatgatttttattaaccatgtctaactacgtatctgtgccacagcttgcagtgaggcaggccactcgtggcagatacaaggggctcctgagaggcagtgggtaggatggtcacactctgcccattgccctcctggaggccccatttcctcatcataaaatgagggacttttaaataaagtgctatgccgggggataatt

SEQ ID NO: 6188 - DNA, 176 bp, Homo sapiens
ccctagctgcgcctcttgggaccatcctcaccgtcacctcccagggctctgtagaccagcagcaacttcttagtattccggaaacattatgtacaacttagcagctttttttacttttatgattcttggtatttctatgatatcacagtaaccaattaaatactatctgtaacttt

SEQ ID NO: 6189 - DNA, 837 bp, Homo sapiens
accctgtgtgcgctgtgtgtgcgcccagtgcccgcttcgtaggacaccacctcacactcacttcccgcctctctttagtggctctttagagagaaactctttctccctttgcaaaaatgggctagaatgaaaaggagatgccttggggttcgtgcacaacacagcttctgttgactctaacttccaaatcaaaatcatttggttgaaacagactgttgcttgattttagaaaatacacaaaaacccatatttctgaaataatgctgattcctgagataagaaagtggatttgatccccagtctcattgcttagtagaataaatcctgcaccagcaacaacacttgtaaatttgtgaaaatgaattttatctttccttaaaaaagaaattttttaatccatcacacttttcttccctaccctttagtttttgataaatgataaaaatgagccagttatcaaagaagaactagttcttacttcaaaagaaaaataaacataaaaaataagttgctggttcctaacaggaaaaattttaataattgtactgagagaaactgcttacgtacacattgcagatcaaatatttggagttaaaatgttagtctacatagatgggtgattgtaactttattgccattaaaagatttcaaattgcattcatgcttctgtgtacacataatgaaaaatgggcaaataatgaagatctctccttcagtctgctctgtttaattctgctgtctgctcttctctaatgctgcgtccctaattgtacacagtttagtgatatctaggagtataaagttgtcgcccatcaataaaaatcacaaagttggttt

SEQ ID NO: 6190 - DNA, 2866 bp, Homo sapiens
atttccagcaccaggggagaaggggcgtcttcaggagggcttcggggttttgcttttatttttattttgtcattgcggggtatatggagagtcaggaaacttcctttgactgatgttcagtgtccatcactttgtggcctgtgggtgaggtgacatctcatcccctcactgaagcaacagcatcccaaggtgctcagccggactccctggtgcctgatcctgctggggcctgggggtctccatctggacgtcctctctcctttagagatctgagctgtctcttaaaggggacagttgcccaaaatgttccttgctatgtgttcttctgttggtggaggaagttgatttcaacctccctgccaaaagaacaaaccatttgaagctcacaattgtgaagcattcacggcgtcggaagaggccttttgagcaagcgccaatgagtttcaggaatgaagtagaaggtagttatttaaaaataaaaaacacagtccgtccctaccaatagaggaaaatggttttaatgtttgctggtcagacagacaaatgggctagagtaagagggctgcgggtatgagagaccccggctccgccctggcacgtgtccttgctggcggcccgccacaggcccccttcaatggccgcattcaggatggctctatacacagcagtgctggtttatgtagagttcagcagtcacttcagagatgtatcttgtctttgtcaggcccttcgtcttcatggcccacctgttttctgccgtgacctttggtcccattgaggactaaggatcgggaccctttctttaccccctacccgttgtggctcccaccctgcctcggactggtttacgtgtcctggttcacacccaggacttttctttgcaagcgaacctgtttgaagcccaagtcttaactcctggtctcgtaaggttccactgagacgagatgtctgagaacaaccaaagaaggcctgctctttgctgcttttaaaaaatgacaattaaatgtgcagattccccacgcacccgatgacctattttttcagccgtgggaggaatggagtctttggtacattcctcaccgaggttagcagctcagtttgtggttatgaaaccgtctgtggcctcatgacagcgagagatgggaatacactagaaggatctcttttcctgttttcgtgaaacgactcttgccaaacgttcccgaggcgccaaggagtgtagtacaccctggctgccatcactctataaaagtgcttcatgagcccagaccaaaagcccacagtgaaatgaagtacccttttgtaaatagcatttttttgcagaaggtgaaaattccactctctaccaccgggccagccaatagatcactttggtgaatgctagtttcaaatttgattcaaaatatttcttaggtgaaagaactagcagaaagtcaaaaactaagatactgtagactggacaagaaattctacctgggcacctaggtgatgccttctttctttgattgcctttctaataaatgcagaatctgaaggtaaataggtttaaaacaaaacaaaaacccacccctttaaggagttggtaaaaagcagttcaactcttagcttgactgagctaaaattcacaggactacgtgctttgtgcattgtagtctagtcgtaattcataggtactgactcctcagccccaaatgtcggagaggaagaattcggtcagcctgtcaggtcgtgagtccagttaccaccaaacatctgggaaacttctgggtgctgggtgctctgctgctggacttttgtggctgtgtctgtgtctgcaagataaattagatcgccctgtggggtttgcagaattagtgaagggtccaggacgatcccagtgggctcgcttccaaagcatcccactcaagggagacttgaaacttccagtgtgagttgaccccatcatttaaaaataaagtccccgggttccttaatgcctccttcactgggccttcctagcaggatagaaagtccttgcccagagcaggacctggctgtctttttttttttttttttttttttcccgagaccaagtttcactctgttgcccaaggtagagtgcagtggcgtgatctctgctcattgcaactgccgcctcccgggttcaagcaattctcatgcatcagcctcccaagtacctgggactacaggcgtgagctaccatgcccggctaatttttgtatttttagtagagatggggtttcattatgttggccaggctggtctcgaactccttacctcaggtgatccacccaccttggcctcccgaagtgctgggattacaggcatgagccactgcgcccggccatggacctggctgtctttatcatccccacaaacattttgaaactggaatatttgtcttcagaaaatggaaacaagactataaatgataagccctgtccctagcaccacctctcctgtgtgtggaatagaggcccctcgtgctaccaacacttaccctgtgtttaaaaagatcttgtaccaagccaacggcgttcctggctctcctgcccacaggatgaacattttcggcttccttaggagttttgccctaccgtattccaaagcgtgtgctggtttctcatattgtctgtaggctcactcagcccgcagtttatgtgtgtgcttttttctatgaaaaatgatgtattttgctacttcctgtgtacaaagttttattgtaaatgttttttgtgctttgcatgaacaggggccacgttgttgcaattgtttcagtagaactggtttgatttctaaaatgttcctgtaacatatcttttatgaacaaatctgaacaatttgtgaaataaaacattgaaaacca

SEQ ID NO: 6191 - DNA, 5895 bp, Homo sapiens
gccccagaggtcgcactccgcaggaggactgaggccatgtgccattctcccgggcccagcgcccggccgtcaccccacccgatgacctgcatgaagccagcagcacccagagccactcctgctgccctagaactagcggttagaagaatccgctgttcctccctcatctcctctgcctgtgtctgcgacccccatccatgtgccaaagtgtcccttgggtcacacagctaaagccgaggtgaccagttgtaccccgagtgccaggcttgtgagatgagaccaagagggaggaggggaaggactccatgggccatcgtgggccaagggctggcgagggtgggggcgggcaagggatgcaggcaggacagccatgaggtggggctgcagccggcacacccagtggtggagggccggcgctgccactcacggtgggtggccgtgggccaccttccctgcaatgggtgcacacgcggctcccatccagccctctcagcgtggggctgtggctggtcctcactattccccagtctcccgctgtggggcaggaacaggaagtgacgggaaccttgaggaggaaacgcctgtgttagggagagagtgggtgcggtgtagaggatgctcttggccggctggagcaagacctggctcccaccagagggacgtgtgtgtgcctgcagacggcccgggagctgtgtgtctccgccagagtcacagcagtgccgaggtgtccgcggcagaccacacagaccgtctgaaatgcgcccgcctggcggacagctcccttctgaagcagagaagcctccatggtcacgaagcagcgttgtgctgtgtgtccctcgcaagaagcacaggaaagagaagtttctttagtagccactagacaaccaccctttctgaaagcaaacagtgctgctctttattccagacaaggcaggaaagtctgagttgggagtgacagtggctggagagaagcagatctgtgcaacgtgcagggcaagccagtggcgtggcctctgcctctaagcgctgagcattgggccccttccccaccagacctttgtagctcctccagcctctgcagagactcccttcacctcgcacttactgcctgggaaccacggcccttctcttctgtgggtctgtaccaggtactccaggccagcccatgggcccggggcctgaccccaacacctgcatgctgggtccagagccttctgtttcaccgtgcgtggacactgctaggccgcctggggtcccctgcctcctgcctgtcgctgccgtggtccctgactgcgaaataggcccgcggggctctccctcctcctgccatcctcccctcccgcccttcctggctacctcctctgacatgcggtcagataagtcccgtcttgtttgtgagtaccacagaaacgcctgagagtcacttacccggccactgcttggaaggtttccctccggggaatgcctccctggaatgttccagagacggaacattctctagagacaacagtctgtgctgcagattggttggatcacagaatgtgtgtctggggcattatctgaaacgtggtgtcatctgatgcatttggaccatatgctgccagactgcagaacgggggagccggggctcagggcccctgactgcatggtgcatgagtgatctcagcctagcgatgccgctggccagaccgtgaccatgctgccagtgtgctcgccatgagctgggtcagggctggggagttgtgcaggctggggtgacccttcccccatcattgggccccaacgggcatgtctccaccgaatccatttagagaaatgtcagagcgagggttgtgtggacacccctcgctctgatgccaactgcagataatacacacctcctgcagcgtccagccacggctccagggcactgctctcctccttgcaccggtgaaactcaggccacactcaagggctgactgtccaggcgctcccttcagccgcctcgtcgtcagcgttcttagtcatgcattattcgtgttagctgaaatgcattcagactttgttctgcggtgcccacaggacttacccctgtatgtacaggatttttgtatgaaagttttgtttgattctgagactctcttgggaacgctggagagcttgtgcacagcctctggaaggaaaggcagcgctgacttcgttgggcttttttccaagcactttaacttcagaaatggtcttgacacttttttctccacatagactcttgaaatagccatttcaggggaggaaagggttggggttttctttgtttgtttgtttgtttccccctttactacctgttcttgtagatctagctcctcagagttggaggaaggctgacagagaaggtctcctctgtgctccatccacacaggatgccggagagacagccccttgtgctgtgagcagagcaggcagtggctctggaggctgcctgtggtctccttccggctgtggctgacagtggctctggccagggttgcttggagaaggctcagtgtgcctgggacagggcttaccacctgccaccaaggtttcctctcttcccccaggacctgggcagagcaggcatgagctgggctgtggtgcagagcaagcagacccagccacactgctcaaaggtccctgcgtggggaggtgtcacaccaggggcacacccagggccacctgggtgtaggagagctctggtggcccctccgtaaactcaggaagtgtcaggtgatttcctagggagaggttcccagtcccagcaggcagaatgcccaaaaccaggagcacgaaggcctgtcatccatggggccattgcaggcactctgccgcccgaccttgagggctgtgccaatcctagtgaaccaaaatgcaaacaactcacacaagtgaaaagctccctgctttgaaaacaggacatgttgacaggcagcatggtatgtttttagcctttgttacagttttagcaacattgatgtctaagaggggccgtggtaatagattgcatctgccctgtgcatgcgcatgtttaaccacaggccagagaactcaattctgatgtcgtaagttctctgtaagtgaaatggggtagactgtatgattttcctattgccaaaagaaagaaagggggccaaacagctctgaaatttccaaaaaatggctagagggagagtccagtttctgagctctgtacccaaattaaaatcctgatgttcaggttaatccaagcaacacgcattgggtttaaaaccagcaccgaggcccagtgggggaatcacagacatcaccaagtctcgtcttctttccttcctgtgagttgaaaccaaacaggcctctcgctcactcctcccagcccagtaatgctgaggagttcagttgtgaggaaagaaggctggagctgtgagattcgcttttccctaggctgttccgcgtgggttaccttatcaccctggagcacttggtattccagacccctgacatgaggaatgcaggttcacactgtaaagagtttgtgaaaggtttcagtctaactggggttccttagctggaagccagggctggaagctacaggcctgaccttcctgggtcccactatctgttggcattttttttttttttttttttttagacggagttttgctcttgttgcccaggctggagtgcagtgacacaatctctactcactgcaacctccacctcccgggttcaagcaattctcctgcctcagcctcctgagtagctgggatgacaggtgcacgccaccacgcccggctaatttttatatttttggtagagatggggtttcaccatgctggccaggctggtctcgaactcctgacctcaggtgatcccccccacctcagcctcccaaagtgctgggattacaggcgtgaggcatcacacctgcctctgttggctttttagttaggaaggatccagctaggcccgtgtggttagatcagctttgttactgaattacctaaaaccagaccacagcacagccagggagcccagtagtgtttccaagaacagtgtggagcttgagaaagagaactttaaaaattagagggtccctttctgcagaggaagggatgctcgcagggtggcagtggcccagccccagcctcagggacggggagggagagccccctctgggcccagcaggcaggtgttctgaggctggtccctcctcagtttccgcagccacaaggcgaaacggccagattctcactcaaggtcgttctcactccttttcctgtcccgtttccagtcccactgagccattcacttctgctgaaccatttttcttaggatgcagccgtctcactcccttgtcctgtaaatcgtgtattcatgttgatgattcttggagataggtttcactttttcccagctgcgtccacaggaaaggggagtcggatgccagctgcaccccgcctggctcgcacaggctaagaccacagacagagcagggcttcccggagccacacaggccacgcaccccaggaacccttgctgccgcgggccaggaacaggaatgtgttggtgcctgagacaccaaatggaagaagcacatcaagactgttctcctgcggccaacactggcccggaagccgccctccatacaggccctcagggggcctgccttctgcgcctcagtcccccgtgcatccctgggcctgggtatcacatgctctccaggaaagggacggaatcaatcctgtgaccgatgggctcgcaaggatgggtgccgccgtgggagccctgcctctggtgctggcaagggattgggtttgtgtgggtgtctctagcctgcagagtgcagtgagtgagagtccttgggagcgcggcgctgcctgtagctgtgcctggggatgcacgtggccacgggatttcagtgggacagcgctcccacaggggctgggggtgggggtggggtttcttagttactgttggaaagggaaaaattcaccatatccaaggggagagacgatgggctgggtttgtttactccaacttcccttctacacccctcctgcaggacagtacgatttggggagaacccagctccccactttatctgcagactctgggacctgacaaaacagtcagagcctgagtgcactgcagcctgaactcccttgagcagcgctataagggactttgcactttaaaaaggggatgcctgtcagtaaatcccctgtgcattgactagaactggggggctgcgcccgctccctccttaatcctagatgatttgctcatgaaatagaggtgggggacgaccgcatgcactctgggaggtgcagccctaaggggtggactccagatctccctgcaagagacagcttggcttggctttggctgttggggaggagtccctgccatcccggtgagcctggggctgttgcttagggtcttctgggtggacacgtggagaaagagaaggcaaacgttggaacactaggaaaagctagaaattcagacaacacacatggatccccttaaaacatgtaaatgtgtcagaacacggttgacctgccgccttcttgaacctggtggcccccgttggaactatcagtggcgtctcccatgcacacgccctctgctttctctttcctagactcgcggtgctcacatccagacattaccttgttggtagcccccaagtggcgtgcagtgacaccagtatcttctctgttgcatttttgcaatcttgtgtcccgctcggtgatgttctacaaactctgttttaaggttgagaaagtttcaagggtgaagatctcaaaacagtgctaaaatcaaaggtgtttgctgtgaagaaaaacatgtgtatatattgcaccttgagttgtcagaaggtagaaactgaaataaactaacttt

SEQ ID NO: 6192 - DNA, 3665 bp, Homo sapiens
cggtttcccttgcactaggccgaacctatagtatagaaatattatctattttattaccttgaatatttaatatttttcactgggaggtttgaagcttacaaaatgagaatgtgccatgcatgaagcaaaggattccaggctccagaaaaaatgaatgaactcaccttgacgtcaatgcaattgaatcaccgttgtcattcagcgagcaaccaatgtaggattgcccacagtttttctttttaaaggtggttttcgcccttcctctcccacattatttcttaatctgaacatgaaggctccattagcaacactaaaacttgatcattaacagccccctgtgcatatgagtggatcaaaccggttctgttctttcttgtgttgccatgttactatgcctcaagcccagtttgcttttgccgcagcgatggggccagtctcattcctccccaggagtgaaacttgcttcagctgaaaaggttgggtgcattgtcagtaaaaagggcttatttgtttcattttactttcctgcaaaattttcttcaaagcaacaagtcctaggagcacacaaagcaacccaaaggcttttccctggaaaagctctttcttacctaaagataaaaccaattcacaaactgaaggtagctttttattactccgtggggagcatgtacagagctctgtgtatacacagcttcacacccaccagattgttactacagtgggttgggttttcatacagacgtaaattttgagagaaaagtcaaaggtgcttcagccttgtactgtgtatatatattaaaaaaaaaacaaagttttgtatgtttttattactttaactattgttataaaaagcctgccatttttaatatgtggtttgggggatttttgtttgtttttcctgtttgggggttttgtttgttgttttggttttttttgggcaaaaaaaaaaaaaaaaccttgcttttagtgtttgtactgctgctggtcaggacattaaaatattgaagtgtttttaaaaattaaagaagaagaaaagtaaaagagcttaccactggcgcctatgcgatcacttcatttttagtttgagttgcaccagaagctgccgtagaaagccatgcgctactgcttacctcctccactccccctgcctgcccccagcatctggacaagctaatagcaaatattacccattgctatcaagggaggagggggtagtctgtagaacccatgtgtgacagtcatgtgcacacatgggcgggggcttttaaaaacctttcaggaagtcaatgatttctgtgattgatataattctaaggtgtctgagagcaggtacagaataggaacttcagaggctttgtttaaacgcaaagctttgtaaaagccacaaggtctgagctgaacccctcctttttgaacttactgtgacaagcacaggaacggtcagaaactgggctcatcacaccaaggcaaagcaacgggcgagtcttcctccttgtcctagttactgcctatggaggcagtgtttagatcaagaaggcctctcttgctcccaagggccctcaccagaggccagggctgccagtcactggtctggggggtggaggcctgagctgagggcagggtgcctgacctgtgtgccggctgctcactgctgtgaccagcagccgagcccttggccctagcccttgctgcgcagaacagcttgctggcagctggcatcgtgtcgctttatctgcccccgcacagtttgctttgtacgtctgccaagaatcttccagttattagcaaactcagacgaatgtaccgccagtattatcagcagtcaacaagcaccttcctctccacagaagcagctggaagagaactcgaggggctgtgctgcaggcctcccctcgaaagacactgggaggtcagcatgttccacaggtgttcagagggagtctgctacaaactatcagggcaaaatctcactggatttctccactgaaaacctacttgaggtttctggtctgaaggcttaagagtcacatcttagcacttccgctctcaggcctcctcctccatcacagatgtctggatgcttttggaaatggccttggctaaagtaaaagggaaaagtagatccgataacttaaaaacgtagctcatcccttaccatccaaggggcactcccttggttggattttctatgacagcacaggggacaggtggcacaccatgagaggtctgcccagggtgggagcagtgtcactgtgctagcaatagttggcttctcccctgtcagtggaaaccccacttctgcccggcccttgagcttcttgcccactgtctccccatccttccacctacttgtggcgatctgagtactctactcttgctcaagaagtaatacgacaatcagaatacaaaccagtaaggcaacacgaataaactaagaaaaaggtaagaactgtctcaaaaacgaaagcacaccacccaagacacagtacccagtcatggtttccccatccaactattagtttcatactttgaaaacttactttcagattattctcaaagaacacagtagcacctaaatctgttttcaattgggcttaaaaattgacatgcaatctcttaagttttttgttcagctacttcacactgagtacctcaaatctgctctggagtcgattatgccacctgtgtgtcaggatgcacctgaaagccctcggctcggtccttagaccatcttcctacattacctggaagggagctgccatctgtccctctgcagagggataccttccaatagtaaattatctggttcctcactgaaacaagttatttttgcttcatatagtcagagtcagactgacatgataaaatatcatgttcctaatctgttgtctcagataagtgaccaagacgggactttccacattttagtctacattctaatcttaaaggaataaagcactgaattgggactaacattctgataggttgcacccttaagagtattcagagagcatcaaaaggagcccacaccttcagcagtgaaggattctaacacagggaatctgcagtttgtagcagaatggtattttcctcaagtagctcataatactgccaaatctcaaaagttaagctgaatttcacaccagatcctacccctttccctgagccacatgtttcacacaagtgtagaaaatgccagggatccaccacaagatggagatggtcagcacaaaccgattctgttcctctttaaagtgtatattagccacttagcaatctctatattctttcaagtaaccaagctgttgactttcttactacttgcagtagcctgtccccaacttttccatccagtgcttaacctaaaaaactccttaactctgccttgacctgaggaagaccatgctaactggtgttattttgtatgtaccctgtgcttaattctataacagtaaaccccatacgcaggtgggagggaggaacaccggtgcctcggtcactctgggggcagtttagatgctgtgaaattaaacctgttctaagtgtacttgtttgaattaattgtattgtaatattatttgttgaatgtagtaattaggtatttatgaatatattgctgtaatttctgacaacatccaaaaaataaaatcttcctaaattatgtt

SEQ ID NO: 6193 - DNA, 125 bp, Homo sapiens
gagatgctggcctgcgcctgcacctgcgcctggctctgtcaccgccatgcaactccatgcctatttactggaaacctgttatgccaaacagttgtaccactgctaataaatgaccagtttacctg

SEQ ID NO: 6194 - DNA, 1321 bp, Homo sapiens
gtgcgtcgcttgggcgccccaccccgtctgcgtcctgcatccatctccctgttacagtggcccgcatcatgattaaagaatgtggatccctctgtctggggtgggatgccttactttgcacttaatttaataagggcattctcggaggagtagacgtttaatacgaagtggcggcatagccctgccgagatgtcggtgatggcctggatgctgtaaccacaacctgtggctaaaaattttattttctatcctttacccgtcattatcattagttgctatgattctttctgcattttcggttaactatcatttccaaagacttgtcattcagtaatattagcagatagctgcttcgataaaggaatttggagtttaaaaatcaacttgtgaaaacaaggttgtttttgtctttatcgtttgttagagttatagatttatgatttcataggcttgattctatgtgaaatatctttttacttttatgcattttaataagatttaaaaatatttagattaaagccccctttaatgagtacaagaaaaactcttggcttgttagaagaaagtatattctttctagaatttggtgcaggaatatgtgttcatatccaggcaaacgggtgtgtttttatcttcagacaatgaaaccttctcctctggggctttgttgccaggaagattagaactaaatttatttttttcatttctgtcatgaaatcattccagatacctcttttcttctttccaaatggttttcacatgtgtttgaaatatttgtacttcgaattgtcggattttccatgtcctcctttctcctttgtgcccagcctgagtcagcaccaatcccgcattcagaacctcccagtgaaagggcagccttcattttgagaaggtggaaggtgttagggtttgggagacagctcatccaatctcccaagtctcatggtggatttgtgactgtgagagtttccggtttaaaatctgaaaagccagatatgcctgtttccttttcccagcaccatgcctgtggaggggacagtcagacccagaggtcctttacgtgtggatggagttcacaggcgaatagaggagaggaccaggggacgtggcttgtcccttttgtccaacaaagcattatatttttaagaatggcagacctgtttgctgaagtgttcataagataacaataggcttgaatctccaattcaaatgaatgtcaaagcacatatctttaatatgctgaatgaatatttatttttgtatccattaaaacagtatattgatctcttttattctttattaaaataaaatgctctttttt

SEQ ID NO: 6195 - DNA, 1378 bp, Homo sapiens
ggctgccgccgcaggccctcctggtgcaggcaggcgggtcacagggaccctggaccggcacaagaaactgctttcttctcgaggtataaccgtcggcagaagaaaagggttccacctctccccaaccggagtttttggcaaggagtccccaatgcaaagacacagcgctgcggttggcacctccttcctcactccttcaaaattgttaagaaatgttagtggtgggtctgatctgactgcagccatcggtaaataaaagtttttgatcctgttgaacccgcctgagacggtgctgtgcaggggaaagcccccgcacccacacaggaattctgctgaggtcccccctccttccggccaatggcagaagtgggggaaaatttttagaagaaaagcaaacatgtgagaccaatcattatcaaatacttttattttttggttgagtatttatctttttattttttattttttttttgaaagaatgtcttggaatgcgcaagtctccctttagagccgtcttttgcagggagcgggaagtgacaagagctcagatctccctcccgatctccctccccacctccgaagtctcctccgtggaccacaggtggatctttgtgcgaacaacttgcatttcggaagccactgtccgtctttaaacagaaagtcaaaggagccacgaagcaagcggccgtccgggcgtccgcctccgtccccttccatgttcctcctcttccttcgcttcagcctcttctgttatgttttgtcttgaattttatttagactttttcagtgggtatttttctgtctcccaacctctactgtaaactttctggtccgagaacgagccgaacacagcgcgacgcagggactaggacggcccggtgaccgcgcggattcaggattgcggggacgcagaaaggttaaggcacttttaaaaactatagcaaggctcctgtttatttattctactttctttccctaataatcaaaacaccgcgtaggctcctccgtttatcagtattaatggtgtaactttgttggcaatatttgccgtgtagaattttttttagatatccattgtaaatttgaaacaaagaccgatctgtgtaaaaacaaatttccatatgttttatataaatatatatataatatgaaggactaccctccttttttttttttgtattttggctgctagagtgcagcatttgtgacacgtatttgaaatttgaaatttccttctgcactgtataaaaggaccatttgaggatgttttgccttttgtgtattttttcctaaaaaaagaacaaaaataaaaatgtataacatttgtacatggcctttaaaattgtatcaactagaaataaaattgcatgagtatttt

SEQ ID NO: 6196 - DNA, 1936 bp, Homo sapiens
agcaaacaatggcacggttcttctcccggcccagcctgagcctccgctgagcgaaaggccacagctcccaccggcggaggattttaaaatgatctttgcctgggtcggcctgtgggttcagggaagtgttaccaaccattgcgcgcaggtgggcgcgctcgcctgccttctccgaagcaaacttttcccagcaactgggagcagctacggagacttaaaagatccccgcggggtcgtgggcaccgcacgtgggccctgcagggacctccaccgcgggagattccttgacgtttgacctgtctaatggagtgtggtcttcagccgcccaccgcaggtcctgcgagtcccgggcatgcaagggcccgcagaccacccaaggcaggccttacaggtgcagttgaggtcctttcgaccggggacccccgtatgaccgtcgcctgcttcgctgttgccgtgtggctcaggccttggttttgagcccatctgggtggtgggtggtcacagctgggtttgttcctgacttgaagttgtggaggtgccgggggtgaccccgggttttcaggttttctgagagatgtagggcccgatgaggatttatgaccaatgttcagctatagaagctgataaccacccagagcaataacacttttattttaaacagagactttttctcttaatttctttctgggtagtaaaaagaacatgtttcattctttgcataaatacttgactctaagcattgacctttgaaaacgcttgtattaacaatttttattaagaaagtgcactctatataacatcttcttgcattacgatagctcattagccaatacacatgcagctatgtaagccacaacagcagacgtcctatccttttgcttttgtttttaagggatcaaaatatttcaagggataccatgaggaagggtgtgaggggaaggggatatgccttggacaatgtcagagttttgatttccatgttttttcaagatccaggcttggtggtcgctatatttttcagaaacagataatgaaagactacatttaatttaaaaagttgggtgaaacaaccaaaagcagatgcagagagagagagggatgaatgcgggggaagaataaggggacgtgctggtgtccgctggaaggggcctctctgggccccagaggacctgaggtttgatggcaggaatctcccagacactcctggcccccgcaccccctgcagccgcccgctcttccctcccagccctgccaggcaggcctggaggctgatactaaatcaaaaccttaaagaggtgactggcagtctggggaggggagaagaggtctgcaacgaaaatctaattaagaacattgagatgttcacaaccaagttcagcttgcagcttccggggaaatgcaaccgacctctatgccatctctagctgggtaatcttcgaggccctgaaatgcaattttctgaacctctaagtcacttttattttatgtcatgtgataaagacacaagtagtcacgcactattggaaataggttgggagggaggtctttaagatcgcttttaaaatagtttccaggacttgtctaaaaatgatgacaaactttgaatccagagggcctgttggtcaatgtgttggaaaggacatttcaggccggcagagtaattggataattcacaggcatagaggtgacttttggaaaattcattctcctatccatgctgaaccaggcttccacgactgggttctacccaggccagtgggaagactctgggaaacttcaggccagccttgattggaagaacttccaggaggagccattgctgagatccaggctcactgtgattcactgaaaatgtagcgaaagggctgtcactggatattttgctatcccaaactctcagcctctgtgaataaagttgttttttcattaacctctc

SEQ ID NO: 6197 - DNA, 1676 bp, Homo sapiens
aaccagaaaaaatgcagctcttctagaattgtttaaacccttaccaaggaaaaaaaagggatgttaccaactgagatcgatcagttcatccaatcacagatcatgaaacagtagtgttcccacctaggagtgttaggaagttgtgtttgtgtttcaagcagaaaaactgagctccaagtgagcacattcagctttggaaactatattatttaatgtaggctagcttgttttcaaattttaaaagtttaaaaataaaatactttgcattctaagttgccaataaaatagaccttcaagttattttaatgctcttttctcactaataggaacttgtaattccagcagtaatttaaaggctttcagagagaccctgagtcttctcttcaggttcacaaaacccgccgcctttttgggtagaagttttctactcagctagagagatctccctaagaggatctttaggcctgagttgtgaagcgcaacccccgcaaaacgcatttgccatcacagttggcacaaacgcagggtaaacgggctgtgtgagaaaacggccctgactgtaaactgctgaaggtccctgactcctaagagaaccacacccaaagtcctcactcttgcaggggtagacatttctggtttggtttgttctctagatagttacacacataaagacaccactcaaaaggaaacttgaataatttataattttgatcgagtttcttaaaagaccctggagaaagagtggcatttcttctgtttcaggttttgtctgagttcaaactagtgcctgtgttgttacggaaagcagcagtgtaccagtgtcactctggagtacagcgggagaaacacaaaatagtataactgaaaacattaacattcagacacactcccttctgccttccggcttaaagctgtggatgatccacgtttttgtttttttaatgttaaatgtgtaactcagtattactgaaaaggtacccacattttgaatagtagttatcactcttaggtcagacagccatcagaattctcccacaccaagtgcatgtcagttgtggagaaaacatagcaaaaagagccgtacgctctttacagatactaatgtcaagagttaaacctcctcaggttcaacctgtgataaaagactagtgcttcccagtacttgcatggggttcactatttatagttttcttgggagtatcacaggaaaatcacaattacaccactttagaccctatgtgtagcaggtcacaacttacccttgtgtgtttagatgtgtatgaaatacctgtatacgttagtgaaagctgtttactgtaacggggaaaaccagattctttgcatctgggccctctactgattgttaaaggagttcctgtcacctgctccccccacccccgcatgcgtctgtccacttggctaacttttaatatgtgtatttttacattatgtatattcttaactggactgtctcgtttagactgtatacatcatatctgacattattgtaactaccgtgtgatcagtaagattcctgtaagaaatactgctttttaagaaaaaaaataacatgctgaggggtgacctatatcccatgtgagtggtcactttatttataggatctttaaaacatttttaatgaactaagttgaataaaggcacaattaaaaactgtc

SEQ ID NO: 6198 - DNA, 1493 bp, Homo sapiens
tgagatgtcgcggtagcaaaaatagagaaagggtagaaaaaagggacattaaaattaaaagcaaaaccacaagaagggaaagaccgcaactcggacagcccagcgacttccaagtcctctcacagaagaaccacacgattgggtatcactcacagtttgcctttttttctgggtaatgttttttggattttagccaaaattctttgcttgtataacactctgctgtgtggcatggcagaaggaggccagcacgcagcccctccagctccacgtggagacagaagggatcccggcacatcagtggtaacagcggacgttgtcctcgtggtcacacgtcccgtcttgggtgtggatggagggcagcccggggcagagcctcagccccgcggcccctgagtggcagggctgactcccgtcgacacgagcttagaaagtggattcactgctttctctgtctagaacagacgggtgacaagtatgggcaggaggcatggggcagggtggcccaccccagtgggcagtagcctggcctttttctgtgtgagatctgtgctgcacacctgagggagggggagggatcggccacctcctccctgtgagacggatgcaggtccttccctcttctcggcactgcccccggccttccatgagaagccgactccccacaccgagttttaaagcaaagcccttttcttctgctgcccactcactgtgggtcccattcggctgtttcccccaccagaccccagggaagccggggcccactccgatccgcctgggctcagctaagcacggaagccaagggggctgtgccgtggagctgggctcgcgccggggctctgggtgtgtgcgcttggcgtgcagggtggacgcgtggggttccgtgtccccagcagtgagggccctagaggacgccttctcccatggttactgatctccacgggttttcacatctctgtactgtgcctgcctcaacttcccctaacagatatgcatattccttccagatgcctcagtgctacaccacagtgggcctggtcccaggacaggaatgcggttcaaacccagtggcttgaaacttcctgagaaactgtagcatatccagccccctaaaatgtacaatgtaacttgttcagtccaacaaaaacaggttccttatgtttctgccttctccaccagggtcgctccatcacccaaacaaaagaacaaggtttgccaggatgtccgagtgccccctggccctggctctcgtgtgcatggacgtgcctgaggggtccgggcacggccatacgcaggacccctgtgcccggggaggcgctgcagggattccccatccggtcgtcttggggccagcccgtcttatggactctgccttgctttgcttatgtttagctgtttctctgctacctttcgagcagacttctttactacactgcactggattgctatatttttaaccagaaataaactaaagattagagcatgttccagtt

SEQ ID NO: 6199 - DNA, 656 bp, Homo sapiens
gcggtgcccatggcaccaggagcccctcgccggctccgcctacggcccggcccccacgcgccctgctctcacggcctcggcacaggcagcggctgcacgtgttctgctgaagtgcgtctgaaggccgctgcctccgcggggaacagcatcctatcaactgaaagagcagccgccgccgcccccagccggagacccctttcgtttgagtcctgctgttggtgtcggagcacgaggggaggcacggtgcggagagcgtcgcatatgcgcgggaaatcaagaactatgatatttttctgtttaaacagctttttttaatttgctatggtgtttataacaaaaaagaaaatttgaaaaaaaaaatcccaggggagtagcaggagccctttgctgtgtgctctgtccagtgtcatgagacgggagccctttgctgtgtgctctgtccagtgtcatgagacgggagccctttgctgtgtgctctgtccagtgtcatgagacgggagccctttgctgtgtgctctgtccagtgtcatgaggcaggtgtttgcaaagccagctctcggttccgatggggtattgctgacctacttttctaggggaaatgctcttaaacactgtaattatgcatttctaatgaaataaaatgtatttatgaccac

SEQ ID NO: 6200 - DNA, 186 bp, Homo sapiens
gcgcccacactacagccgcagacgctttgcacgccccgctgcgatgcggggagggggccgcccccaggccgcacggactgccgctcctgggaaccccgccacgcacaggcctcggcggagggggccgcagggggcagcgcccgcctggacccttggcacttaataaagaagttcagtttgatgagc

SEQ ID NO: 6201 - DNA, 548 bp, Homo sapiens
gccgtgccccgaccggactggacgcatttttatacatagggtaagcgcagccattttggattttgcagttaatgtcttattttggctgtgattctttttaaaaagtaaaaaagaaaaaaaagtttctcagctggaaaagaagccacacaggaaatgacaacgacgctgaatcccagcctccctccccagagcagaagtcccgcaggacagacagacacagacagcgctagtgaccagcacggttctcatgtaaattacaagccccagccgccagccccgccttctcttcctcctcctccgtcttcttccctggccctggtcaggcctgtggagccccagctctgggtccctagcccgggtccaggcagccaggctccctcctgagctgagaaacggaacctcgcgaaccactggtggcacatccttctcctcccccgcccctgatcacccgcccccggatcagaaatatatctatattctcgactaaagtctcatcaggaaatatttcctgtcttttattttaagcatcaaattgttttagttgattt

SEQ ID NO: 6202 - DNA, 401 bp, Homo sapiens
ccgccgaggccgtggggcccctagactggacacgtgtgctccccagagggcaccccctatttatgtgtatttattgttatttatatgcctcccccaacactacccttggggtctgggcattccccgtgtctggaggacagccccccactgttctcctcatctccagcctcagtagttgggggtagaaggagctcagcacctcttccagcccttaaagctgcagaaaaggtgtcacacggctgcctgtaccttggctccctgtcctgctcccggcttcccttaccctatcactggcctcaggcccccgcaggctgcctcttcccaacctccttggaagtacccctgtttcttaaacaattatttaagtgtacgtgtattattaaactgatgaacacatcccc

SEQ ID NO: 6203 - DNA, 156 bp, Homo sapiens
ggacagtgacgacgaggcgggccagagctgagcgtgaggacgtgcttgccgggacagcaggcagtggccacctggtacaccacactggagccggaaggcaaggacgggggactggcctctgattgtccatttgtataaataaaacattttttaatt

SEQ ID NO: 6204 - DNA, 979 bp, Homo sapiens
gcctgggggccactgtggacagacgtgggcttcagaagctcgctggcctgggcccaccagcattttcttttatgaacatgatacactttggccttcctttccccagcgcccctgagggccagaggcagatgtgggctgcaggctgcacagcccgagggtctctggctgcgggcggtgggccccttcatggggctcacctggtggattcacattaaaccggtttctgtgggcacctctgtccttgctgctggtggggaagggaagccagatccagcaccccctggggggccatcgggagtgtggctgggggtgaagggggctctgtggcaatatggggttgggtagtgtgggtggcaggccatcccctctaatcttggaacctctgaatatgggacctcccacagcaaagggtgacttttgtcattaagaaagactggggtgggtgtggtggctcacgcctgtaaccccagcactttgggaggccaaggtgggcagatcacgaggtcaagagatcgagaccatcctggcgaacatggtgaaaccccatctctactaaaaatacaaaaaattagccgggtgtggtggtgggcacctgtcgtcccagctactagggaggctgaggcaggagaatggtgtgaacccaggaggcacagcttgcagtgagcgaagatcgcaccactgcacgcactccagcctgggtgacagagcgagactccgtctcaaaaaaaaaaatttcaagactggagaggtgatcctgaattgtccagctacgccccatgtcatcacagggccttcatgacagggccagagccagccagctttgaagacgcggccctgccccgacacaggcagcctggagaagctgggcaggacaagtaggacatccctggagcctccagaagggactggcctctgcccacaccttgacttcagtatttctgacctcctaaactctaataaagtcatgcttacagccact

SEQ ID NO: 6205 - DNA, 153 bp, Homo sapiens
gtgagctgtgctgccagccatcgcagaggagcccgcgcacgactgtggtggggccgtcggtctgttctggttgcctcttcctgaatgggacgcctggggctttcagggcaggcagctgtgcatgttctctcaactaaaggtcttgtgagagga

SEQ ID NO: 6206 - DNA, 1554 bp, Homo sapiens
cccggcagactgggactgcgggtctggtggggagcagcagacgtccccttcacaccgagaaccacgggggcccgtccaagacctggcctcccttaaacctgaaccccccaaatcaggtcacgtagaatcaagaactgtttgggatgaaatcaccatgtggggtccccagcctcgggccagttgttgcagctcaaggagaccgtccctggtgtcacctctgcctggtcaccgccgacctcatctgtgcagcgcggtgcagccagcccctggccccacgtgctgaggcacctcccgccccacagtgccctgcagttgccaggctctccagggcaggtcccagaggtttcccacaaaaaacaaagactccactggaggaaacaagcccctgtcccacgccgtctgcacgtgcctgtgcctcacccagagccagtgtctcccggcccacataggaggtctgggcagccacccagggggccctcctgggaggagctgagggttcacaagcctcccagaaccagccctgtcccatgggttccgtgcatttcctggtgctgctcttggaggagagcagctcccactgtggggacacctgccaccctgcacactactgtgtgtccatcagcatgtgtcacagaaagtgcgtggacggatggccccggagctgctctgccgtgaccctgcctcaccccccagcgcagggactttccaggtcatctccacaccagcccctcagccggtgaaccctctctcccatcaccgtctccacccagacccccacctgccccatggcccccatttcatgtctgtggctcaccagcttttccccagacccagctccggagcccacaggcgtggccgatgcagaaacctcaggaaggtgtgttgtgaatgttgggtgcacccacgttgcatttacttagcggggccaattcagatgcacaggggccacatgcagaatccagaagtttctggacaattttcagaagaataggctgcctcctccccacagcctgggggaagtaacagtcatcgcccagcagtgtctggcctgaacttacccagaacattctgcccccggaatgcacgtctgaaagagtggccagaaacgagtgtgccgggcaggaggccagccccatctcaggctcacgtgcctctgacaggagaccagccccatctcaggctcacatgcctcgcggacagttggacgtggcctggggcccctgctcacttgagcatgtcgcccaccaagcttgtctgaggccacagagcagcgtcccagccctgttttccaggactggtgggtgccccagtccacggccctgccccacccgaactcctgcctcacggtgtggccttgtgcatccccatggcctgaccccgggaacagtcagaggaaggggtcccgccctcccgccagaggcctggacccaagggaacggcagtcagagactacagtccagacgtttgtgtctaggccttgctggtagctaaggaaatgccttctgttgggaaaaggtcaaatttaacatagcaaaatttttacttaattccact

SEQ ID NO: 6207 - DNA, 336 bp, Homo sapiens
ccctggggcgcaactggacatgccactccccggcctcgtggcagtgatggcccctgcagaggcagcctgaggtcaccgggcccgacccccctgggcctggggcagcctccttcctgtaggcgagggcccaagtctgggggcagaacctgagtgtggatggggcggccaggaagaggccccttcctgccggggtgggaagagtttctctccatcggccccatgcgggtcacctccctagtcccacctttgcctcctaccagtgaacctcatctttgtatgaaagacagcaacctcctgggtaaatctgaatgaaaaacgtgctagtctctttcatgc

SEQ ID NO: 6208 - DNA, 393 bp, Homo sapiens
tgtaaagaatgtggggaagctgtcagctacactcattcacgttgaagacatgaaagacctctcgttctccagatgtccatgacttgaggaatgtggctaggcaatcagcatctcatcacaacccggcaggcaggaactcaccctggagccctatgcagcagacacagagaaagccctcagtgttctctaaggtcttgctgaatatggatggtatccagtagagagaactctattgatgtgtgatatgcagcagcattgttgctgttctgctcagtactttgatgatcccttgtgatctcacaatgaagaaaaaccttaggagggtgagaattgttgggaagtcattttttacattacatctttcctcaccctttagtaaacgtggtgattgac

SEQ ID NO: 6209 - DNA, 810 bp, Homo sapiens
agatagagaccacctttttgagtgacttgagcccaaaggcaagcgtatatcaaacgatcttctccacataacctctctgtgccatcataagaatagctgcttccgcccccggatttgctcaggcctgggaatccgctgactgaaggcctcttgttgagtgccagctctaaacaagtccctttatgcagagccacagctgtgcatgctcagccctgccgaggtcccaggccaggctttgttgcttccgttcatggaagcgcacaggatagggccgacgctgtgccggtcgtggggaaatctcactggggaagagaaaagcccaagccttgttggttacgtcagccggtccatggcggtgtcctgcggaccccagagcccccgggaagggcgcaagtcaaagagcactggaggcaccgccggcgatggacgtccaggtcccggctcctgtgctggaaagcgttgatggggagcgtcggcgctgaccacacgcgggagctgcggaagcccagcggttcacacaggcctcccttcaacgtagtcatcccctggtggtggaagcaagacgacggcccctgacgtgcagccacacacagaaaaggctgctgtgaacattttatgcttcgactttttttttcttcagagacagggtgtcgttctgtcgcccaggctggagtgcagtgccaccatcatagctcactgcagcctccacctcctaggctcaagcttcctaagtagttgggactcaaggcttgagtcaccatgccaggctctgttttttcagtctgtgaaaaataaagtcatcagcatgtg

SEQ ID NO: 6210 - DNA, 672 bp, Homo sapiens
ttgggaggtgttggctgcacgtgcgggtggtccgggaagtgagggctcactcagccaccctgagttgcttttcagctgaggtttgcacttcctctcgcggccctcagtagtccctgcacagtgacttctgagatctgttgattgatgacccttttcatgattttaagtttctctgcagaaactactgacggagtcctgtgtttgtgagtcgtttcccctatggggaaggttatcagtgcttcccgagtgagcatggaacacttcgagttcccagggttatagacagtcgttcccagtgtggctgaggccacccagaggcagcagagcattcagactccaaacagacccctgttcatgccgacgcttgcacgaccgccccagttcctgtggctccctcggaatgctaaggggatcggacatgaaaggaccctgtgagccgattgtcctatctccagcggccctgtcatccagctcactcatcaatggggccagtcaggcccaggcactgggctccggaggactcaccactgccccctgctgccatgtggactggtgcaagttgaggacttcttgctggtctagtcacgcatgcagtgttggggatgccttggtttttactgctctgagaattgttgagatactttactaataaactgtgtagttggaaaatct

SEQ ID NO: 6211 - DNA, 398 bp, Homo sapiens
agccctcctggggacttggaatcagtcggcagtcatgctgggtctccacgtggtgtgtttcgtgggaacaactgggcctgggatggggcttcactgctgtgacttcctcctgccaggggatttggggctttcttgaaagacagtccaagccctggataatgctttactttctgtgttgaagcactgttggttgtttggttagtgactgatgtaaaacggttttcttgtggggaggttacagaggctgacttcagagtggacttgtgttttttctttttaaagaggcaaggttgggctggtgctcacagctgtaatcccagcactttgaggttggctgggagttcaagaccagcctggccaacatgtcagaactactaaaaataaagaaatcagccatg

SEQ ID NO: 6212 - DNA, 624 bp, Homo sapiens
agatgtggagggcgtagggtgggggcagtgaggaatgggtccgtacagcctctgtctgcaacatgcttggggtcccttaagctccctccgacctcccagaagcctccagtccccaccaggccccactcccagtcctcctgggatcctgctggcttgggcccggctctggggcccccaaggccgaagggtgacaaaatacaggcccccatgcctggccctgcctgagccaggtgggtggagggagggagatcatgagggacttggagggagctgggagttcatccacgggagaccctgccccgatgagaaggggcagggactgggggctctgctttgcgtctaacctttgtgggggagggccagcaaggcagtccccccacgcccgagaaagcctgggggacccagacacctgtccccacagtcaaagcctggggacccagacatcctgtccccacagtcagcctcctgtccctgctggtgcccccacacccacctaccctgtgctttttgccgtcgggcctctgcacctgggtccatggggtctgcggggtctgcggggtctgcctggcctgtgggttctgccggtggggcttcaggagtaataaagtgtcaccctatccttgt

SEQ ID NO: 6213 - DNA, 207 bp, Homo sapiens
aacctgggagaccagagtcccctttagggttcccggagctccgggaagacccgcccatcccaggactccagatgccaggagccctgctgcccacatgcaaggaccagcatctcctgagaggacgcctgggcttacctggggggcaggatgcctggggacagttcaggacacacacacagtaggcccgcaataaaagcaacacccctt

SEQ ID NO: 6214 - DNA, 1770 bp, Homo sapiens
acaagcacctttgcatggcactcgctactccctgcgataggcgtctcgggaacagccgcctcaccctgtgagaagccgaggccccttctccagtgctctcggggaggttgcaccaggcccaccccaccctgtgagaaactgcagcccccttctccagtgctttcggggagggtgcaccaggcccgccccaccttgtgagaagccgtggcccccttctccagtgctctcagggagggtgcaccaggcctgcccccgccgtgagaaactgcagtccccttctccagtgctctcggggagggtgcaccaggcccaccccaccctgtgagaacctgcagcccccttctccaatgctctcggggagggtacaccagggttgccccaccctgtgagaagccaccgcccccttctccagtgctctcggggagggtgcaccagggctgccccacgctgtaagaagccgccgcccccttctccagtgctctccagcccgccccaccctgtgagaagccatggccccttctccagtgcttttggggagggtgcaccagggccaccccaccctgtgagaagccgtggcccccttctccagtgctttcggggagggtacaccaggcccgccccaccctgtgagaagccgtggcccccttctcccgtgctctcagggagggtgcaccaggcctgcccccgccttgagaaactgcagcccccttctccagtgctctgggggagggtgcaccaggcctgcccaccctgtgagaaactgcacccccttctccagtgctctcggggagggtgcaccaggcccgccccaccctgtgagaagccgcagcccgttctccattgccatttggtcctgccttccccagagctgctagcagctcggtcgaggcaagagtgactggctcagagagcgagctttgtggtattgataaatgaataaattagtatgttcatgttggaagtggctggctctgcagagtgatggacagcaggtggcatcttacattgtgatttgtggtgcacagttaaaacacttcccttcgtttcagaaggagacaatgtgaatacttggaaattatagtgaataagatgcctcccaaacttgaggaaaaggtcagattctaagagctaaacgttaagatgtaatgttccagaacaaagaggcccagagtcactgaacggggccccagggctcctagcttgagtgtaatctgagtcagcttatgaaaaggccccaaagaagaaagtggaatgtgtgctgggcacatgggacagccatggcactgagactttggaagtggccttgccagcgctgtcctgtctttctggcccacagatgagggctcctgattgtggaaggccacggaagggacctgaacacgatggcacgagacaagttatctcctgtgactgctcctctccagcaaccctcagctcaggctagactttccccctgtgttgagaatgccctgccctgtgtggaagcctgatgcatttagtgacagtgtgttagctttgttagtttctagtctggccagcaggctttccatgtgatctgccattggcttgcttcagtggccagtggagccaggggtgtccaccagagtcttggacacagacttctgaggtggcagcgggagggagcctgctccctgccacacacgtacaatttctaatccatacaggcctatgtagtatatacacacatacgcagagccttaggaattgtgaaaggccaatcaaaacttggggccctaatttcactctgcc

SEQ ID NO: 6215 - DNA, 662 bp, Homo sapiens
cggtgggcctggcacacgcctgtattcccacaccaggtcttccgatcagtggtgtctgtgaagggtgccgcgagccaggctgaccaggcgcccgggatccagctcatccccttggctgggaacatcctccactgacttcctcccactgtctgccctgaacccactgctgcccccagaaaaaggccgggtgacaccggggggctcccagcccgtgcaccctggaagggcaggtctggcggctccatccgtggctgcaggggtctcatgtggtcctcctcgctatgttggaaatgtgcaaccactgcttcttgggaggagtggtgggtgcagtccccccgctgtctttgagttgtggtggacgctggcctgggatgagagggcccagaagaccttcgtatcccctctcagtcgcccggggctgtcccgtgcatgggttggctgtggggaccccaggtgggcctggcaggactccagatgaggacaagagggacaaggtatggggtgggagccacaattgaggataccccgagactaccaggagagccctgggctggaggctgagctgcatccctgctccccacatggaggacccaacaggaggccgtggctctgatgctgagcgaagctataggctcttgttggataaaagcttttttaacaga

SEQ ID NO: 6216 - DNA, 1656 bp, Homo sapiens
ggacggcagtgaggatgagcacctctagcagcctggactccgcagtggctgtgtcagcctcacccttcgtgtgcacccgcatgggagggtcggagggtgctgcccgcccttggtgctggaggcgggcttggtgtccggctcaagtagccttcctctgctctgggaccagtggtttattttcccgcaaacgctgagtgactcggggccggacagttcataaataattgattcctttccccactaaagcagtcgaggagatttgtaatccactttttagtgcaacaagagctccatgttatgcttgtaataaattatttacacgggagctgggctggtgtgcagtggcaggtcccgtcagaagagatgaggctcctgggacaggtcagcgtcaggggcagcctgctgtctgctctggagggcggcgctcacctctgggtcgcagtccccacgatcagccagcagctgtgagagaggagcaggtcctcagcccatgccgcccactaggcctcagaccacaggggaggggctctggcagaaatagtcgagttgtattgccagccaggcaggcacatggcccaggcagctgtcaattctcatgtcccccacatggcccaaggtgggcatcttgacgttacctctgccacgtgtgagaagctctttttcgggcaccgaggtattaactgcagcagaaaaagacgagcttttgttatcagttccacggggttgccctagagagaaaacaggcaaactcacaggttagaagacatacagaaacagggctggtgtgtcccccatagtctgcatgctgtgccggaacattctttggcagaaggagcctccggctggggggagctcccctggaggtgggactggcccttgcacctgcctgacccttgagctccaggctcctgccagctggaggtgaaactgtgcttgtatccccagccacgaagagctggaccagcttcaagtacatgtccacagcaacatgcaggaaggcctcttccctgatggccgcgtcttcatggaagtaggagagaagactagaggtaaagacatagtgacaaatggctacagactgctggaaaggtagcaggtgatgccaagggatactgctcatctgtggagcagaggcacagacaacccttcccatctggcgggacccagaggtgctgagatgggggtctgggaaacactgcccagccctgaccagccctgtgggtggaggtacctgtaaaaagcgaaaggcagcagcctggtgtgctgatccggggccacacggaggaggagccgccccagcctgaggtctgcaacaccaagaagtggctcaggcaactctggacatctctgcctattatcagtgctggggacacccctgggggtcgggacgtgtaccctgggaggcctggctgtggggatagtgtggggcgaacagcctgagctgaggatacccaggtacctgtcagcagctgggagaggatgggggggtcgacctcttgcaggagggtgggtgtggtgcagagagaggcagtccccatgataggcccattggtcctggggttgaccagtgagccagtaaattatcttattgctttaaacaagtttgtgcttaatctgtcccaactaaaatggagcttataaacttacttagcaagg

SEQ ID NO: 6217 - DNA, 1047 bp, Homo sapiens
cagccccaggtggccaggcctccaggaggcaccaggcaggccctgtatcaggctaggacgctctgagctgtgcatgtacatatatacatatatagatacatttataatatatacacacagtctatatatttatatacactgtttcctggccccagagctcatttgggttcaggcgcacttcaaaaccctccctgggggaggctgtttcttctcaggattccttgccagggaggaaggggagggaacagggtgggttttctcactgaagagagaaagcagaaggttctagatcctggcacagactgcatcccatgttcccatgctcttctccgtccccaggaatgcgaacggcagtttcccttccccagtggacgtctaggtggggacagggtatcttggctcccagctggaccagagtgccctgcttgcctctgctctccctttgtggggactcaggcagcagaggcatctgggaagtctctgagtaggcagggtcctcctgggaggcacccccacctgtttgaaaggtctggccaggcgtggtggttcaggcctgtaattccagcactttgggaggccgaggagggaggatcacctgaggtcaggagtttgagaccagcctggccaacatgatgaaatgttgtctctactgaaaatgcaaaaattagccaggtatagtggcaggaacctgtaatcccagctacaggggaggctgaggcaggagaatcgcttgaacccgggaggtgtaggttgcagtgagccgagattgcaccactgcactccagcctgggcgacagagcgagactctgtctcgaaaaaaaaaaaggtccgtgccaagctgctccctgcccttgccctttccctttccctggggtccaaaccacatgtgtcctgcctctcctggccctaccacattctggtgctgtcctcactcgcccctggcccagaggctcctgaagatgctgggcggtcctggcacagggaggagcagctctgtaaatctgtgcacatggccactcttggcctaataaaggaggtctcacagtc

SEQ ID NO: 6218 - DNA, 140 bp, Homo sapiens
gcgtccgcagaggtgaccgaaaagccgtatgatgatgttcccgatttctctgttggtcggagtcggccagttgcctgaagtagggaagctgagtgtgtcgctccctggtccactgtttctcctataaatgtaaatgggtc

SEQ ID NO: 6219 - DNA, 764 bp, Homo sapiens
gcgcggtgcacgcggctttaagtgtgctgggcagagggaggtggtgatattgtgtggtctggttcctgtgtgaccctgggcagttccttacctccctggtccccgtttgtcaaagaggatggactaaatgatctctgaaagtgttgaagcgcggacccttctgggtccagggaggggtccctgcaaaactccaggcaggacttctcaccagcagtcgtggggaacggaggaggacatggggaggttgtggggcctcaggctccgggcaccaggggccaacctcaggctcctaaagagacattttccgcccactcctgggacactccgtctgctccaatgactgagcagcatccaccccaccccatctttgctgccagctctcaggaccgtgccctcgtcagctgggatgtgaagtctctgggtggaagtgtgtgccaagagctactcccacagcagccccaggagaaggggctttgtgaccagaaagcttcatccacagccttgcagcggctcctgcaaaaggaggtgaaatccctgcctcaggccaagggaccaggtttgcaggagcccccctagtggtatggggctgagccctcctgagggccggttctaaggctcagactgggcactggggcctcagcctgctttcctgcagcagtcgcccaagcagacagccctggcaaatgcctgactcagtgaccagtgcctgtgagcatggggccaggaaagtctggtaataaatgtgactcagcatcacccacctt

SEQ ID NO: 6220 - DNA, 293 bp, Homo sapiens
agctgctcgcagctggagtgagaggcaggtggcggccggggccgaagccagcagtgtctaaacccccggagccatcttgctgccgacaccctgctttcccctcgccctagggctcccttgccgccctcctgcagtatttatggcctcgtcctccccacctaggccacgtgtgagctgctcctgtctctgtcttattgcagctccaggcctgacgttttacggttttgttttttactggtttgtgtttatattttcggggatacttaataaatctattgctgtcagataccctt

SEQ ID NO: 6221 - DNA, 2096 bp, Homo sapiens
cgccgaggaacagtgctgggcaccccgcctggcccgccaggacccaccctgccaacatcaagttgttccttctgctccggagacccctggggtgcggccctggccccctccacccctgctgggccagagcgggtgggcagtgtcaaggcccgctgtctcccaggtgcttgctgggactcggggcggctgcacctggctgtcacctgggtgtgctgctgtgaggggtccttgcgtggcccccatccttcccccaatgcagaactccatgggcagggagctggggggacatctcacctcccccatggcacagagccctccacacccctggaccagggcatccgggccctagaaattccacagctcccgtcctggccaccctggaagctcatcaggccaagacccggacagagcttcagaggagtgttgagtgacacctgaggatgcggctgcacacactcagccaagggccgagtctcacctgcggtggggtgtcggctctgcctgggggctccatccctttcagccactcgtggccttggggatttctggttgtccccagctgggactgttcacagttgtcacctgcagacctgcctctccctggcctgaggttcaaaggcctcatcggatggtcagtacagtggggtcacctgttgtttctatacaacagcagggaaggggccatggagcttttccctgctgggtgctcctgctttggcccagcccacctttcctggtgctccaagctaggaggctgtggccccagcctgaggagggtgtcctggcctccaggtgtgcagcaggggctgtgtgctgggggaggttccagttaggcgatgggatcctgcagtggtctggtggcatttcttggaaccagatttacctgaggagctctgtcctgctccctgtggagggctccagatagctcagaaatgaccagccaatggccttttgtttgggggcctgaggtcaagagagctgagagtattcgctcgactgagcacattcaggaagatcagggcaggcgtgtgggaggtccctcactccacgggacagaggcccctgggcagcagaggaaacctacagctctgggtgaggggacacttggctttggtgtttgcactttacagatcctgcggtccacgaggggcctcaggagaggacgtgtcaggacgtggcttcccagccttctgccttgggcagtgggggtgctcctgtctgtccttttcccccacaccctggactgtgcttggctgttggtgcacatggttggcacacggtgggcagagggcagagaatgccactgcttggttattggtcccctttgaccaggaaacccaagaggagacacctcagtcagcagaaaggccacctggctcactggctcattccaggagtgggagagacggcagggtctcctctttgtcctccggcatcaggaaggggatggtgtccactccccactgtggtggctttaggcaaggttcttattgtctgctctgcctcggtttccccatctggaaaatgggggcaggggtcctgacctacctcaggtggaacggtgagcagggaacatgtcggagtccttcagagaatgtgatgtgaggttggatcaacagtgtgggttcctgtcctgtttccccttcctctttggggctgaggaggaggttaaaggccaaatgctgtttcccaacaccccaaagtctgcacacgtctcatgaatgcatcacatttctgtcatatggatattagccattccgaaatctgtgtaatcaacttcacattattcaagttacaaatcactgtgtccatagaaaaactgtgctggtatttgctggacaaagggttgggccccttttatttttacctgccacccagcatctcccccacctgccccttctgggtgacacagccggtaaacggaatcacgtatggttctttctgtgggtctgtggcacagcaggaagagcccggtgccgccagcaccttgtggaagaccacacatgggtggtcccacagcatgggaccaggctggcctgagggatgcccagttgtaacaatgctgctgtcactgtctcattaaatatacatccttt

SEQ ID NO: 6222 - DNA, 130 bp, Homo sapiens
gctatccagtgtggtggccactagccaaacatggccagtcaaagttaaattaactaaatatgcatttcctcgttgtactgtctacattggacagggctgttctggatgagaaattaaactagtgaattac

SEQ ID NO: 6223 - DNA, 430 bp, Homo sapiens
ggccaggatggcccagctgccctagtgtgtgcttgccttgtccctcggggtagatgcttagctggcagtatgagttgtgtgtcctgagggtctttgctagtgtggtggaaagataaaccttttgaggtgaagagccagggggtcaggaaatatggcctatctgccaggcagggtggatgaagtcatgaatgtctgggagtttttctgtgtggggaggagacagagacccataactaaatatgctctgtgtaaagtcctattctttcatcttccactttattggcagttgacattcccttactcccaatcaacactcttaaatatttgtactgtttgtaaaacttagtacatgtccctaaatatttaactgttacttgtaaacttgtgtaatttattatttattttaatcaaaattctgaatatttcattt

SEQ ID NO: 6224 - DNA, 280 bp, Homo sapiens
gctggctgcgggctccagcggccgtgtgctccagcaggccagagccagacacgacctccctgagcctcacaggcttacaggagtcacctgctccatgtggggactggcctgtttcctgaacacagacctctttcttgtgccttgttcacttctgttgaacccctcgtactgccgggcatttattatactacttcctgtcataaccttctaacttgtttcttgacgaccacctcatgtggccaataaatggactgggagcgttttagctgccattaacttg

SEQ ID NO: 6225 - DNA, 993 bp, Homo sapiens
ctactctgactccttcggtagctgcaaccaggagtgagcccttctctgtgttcccagggtctgctgagggccgtgtctggtggggatggggctgggctcaccctcaggagtagggctggggagtcgtgaacgggactcaggtgtgggaagaggcgagagggctgtggaggagctcgcacggcgccaggtgatgggctgcacaggcactgtcccctgcctgcgtcctggggcctgtgcactgttgcgtccatgctcagagtggctgagacttgtgtcctgaccaggccctgcttacctctgttttggtttttgtttttgatatttttttttccattgtgtttttacgtagtgtcatgttctgtgcatatagtgttgtattctcctttgcactgtttatgttacagtgaaggctctccttattaaaaatcttcgcaaaggtcactttttaatggctatctaacactccatatgtggtgggcaagtctggttggcctccggggggtttccaggtataggggatgtagggccttgcctggcctggtctgcgggtccatcgtcagtgcctgagcggccagcagaaggggggcagcagcctccactgagcctctggttcccatttcccaggttctccagagagcgggcatccagagaggagtcctgggagagcgggcggagcgagcgagggcccccggactggaggcttgagagctccaacgggaagatggcttcacggaggtcagaagagaaggaggccggcgagatctgaacccgtctcccgggtgctgtaaatagtctgataaacgttcacacagtctaaaattaccctttatatttgctgaatacaactcatcttttgtagtttaaaatttctattgttttggagctagctgtgagtttctagaagtgtacagagttgctcctgtgttcccgggtcatgttgagtaggaataaataaatctgatgctgcctcctgaggctgcggggggtttctgc

SEQ ID NO: 6226 - DNA, 958 bp, Homo sapiens
tggacctggcccatctgccactctagtccctgcagctcaacgtcctgcgtgaatgcagcagccacccccgtcttggcccaggtcctgggggctgctgaacccagcaccagtgtccccttgtgcccagggggcccagtcttctgtggggtgcacagcctccctccctccagcaagccctccctgcccagaaggaatgggtccaggtgtggattcccagggagggggttcattggctcagcttgggtcagggcagagcctgttacctgaagagaggtgagaccaaggccacagggagctccaccttctctggtcttcagtccagcactgggtgcccatccccatctctaaaaccagtaaatcagccagcgaatacccggaagcaagatgcacaggcgggcggcttcccacacacccgtcacaagacgcggacatgcaggtctcggcgcgagctctgccccgtccaagagcctctccgctgtcgcccagtgtgagcctggaagaggacccaagagagtgccgtgctgaggctgcctcgaggtcactgccttccggagctgcgcctattcctccctcgccaaacgcgttccagaatttgtccacaggtgcgccggcacctgctttcccacctcgaggccgcggcctcccccccgatttatagacaactctgacattgtcaccccactgacgaggcccgattccatagggtggatccttgccaggcgtccctgatcctccctgcccaagtcttccttcgtgagctggccttgctccccatcccccaagtgcctcaccagtcccccagactgggtgaaggtacagctggctcctttcgggggtgcagcttcaactctctcggcggtagggcggtgccatccccacccatagggctggctcacatccagtcactcccaacagcgtccagcacacaaataaaagacccttgggccctggctctgag

SEQ ID NO: 6227 - DNA, 682 bp, Homo sapiens
taggctggtgggctggccgctgtgccaggcgaggcccttggcgggcacgggtgtcacggccaggcagatgacctcgtactcaggagcccgatggggaacagtgttgggtgtaccacccatccctgtggtctacccgtgtctagaggcaggtagggggtccctccaagtggtccacaagcttctgtcctgcccccaaggaggcagcctggaccactcctcatagcaatacttggagggcccagcccaagtgaggcagccgaggtccctgctgccagcttcaggtgacccccccccatcccccggcacctcccttgggcacgtgtgctgggatctactttccctctgggatttgcccacgtacccaggtctgggtggggcccaggcccggatgcagaggcctgcagggcctctgtcaattgtacgcgccaccgagtgccttcaacacagcttgtctcttgcctgccactgtgtgaatcggcgacggagcactgcacctgcctccagccgccggctgtgcagtcctgggtcctcctttctgagggcccgtgtaaatatgtacatttctcaggctaggccagcaggggctgcccgagtctgtttttcatgcgatgacacttgtacaattaattatcttttcaaaggtacttggataataatgaaataaaactgtttttgaacctgc

SEQ ID NO: 6228 - DNA, 279 bp, Homo sapiens
ccacacagctcctccatgcctgaccaacaggcccagctttccctgccaggccctttgcactgaggacacagatcccggggagctgtgagggccaccggtgggcagtgggtggatcctggtttcgtgtgctgcccatgcaccttccagcccggggccagcttggcagggatccccaggaggcctgggccgcccagaggctcctctcaggctgggccccgacgtttgcggcagtgttccttgtgcccgtggggccgggagcgagtaaagtctgggccaggc

SEQ ID NO: 6229 - DNA, 127 bp, Homo sapiens
cactggcctggggacagctgctgctctgatgacctcttcagccaggagctgtatcgagggggaggcgcctggtccagccctggacagattgatttccagctgaataaattggcctagataccctctt

SEQ ID NO: 6230 - DNA, 168 bp, Homo sapiens
gcccctccttcacccccgcacacctgcatccctgccggaggctctgtgaggcacgaaccctgcctccctaggccggaccttgtggacgacagccccacccagtctgtgctctcagccgctggccgaagggcccagcctgctcagaataaagcatgtcctgctgccggc

SEQ ID NO: 6231 - DNA, 1127 bp, Homo sapiens
ccaaaacagctggcaggactgccggtcacacaccagcacgtcccacctcgtgctcacggattttattacacagatagtggcggcaatggcctcagcccagcccaccctcacctgcttttccagcccacaaagggggacgatcacggcccagcaaaagcgatgctgagaggggaaacagtccagagtccaacagcagaacttgggggaagcggtcggggtggccaggaacataaactatgtataggggccgggggcttctgcccagggctcccctggaccaggacgccaggtagggcagggaacctcagtagtcctccacccagccattctcagagatgaatgcgtcaataacctccttcatagccaagttggggatgagctgttcctgggtcagggggctccgggtcacggggtcaaaatgacccacacgctgcagtgacaagaagggcagagggcagtcatggggcccaggaccatgccactggccctgctcccccagccgcaggcctcacctgcaggtgctcctcgatgtccttgcggtcgtaggtgatgccactgggcgtgatgcacggctcccgcatcagctcaaagctgatcttgccacacaggtagtcggggatgtctcgcttctgtggcacaggggcacacggtcagaggctgaaaaggggcactgcacgagcacctgccagccatcggcagcaagcgacacacactcaccttcctcttctcatccacctgagaaaaaagctcgtccatgtccgccatgtacttgtcctgtgaagagttgagtgctgtgcttgggggagacaccccacctccctcctccatggggcacagacccaacacaaggcggggatgctcccacgccacgtgcacacacacagacccacatgtgggtggggggcaccctcacgtgcttggcctcaatgcaggcctgctgggcccggacgtggctgtcgtcctcatcaccctcgtggtttcgctggcactcttccagctccctgggggttgaccaggagccggtcagagatggacctggccagatgtctgaccacaccccaatctcagagctaacatccacacttccccacatttcctgcttgccagtaaagccttcgataaacgct

SEQ ID NO: 6232 - DNA, 32 bp, Homo sapiens
cggggcatctgctgggcttgcccgggcggccg

SEQ ID NO: 6233 - DNA, 1769 bp, Homo sapiens
cgcgaggcccccgccccggtcgcgggaacccggccatgacctgggcgggggcgcggggcgccgccgagccccctcttcccgccttgcgctcgggggagcccccgcgcccccggcccagcgcgggaggcggggcgagccgagggaaagcccctccccgaccttcggtccctccgccctcccagccccgccccgggcaggggggcggcgggtgggcccgccccacgcacgcacgcacactcggggactttgtgcatgcccctcgtgcccgcactgcacgccgccctccgccacgccacagccacagccgccgccatcactcgctcgccctcccgcttggggggcggggctcggtccttgggggggctttgagctctccagactgtgcccttaccgccttccccgccacacccgctctgtcttcccactgtcccccccatcccgggcagggcccagtgggattgagggggctgggtcccccaggacacgggcccagaagagccccacgggcttcctgcatcttccaccgcaccatacctggagccctccgaggggtgtcaggggaaacaggccaccgccaaagccatggcccgccgccgagagcccaggccccacccgcacctcctcacccatccagcctgacccacgcggcctctcctcctccttgccgctgtgtggggcagtcccctgtccgccccaaaacccggccttggtccctggccaggctgagagaattgggcagggagagggcggaagggctggcgatcgcttggagtcattaacgtgatcccagctgactccggtcggcctcaacccaggggtggcgcaggcaccttgcaagcctcgagctgtagccaccctcaggcctgggaagaggcctgggccgacctcacacctcagcccttgcacccggccgggctcagttcaggcctgggcaccgagcttcaccctgggtgggtctcctcaggtggagtctgcagagtggacccagccaagggtcagggtcagcactgggtcagcgactccaatcttccagtggccagcacaccctagacaccccgaggagggagggctcctttctagcctgcccccccacccccacttcacccctccccagcttcccaaacttctgtctgcccaaatgggctctgaccgtgctctgtcggcccgagacatttggaagtcctgggggatgctggcaaatctcagctgttgctgaggagggggctgggaccccttcccatcccaaccttgagccccaggagataccgcgcccacacccaatcttgggacactccctatctggttggaagagagtaaccagtttccagagagccagagagtgagagagagaaagagagtgagagagagagagaaagagagagagagatgctgttgaatcagaaacagatcaacagcccaaagattttcctgtccctggagtgccagccccaggaagctccagggctgagtggtcaggagccagtttctccagcccctcctccccacaacccctagtggggaggggcagctgtccatttgcccaaagtattaatgcaactgaagctgtgatatttccaacgactgtaggaggaaaaattaaggggagagaggaaaacaaaaccaaccaacccctaaaatcattttcttattgtacataacgacctcattctcctgtatatgcggaagatataaccttatatttggtaagtgtttcttgtgctattttatcacgtgacctgtttataaaaatatatattaaaaaagttgta

SEQ ID NO: 6234 - DNA, 2324 bp, Homo sapiens
ggctctgccctgactgcttggagacctggagggtgggggccccagaagctcagccggggtccactctcagggcacaggtggagggctgcttccaccccaggtgctgtgcagctgccaaggccagctccgtcaggcagaggctgaaaatgcccggctgcagctgcagctcaagaaactgaaggatgagtacgtcctacggctgcaacactgcgcctggcaggcagtggtgagccctgcaggagcaccctgaggcctagggagcccaagcctggcctgggtgtgctggatagcttcagggagaccccagggccccggcactgctcagcctgctggggtggggggatggttggaaaagatggggggtgggccccatgcggacccagcccgccgcctccaggagcacgcagatggtgcaggccaagcgccagccaccacggccctccggacattcctggaggcgactctggaggacatccgggcagcgcaccgcagccgtgagcagcagctggcccgggctgcccgcagctaccacaagaggctggtggatctgagccgcaggcatgaagagctactggttgcctacaggtgggccccgctgggatgggaggtgtcaggcatctgtgggtctctaagcctctgtgcctcaaaggcttggtgtgcagcaggagtggccccagacagacactagcctaccctgacagggcacctgggaacccccaagctatttttgacatagccagcttggacctggaaccattgcccgtgcccctggtcactgacttcagccatcgggaggaccaggtgaggctagagacccccagaagctccaggcccgggtgccccccacccacccactgccccacactggccccaggcctcatcctgggctcaacagagacctcagccccgggcctctgaggggcttgccttgttcagccaactgaaacgtccccaccacaaacctctgtagcacggcgggcctggggcactgctctcatccccaaaaaagagacccggtggagcctcccaggggggaacatcagagccacagtgagtgccctcatgggtgtgggggaggcctgtgggggatgagcagagagcacaacgcctgcaccctggggcccccagttgctccaccaagcccccgccagacagggtctggtcacagcaatgcactcagtggcacatccccaccctggggtccctccgtgggtcccggcgacactgataatcacaggaaagagaagaggggctgctgcaggtggagctggccttgaacacggaggatcagggagagcacacctgagggaggtttccgctgagacctggaggacgcgaggggtgggagcagggcgcctggtgaccgggccagcccttgcctctgggcctccatgttcccagctgtacaatgggcagggctccccaaggaccatttcctggggtttagggcacacccgtgtgggggtggcatccctgttgatgctggagtcactgtctgggctggccttgtggtttagccctcccccagcagccagcagaccccctgggcccgggctgtccctatacacggatggctccaaggcctggggggggcgccacaggagcacggggggggcccatgcctccctcactcactcccaggtgtcccctcccggctctgggaacctgactcagcacggtcacgtctgtccctgtgtcaccatgccagctctcaaaaccactcctcctttcctctcccctcacaggggcctggacgctgcatcctgggcccagatccaccagaagctccgggacttctcccgcagcacccaggtaggaggcaagggctggcccaggcccatcctcacgccatgccccagctcatggcttacatccccatgccaggcagagctggaacgggagcgggcacagctgctggtccgggccacgatggctgaagagcaactttctgagctacaggagtacgtggaccagcacctgggcaggtgggcagagggagctgggtgtgaccccagggccctggtctggttggaatgaaggatgatggctgcctcaggcgctaaaagcagacctgtccacagctgggcaagtcacttaagcatggttcctctgagcaggtacaagcacgaaatcctgaggctgaggaagctggcaggtgcaggggacccctggaaagtgggggctgtgcctccagccaagccccagcatccaaggaccggcagccactaggccgtctcccaaggagcagagcagagcagagctcctcagccagcacagaaccctcccacccagccccccataaaacatgagtcaggatagaaccc

SEQ ID NO: 6235 - DNA, 646 bp, Homo sapiens
gggctgcaggaccaggactcccaggaggccgtgtccatgtgtgacagcagaaccacatgccccaagaccccagggcttcccccaaaattctgagtgagctgcagggtgtgctgggacccgagtaggagctaggactagccaggacccgcagccgcctcgtcacctccagttgggtgcctctgggttcccactggctctgcccaggtggggtggggtggcccaggcagcagaaggttccctgaggtcccagagcctgttccgttggccctgggccgaggcccacaggtgctgcccttgctgctgctggtcgggcacccaagtgcgtgaggggcttcagcctgtcccggggttgcctgaggcagagcaagacgggttctcacccctgacttctggaggcttcccttgaagctctgtgcaaaaggtgggagacagagctggacctgcaggggtggtcccgccacaaccctgcgtgtggaccctggcaggggggggtgccaggcccctggaaagcaggggttaccgttacgaggctgtggtccggggcaagccaagtacgaagcagcagccatcgcgggctgcatcatcccccagccaggtccccaccaggcctgtctcccagcgtttgtctaataaacgcacccctcct

SEQ ID NO: 6236 - DNA, 975 bp, Homo sapiens
gagccgtggggctggggcagggggtgtcagctgcacagcgggactctagggagatgggcgagcgagcgtctgctcactggctctggggcctcgaggtgccaggcagcatcaggcccactgggttgccccggccaggcctgcgaggaagggctgaggtggggccggcagggggcgccaggcagccgtgatcacaggtgacgaccgcaccgcggccgtgggactgatgcgggatcccgagggccttcctgcccacatgccccgggagaaaccgaggcccctccctcctcctggaacagcttccggctctcaagcgtcaccccaggggcgtcagttttacggactcaaggtcacctcaggaagaggcagggccaggttttgggataggctttgcctccaggatgggctgctcctgggcctggtgagctactgcccccaacctaccctctagaggggctgggaagggccgttctgggctcacctggcctgggagacccatctggtccctgcgtcctctgcccctcactgctctgtgcagatcctgtcgccctcagctgcctcctcccgagacctaatggtccctgctgggctcgagtctgcaggcccggctgcgtgtgccttggcctcactgtaccagtggttccctctctgcccggattctgagctcagtgtggtgtttggtgcacaggggttggtcaggggccatggccaaggccctgccacgcacgcccatccctcagatccactgtgagcaccaacctgctgcagtctcttgggcccctgctggcagctctgccacgtcaccgcctgcctggctcccacacagccatgcattgtcactctgcctccgggaccccagcttgggagctgtgggtctgccaggtcccacctcctctgtcccccatgccacaacctgggctcctggctacagcagggctccagggactccaaataaatgttcagtgactggctccaagg

SEQ ID NO: 6237 - DNA, 675 bp, Homo sapiens
gccccgcacccggcccctctcacaccatcctgtgagaccacgcccggccccactcccaccatcttgtaagactgtgcccagccccactcactccatcctgtgagtcccactcccagccccactcccaccatcctgtgagcccatgcccggccccactcacaccaacctgtgagccccactcccggccccactcactccatcttgtaagactatgcccagccccattcactccatcctgtgagtcccactcccagccccactcccaccatcctgtgagccccacttccagccccactcccaccatcctgtgagccccactcccagccccactcccaccatcctgtgagccccactcccggccccactcactccatcctgtgagccccactcccagccccactcacaccaacctgtgagccccactcccggccccactcacaacatcttgtaagactgtgcccggccccattcactccatcctgtgagaccacgcccggccccactcactctatcctgtgagaccacgcctggccccactcccaccatcctgtgagccccactcctggccccactcacaccatcctatgagcccacgcccggccccactcccaccatcctgtgaaccccactccactcgcacgtgattacagtctgtaaaggtgtgactttataaag

SEQ ID NO: 6238 - DNA, 898 bp, Homo sapiens
acgtgcaccagaaataaaggcgaagacccagcccctcggcggctcagcaacgtttgcccttccctgcgcccagcccaagctgggcatcgccaagagagacgtggagaggagagcggtgggacccagcccccagcacgggggtccagggtggggtctgttgtcacatactgtggcggctcccaggccctgcccacctggggccccacatccaggccaacccttgtcccaggcgccaggggctctgatctcccatccatcccaccctcctcccagaggcccagcctggggctgtgccgcccacaggagttgagacaatggccatcctgacaccttcctccactacagccctgaccatagacccagccaggtagctcttggggtctctagcgtcccagggcctggtttctgttccctcttcaatggtgtgttcccagccaggtcctgaccctcagagccaagtccctgtcacgtctggggcagccaaaccctcgccccacagggacctggacacgcccggccaggatgtggggttggatgggccattttctgtcctatccctcatctccacccccgccacagcctacacgcatcccacacatgcaggcacacacagcctgtgcacacatgtgttcttggcccggtttcatccccccatgactggtgtctgtgaggtgcagatggacacagcgcacacccagaccctccaccaggctgtgacctcgctgcctctgaggccttgacaaggcccctcaatcggaggacagccggccgtgcacactttcatcatcgtcggacaaacagcgtctactgcacatttttcttattcctattcttgagccatagctatggcatattcttctactattcctattataccacttaccagcttactcgaaaa

SEQ ID NO: 6239 - DNA, 1347 bp, Homo sapiens
cccacacagagcccgtgtccctgccagctctgcctgtcgcctcagcttcccgtgcagcagggggtgcgcaaaggcctctgtcggggaccccagagcagctgtgaggggccctgggcttgcaggtcccaagtgggcactgcccagagccgagcccttggtgtccaggccccggaggacagctgcacggctccaggggttcctgcttggggggatccccaggaggagcctgttggggtcaagtgtggcaggtgcttgaagaaccagaggtggggggtatgggctgctgggggtgggggtcccggctggccatgcagaggttcttggccccggtgagagagcagggctggatgggagatgggagccaggggtccggaccaccccagggccagggaggacatctcctctcgcaggctgcctgttctgtgctggggaagcaccccagaatcccagacaaccgttcctttccctggccctggccctggcccggctgccctggggtctccagcctctgtgattccagtgagcctgtgctgccagggtggcaggtggtcctgaggaagagagtcccgggaagacgccagcccctgcaccagggagctcagaaagtgcccgtcaccaggcccagccaaggacccagacgtgaccacagcagccccgaagccaggcgcttattccgagggacaggctggacctccccgcacagacgtcgccgtggcctataggtagttgcagctgcggatactaagaagcagcaggggtcaggcgggcaggggtcgggctgcagcaggggtcaggcgggcaggggtgcaaggtctcttggaagctggcgggggtgtctaatgaatgccagtggcgaccctggttctcagagaaccggggtggggagatgcctgtgagagcctcagacagcaggacctgcatcccgccaaccttccaggtttatttgtttaaaaaacaatgactgagaactgaaagtgagataagatacggtcacgattctctgccaagtgataaaagcctgagggacgctgccagtgccaggtgggagcggaaagagggatgcttggtagaggccagagacacgaaaagcagcgacagcctcgtgctgccctggccacttaggagacaagggggagccaccccatcagaaccgcaccgggcacccccgtggtcggcccgtgctggctttaatcatgagtcaaccgcacaggaagggactggggaacgcggcttcccgcggggacatccctgtgacattccaggcaagcatcgggctggggaggcagcttatcccatgtaactttatccgtttagtggaattccagtaaaaatccaattttaaatgtt

SEQ ID NO: 6240 - DNA, 134 bp, Homo sapiens
tggcaggaatccaagtgcatttcttaaataagttactatttattccgctccgccccctccctctcccttgagaagctgagtcttctgcatcagattattgcaacatttaacctgaatttaaaagcacacgaaac

SEQ ID NO: 6241 - DNA, 313 bp, Homo sapiens
gtcaggcctggggtgtccacctgggtcactggagagccagcccctcctgttcaaaacaccactgcttcctacccaggtggcgactgccccccacaccttccctgccccgtcctgagtgccccttcctgtcctaagccccctgctctcttctgagccccttcccctgtcctgaggacccttccccatcctgagcccccttccctgtcctaagcctgacgcctgcaccgggccctccggccctcccctgcccaggcagctggtggtgggcgctaatcctcctgagtgctggacctcattaaagtgcatggaaatc

SEQ ID NO: 6242 - DNA, 195 bp, Homo sapiens
gggttgcagacacatatatttttgaggctgggtgacgagaaaatctagagacatgagggacataaatgggcctggcagcctcggctctttgcggctgctggcaggactgagctgtccgggttctccccacacttccagcacagctgtgctctgtgtcctgcctcggcgctctcgcaaatgaagctgcaggccaag

SEQ ID NO: 6243 - DNA, 3035 bp, Homo sapiens
cctcagcggggacagccacctcctgctgggcaccctggctccagcgctcctcctgaccacggacatgtcgtcactcgcttctggtgccaccgacgtgaggaccgaggctgggagcccttcctgttacacgttatcatgaggctgggagccccgcctgcgcttggcctgacagcctttcctgtcacacgttgtcacctatctagtcctaccgacggtttcaaggtattttcctcaaaaaccttaaatgcaaacccacagaacccgcctgcctgtccctgaggggcctggtgcctccgggatccacgcggcgctgtgatcacagcagtttgtggtcctgacactactgtgactaggccactgggagctggggtctttcaaagcactttgtaaaccgaggaatttagttagaggttataaattgctctaagctgctttctgtttttttttaatatgcgataatatgaagctttatatgtgtactgtgaacttaaatatttcatatcagtttattgtcaattcatagtatgctaaatatattagatttcatattctgaaactagtacttatgaaatgagtgtttatctagtagtaagacctaggatttttacattttccaattaagtgcaaatagtatttataagcagagtgattatggattgagatgtttttaacttgatggaaggagctagttttcctgagcctgtgtgtgcaccaggcactggggctgatgttccagcctcgtggcgtgggagcaggagagctccgtcctgcatttctgtggtccgtggccgctgtttctgtgcgcctgcgcctcggagagcaagtgaaggagcatcatgggttttgttttctcccttaaccctctgaaagacagtttgatactaacaaaaaacgcagcagaggggatccgacgtcagagcttttagaattacttttttaagcagctgtcttctggctgggtgcggtggctcatgcctgtgatcccagcactttgggaggcgggtggatcacctaaggtcaggagttcaagaccagcctggccaacatggtgcaaccccgtcttagtaaaaatacaaaaattggcctggcgtgagagcgggcacctgtagtcccagctactcgggaggctgaggcaggagaatcgcttgaacctgggaggcagaggttgcagtgagccgagatcgcgccaccgcactccagcccgggtgacagagcgagactctggctcaaaaaaaaaaaaaaaaagctgttttctgattactcagagctgtcctaggcaatggtgctttgtagctccttggagatgtcgctgggcgtcctggcaggggtcaggcagtgaactgggagagtggttgcctccccagcacccgtgaccaccctggtcctgctcgtgtgggagatgctcgggccgtgtgtgcgccagggtccggggtgccgggtgtatgtggcagtcacctgacccgcgctgccagttatcatcggagctcatccatgtggccagtgaggtcacaggagaggacccggccacagcctctcagtggcctggagcacacgggggaagcgaccccccccaggtcccggctctgctgtggtcccctgtcccgtctgcccctggagcgacagtgtggtttcggccgcagcagaaacgtgactgagaacgcatccccgcgatgacctgacccttctgctcagggctgggactgtccctaggagttgagcaggaacaggcatctgtggtttacggcgacctggctctccgcgggccacgtgggtggtgagggcacacgagtgggaagcggcaccgacgtgtttctccccgaccgtggctttgccaaagacttttaatagcattttttaagtgcaaaacgtctaggtaaaaatctttatcatcagtgaccaaattagaatgtatttaatatagtaggtggtttaagaactgttttaacgtaagacaaactgatagcaacattctgttgttttaaaggaagtgggtccgtgacattctgcagctagtccactactccaaggtaactatcgacttggtttcagtgaatctattttgtttttaactacagtgatttattagctcagtatctagaaattacgtatattttgtgctactgtcatcgatgtgtaaactctgtttttatttgtatttatgcacttggttcccatttggagcctctggtcttttctgggataagtggtgtctgccgagacatctcccggttgtcagtggtcaggagcagctgagctctagtctgccagctgctctgctctttctgggaaggaggtggcgcccgcccctcagggtgtctccagggctcagcttccggggtggtagagctggggagccccaggggtggggggacagctgggagatggaggtggcacctgctcccctagatcagtactggctctgaggacaggtgagcagtgggaagaccaaagaatggctggcagcgctgccagggttggaaatgggggcaagatcctggggctgtgtgccctggggcctccctcacctgtcttggtggccatggcctcagggatggctcctaggtggctgaggcacagcagtggctggaaggtgccccgtggaggctgaggtggaggcgcgcccagcagctcccccctgtggccatggcgggcacggggcgtaggagctggctggcggccggctctgcatgttcttgttgcctgtcgtctgtaactctagtgttcgacattcgccgtgatacagtggtgtcacgacgtgtgtaactgtggtcagcagaccttgttccgcgtggacgcctcaagtggattaatttctggaagcctcaatctgtatgtttgagtatttacatgagaatgttatttgaatggaattttcttaacccagaaggtagtatttataatcatttacttgtagcgaactgtttaaagttaacacttgtttaaatttttttacactatagcatttatgcaatggtttacagaattcatggagttatttttatcagtatgggaattaattaaaaccttgaatcttt

SEQ ID NO: 6244 - DNA, 536 bp, Homo sapiens
gccccagctgtcccctgggtctggcttgtgggtttggcacctcgcagcctgcttgcctctgaagcccctttctcctccttgctccagcccggccttctggttgtgcctggcctggcttgcctcctgtctgcagtttgcacctgagaggggggtgggggggtgcagaccccacagggtgtctggatgcctgggccatggccttggcctccctgaggccctgtctgtgtccagctcttcctttgagcagagagccaccctcgcctcttttgaatgacctggtgctgcctcgcatgccccggagagcacctgtgcttcctttgggaaggacgccccactccttgttgttatgccacgttcagtctccctctgagcagcttccgagtaaaggacctgaacggctgtagaacaaaccacaaattagtgtctgagattttgtcatcgcccgtcatggaaagaaaataaaaattattttttcaacaggcacttaatgtgtcccataaatacaaatcagttacaataaagcagctagagattcc

SEQ ID NO: 6245 - DNA, 1287 bp, Homo sapiens
ggcccagccctgcccataatgggcactggcgctggcaccccggcccttctgcatttcctcccggagtcactggtttctcggcccaaaccatgctccccagcagtggcaatggcgagcaccctgcagctgggcgggcaggcggcaggcgcggaactgaccctctcgcgggactgaccctgttgtgggcagtggtctccccccttggcgcctccttgcgcaggcccagcctccactctcctcgtctaggtttctttacctccagggatcagctgtgtgtgtgtgacctccctaccgggctatcggcctcttgggagccagcggcagggccggcacctgcgtgcctgtgcccgtgtgcgtgagacagagcccttgcccctgctgctgccccgagggctgccctgccctggaagggcccctctgcctccacaccagtggagtcttcgagacttgggagctgcttggcctcattttcagccatgagcagacggcctgtggtccctgggcctgaggcacggactcgtagcaccagggtttggaggctgcgaccgccccggagagcagcttcacactggcgccacagaggagccccacgtgcactccccggcctgcatccggcttgggtacacaggcccagaggactggggtgactcacgggccctgtgctgtgatgttgagagctgagaaaaacctccaaggccctgagccccatgcccagccctgccttggtcccccaacccccagagcttggagtctgggccccacacccagccctgccttggtccctgagcctcagagcgtggaattgctgccctgtggacactggctgggaaggcaggtcttcccctagcacatggggaccccggcctcgagggtgacctccctaccccgcccctgccagccaccaagcgcaggtgcagcgggggccagactcctgccggcctcagaggacacctggcccagcacaggcagctagaagggccggtgggcaccggggccgggaagcccccacctcaccacctgagggcccctgggaggctcctctggcctggctgggctgggtctggggccgccacaggcccctcacggggcggcagaggcaacttcagtgtccctgttagagcaacacgggtccctccgtggggggctgggtgcggccccctgccgtgtatttcctccccagggagtggggcctccccgggagctgacgccaccaccctgcttagccctcacagggccccaaggtgtccgagtgtgttgggtctgaacgcgaaataaagaaatcctctc

SEQ ID NO: 6246 - DNA, 514 bp, Homo sapiens
ggggcctgggccccaggaccagcgtgctgctgcagaaaggcatcttctggaatttttttgtcagctgtggcaaagccagcatttttgctgggaaaaaacatgtctgtgttggaatacgcgacagagctgggcgagaacgcagcggcccgggccggcggagggtgtgacccgtctgcaccttgctctgtcccacctgcctctgggtgcccggcagctccactagatttttggattcattcctttgaagggagtcgggttcacccttccatcgtattctcccaactacacattgtaaagcctgagaaacttctagaacctcaggaagctgcagctggagggctggggcacctgcccccctgctccccacacatcatatcctccccatactcctgcagggcccacggctcctgagcaacagctgggacacccgggccttggcggctgcaccccctgctaggctctgcccaccggccaccaacactcctgtaattccaataaagcagtttattttctg

SEQ ID NO: 6247 - DNA, 328 bp, Homo sapiens
cccggcagatgcgcgtcacagaggctctcacactccagcctcctccagggcccaggtgggcgggcttctggccccaccccacagcgcttggagcatccctttggacgggctgctgaacatccacctgtctggacgttgcatggagggtggcgcaggcctctccaatccctggcgtacagggtttcctgcccgaggagctgctccaggagcctgcgcggctcgcctggaaacgtgccaggacactgtcctggtgcccagcccaacgtggtccaacgtttttttataataaagtcctcgttttcgtttcgatttgggcccaggaacaggc

SEQ ID NO: 6248 - DNA, 325 bp, Homo sapiens
aatgccagaaccagcgggtggccttaggggctgtgaggcagtggggaccttattgatgaaagaaaccgtctttgcgttacacccgagtctgcctctcggagcagggagctcaccttccgcgacgtgttctgagggtctgcatcttaggggggagggctggggcaaatcgccacctgtgcctttcctctggccctgctgcccccacacccaactccgagggcccacgctggggaaagcgggaagcgctcgctccctttcccccattagtgctctctctgcctggatcccggcagaagctatgaaagggaataaagagaaaagaagt

SEQ ID NO: 6249 - DNA, 384 bp, Homo sapiens
ctgacttcccagtggaactgccttcttgggctgggacagcccctttcctctgtcccttctttctctgtcccttccttccagccacactccagggcggagttggatgaggcccgtccggagggagccatctcttgctcccgaggctgggacagtcctttctgtgggggctctagggcccctctgctgctgtgctgggtggggaagcggctgccctgagccccaggtcttgtgggaggctgcgaggacgagagcctggctggagcccgcgttgctgttcccacagggcctcggtttttcctaacttgctctgcatgctgtcagcggctgccccgccgtcatagacttaaaggactgcaataaatgtagagttgatgtctaacaccc

SEQ ID NO: 6250 - DNA, 180 bp, Homo sapiens
ccaggtccccggactcaagccccggactcaggcccccacctggctcaccttgtgctggggacaggtcctcagtgtcctcaggggcctgcccagtgcacttgctggaagacgcaagggcctgatggggtggaaggcatggcggcccccccagctgtcatcaattaaaggcaaaggcaatcg

SEQ ID NO: 6251 - DNA, 179 bp, Homo sapiens
ggccgccctgcaccttcagcggatttggggattaggctcttttaggtaactggctttcctgctggtccgtgcgggaaattcagtcttgatttaaccttaattttacagcccttggcttgtgttatcggacattctaatgcatatttataagagaagtttaacaagtatttattcccata

SEQ ID NO: 6252 - DNA, 268 bp, Homo sapiens
aacggtctatcattttgaactctggaaaagtataagagttttaactccctttaaaatggaatattaatttgaaaattatggggaaaattgcattttgtttacatgtggtgaacatgtttctagaaattgttatggtggaggtggtctgggtgagtctgaaggcctctctcatctgacctcccttcttagaaggcctcctactgtctttgccttgtctcctcccaagttggaaaatgtttacatgaattaataaacagatttaatcttc

SEQ ID NO: 6253 - DNA, 124 bp, Homo sapiens
gcggcaccctggggatgctcagcaccttgattgacacccgctcgcctggccagagcgggctgcgtgcacatgctgggcagagaggaatatttaagaaataaagcttggacccagatttttccac

SEQ ID NO: 6254 - DNA, 879 bp, Homo sapiens
gcgggcagcccacacccaccccagacggccaccacactgaggccacacgttggccattccaccttggagttggaaccctgggcgtcgagacaggaaggcagggcgcagtggttgaaacatcaggacactcccaaggccccggctctgaacaagaccttttcgtttcttggaaaagagactcatttgctgatggttcatgccttctgctgggacaggcctgggctgtgcagccacactgtcggctgacttagccccctgctcactctaggtgcctccaggaggtgagccctgggtgcagctggtctctgaatgacgttacaccctcaccttcttttcctggccctgtctctggactctcccctgtgaggcccaattccaagacagactctcgtcctcaccgaagcttaggcccacatctcccaggctgcttaggagacagaatggaaacggaggccgcccctgccagccgccctggccctggtcactgcatgatccgctctggtcaaacccttccaggccagccagagtggggatggtctgtgacctgctgggaaggcaggctgatggggcacacccttggcctctcgtccacgaggggagaaacctaaaccctgtttcacaatctgtgcggaagtagcttgcctcacttctgcttaggaaagcggctgttgctccataactctaaccagcacagggctgaggcctgcagtgcacacctgcagggaggcccttcccaaggtgtggtgactgtgccttactgtacatgctcggaggcctggccatataggagggtgggtgatgctgaaatcaccccccatcttaagtaattactttctggagtaatcaggtggaaatccatagacaaatgaaacattcaga

SEQ ID NO: 6255 - DNA, 257 bp, Homo sapiens
gctgtgtggggtggatgaaccctgaagcgcaccgcactgtctgccccaatgtctaacaaaggccggaggcgactcttcctgcgaggtctcagagcgctgtgtaaccgcccaaggggttcaccttgcctgctgcctagacaaagccgattcattaagacaggggaattgcaatagagaaagagtaattcacacagagctggctgtgcgggagaccggagttttatgttttattattactcaaatcgatctctttgagc

SEQ ID NO: 6256 - DNA, 37 bp, Homo sapiens
ggtttttatacaagaaaaataaagtgaattaagcgtg

SEQ ID NO: 6257 - DNA, 134 bp, Homo sapiens
gcgcgaggatcccgatgaggggatggaccgcgccatcccagggctggggaggagcggggagggcggatctccctggccagcagggatgggagggggccatttgctgttcctctgagtaaagcttgttctgcatg

SEQ ID NO: 6258 - DNA, 465 bp, Homo sapiens
ctcccgccagcgtggccagagctgtcgcaccgtgagcgtccttcctccttcctctccgggctgccaggcagccaggtaaggcctggtgaggccacttggcctcttggttggccaggcccaccaggaagtcaccaggacagtccacccgccctgttggcacactcaagcgggagtccacccctgcctcagtggtgggccagtctcggtttgcattcttgtgcttttgggaggtgccaggggagggaagggctgggatgctgggacctgttgttgctggcaaagccagaggtcacagtggcctgatctgggccctcccaaagctgagggctgcagcccgtggggcctcagagctgaaagctgcggcgccactggtgccagagtcagatgtcacagatgtgttgtgtaaacagttggctgtttcatgcttcaagaatgttcaggattaaaagcagacaagaaattgtg

SEQ ID NO: 6259 - DNA, 109 bp, Homo sapiens
tggccgcatggctctggccgaggtgccgctgtggccaccgtctgtgaagtggctttacgcttcaggaagccacgcctgttgaataaagctttggtgtgtttgcagatgg

SEQ ID NO: 6260 - DNA, 1017 bp, Homo sapiens
tcctccttcctggcgggggtgggccgtggagtcggagtggacaccgctcagtattactttctgccgctgtcaaggccgagggccaggcagaatggctgcacgtaggttccccagagagcaggcaggggcatctgtctgtctgtgggcttcagcactttaaagaggctgtgtggccaaccaggacccagggtcccctccccagctcccttgggaaggacacagcagtattggacggtttctagcctctgagatgctaatttatttccccgagtcctcaggtacagcgggctgtgcccggccccaccccctgggcagatgtcccccactgctaaggctgctggcttcagggagggttagcctgcaccgccgccaccctgcccctaagttattacctctccagttcctaccgtactccctgcaccgtctcactgtgtgtctcgtgtcagtaatttatatggtgttaaaatgtgtatatttttgtatgtcactattttcactagggctgaggggcctgcgcccagagctggcctcccccaacacctgctgcgcttggtaggtgtggtggcgttatggcagcccggctgctgcttggatgcgagcttggccttgggccggtgctgggggcacagctgtctgccaggcactctcatcaccccagaggccttgtcatcctcccttgccccaggccaggtagcaagagagcagcgcccaggcctgctggcatcaggtctgggcaagtagcaggactaggcatgtcagaggaccccagggtggttagaggaaaagactcctcctgggggctggctcccagggtggaggaaggtgactgtgtgtgtgtgtgtgtgcgcgcgcgcacgcgcgagtgtgctgtatggcccaggcagcctcaaggccctcggagctggctgtgcctgcttctgtgtaccacttctgtgggcatggccgcttctagagcctcgacacccccccaacccccgcaccaagcagacaaagtcaataaaagagctgtctgactgc

SEQ ID NO: 6261 - DNA, 1367 bp, Homo sapiens
acgccgcctggccgggccctcccgcgccgcccgggccctccccgcacactgacctatacctcaggatgggcgcgtctgggcgcggcgcgagcggccgggcagggccctgcagaagcacaactccggcccctggacccgggccggggcgcccaccggggaccgcctggccgggggctccaagggctctaggcagaccctgcgcccgcgggtcctccccacctgctgctccccgtgcaatacctgctgggcctcctgcccgcgcgggaggggagggcgccccgggaccagggatggggcagcgcacaggcccgggcccagcacagaactgcccatcgggacgcccggccagccgctcgggcgcagcacaagggacaggggaccaaggtcagggcccccctgccccaccgcacccccagaatataagctatcaagagtattaatttattgggaatgagctgaggcggatttccccagagaaacaaaaaggtataactttaacaaatatatatttaaagaaagaaatattattgattctatagaaaaccatttaccaactgaaaggacacgaagtctagctccggacaaaagctgttagaggcccaggctgtctgcctgcggtccttcctccggccagagtggaggccccaggctgctagcacaggtggaaggctggggcccgggggcgggtgctctgccgggggctcctccgtgcttctctcctaagttctctgcgccccaagaactcgaggttgtgccttgctctcggcggccgtgtcctcctcctggcgtggctgcgtcccagggcgcgggtgggtttggtgaatgtgggtgtgtcagcgtggcagccacgtggaagcagggcatgtagcaggccaggccacgggcttgcagctcctctgagggtgtgcctggccccctctccaggggctgtgcaggcagcccatccaccccagtggagttcccacggacgcttctgctcatggtccaaggctgtgttgtgtggtcattctcgccctcccttttcctctctcctcctgccccctccaagaagtactgactggtctcctctatcgtgtttgctgatccacagtgttgggcacaactttgacgtttcttaaaaaaaaaatttaaaaaatgccgaaaaccagcgattgtggtgtggggcgggtggaggcggctggcggaggtggcgtcccggcgtgcagggccccttcctgctgtctcaccccgtgtttccctgcgagtggacgtgcccagctgtccccccaggcctctcctcagagggcggcacaggctgggctccagcaggtgggcaggggaggtctgggcaaggcgctgccgtcggctgtcaataaacagcaggaaac

SEQ ID NO: 6262 - DNA, 109 bp, Homo sapiens
gcccccgacctggcccagcctggcccgtccccaatccagtgggctggccaggccacctgcaccagggaggacagctgctggcagggactaataaacccttccacctggc

SEQ ID NO: 6263 - DNA, 82 bp, Homo sapiens
cgattgggctgccacaggcttacggccacacgtgcccctgtgggtcccagggaggtcttaaacaaggtatttttcaacttaa

SEQ ID NO: 6264 - DNA, 841 bp, Homo sapiens
acaggccactgaagctctcgcccctgtaacttataccccacccagctcagttttgtcacttttctagccaaaggaagaccagtaggaaagcaaacccttgactctggcaggatttgcaggcagcaggcagcacccctctgccagccgggccccggctgcagaagtgctgttggtttggatgctgtgtgcctgtcaagattccctccggttttctggctagaaagctcatccgtttccggtttctaagagtcagttcagtggcagagccaccagggaaaagtgaggctcttgggggtggtttgaccctgcttacctgggagcacacttttcccttccccgatgacctgggatggtggccaggccgtgcccttgctgttgctgggcagtgtccttttggaaagggagctgccccaggctttagtgcagctgccaaccctgttaggcctggcctctcgaggcctcttctgacctcaagggtcacaccccctcaaagatcctctcacccatggtagttgctgctcgtggttctgtctgtccgtgcaccgatgcacacaccgcaccccaccactgtactctgaaattggcgagtgagtggagagccagctctgcggagtcatcacgcagccatggttgtgcctgccgttcatggtggtctttcaggttatcttggcaacatgtacattgcttttattttttttcttttttgctttcattgtacagtcagtactataaaatttctcttttgagttttatacctttgtagcattttagatgacattgtgtttgtactttgttgtgtagagtggaagaattgtgttgaataaacccaagatcggaatgc

SEQ ID NO: 6265 - DNA, 796 bp, Homo sapiens
ggggtggcggctgtctcgccatcaggcagggacaggacgggcaagcagggcccatcttacatcctctctctccaagtttatctcatcctttatttttaatcacttttttctatgatggatatgaaaaattcaaggcagtatgcacagaatggacgagtgcagcccagccctcatgcccaggatcagcatgcgcatctccatgtctgcatactctggagttcactttcccagagctggggcaggccgggcagtctgcgggcaagctccggggtctctgggtggagagctgacccaggaagggctgcagctgagctgggggttgaatttctccaggcactccctggagagaggacccagtgacttgtccaagtttacacacgacactaatctcccctggggaggaagcgggaagccagccaggttgaactgtagcgaggcccccaggccgccaggaatggaccatgcagatcactgtcagtggagggaagctgctgactgtgattaggtgctggggtcttagcgtccagcgcagcccgggggcatcctggaggctctgctccttagggcatggtagtcaccgcgaagccgggcaccgtcccacagcatctcctagaagcagccggcacaggagggaaggtggccaggctcgaagcagtctctgtttccagcactgcaccctcaggaagtcgcccgccccaggacacgcagggaccaccctaagggctgggtggctgtctcaaggacacattgaatacgttgtgaccatccagaaaataaatgctgaggggacacagtc

SEQ ID NO: 6266 - DNA, 197 bp, Homo sapiens
gacccccggggccaggagccccttgagcagagctctgcacccagcctgcccgcccacaccatcctgctggtcctcccagcgctgctgttgcacctgtgagccccaccagactcatttgtaaatagcgctccttcctcccctctcaaatacccttattttatttatgtttctcccaataaaaacccagcctgtgtgcc

SEQ ID NO: 6267 - DNA, 575 bp, Homo sapiens
ggacccccaagaggcccatttcccccaataaaagagatttgggagtctgcctggttgctgcctctttttcccgcccctccctgggatgggtcccactccctgtgggctccttttggggcttgtgcttggcagttcctgtgctgtcctgtctcccagatcctgagaccctggctgagaacttggcccagcctgctgcttaaaggcaccatggggacctgggttgccctgagacccaagccattgttagcagctagccagccacaccaaccacgccagggggaggaaagggaaggactgggagagacacaaagaccagagccagcctcagggacaagagattccagttttaggcctttctccttctaagtgccccccacccccatagcctgcatgtccactcccagacgatggccaagagcagaaacacaagctggagccagtgtcctggtttgacagcatgttcaacgagggaaccccaagacggacccacacaggtccacccacgctgggggctgtaatcacggagggaagtggctgcccccttaacacacctttaataaacagtctacagaccc

SEQ ID NO: 6268 - DNA, 691 bp, Homo sapiens
tgctagccggtgaggctgacctggagccagctgctggggtccctcagcctcctggttcatccaggcacctgcctataccccacatcccttctgcctcgaggccaagatgcctaaaaaagctaaaggccaccccaccccccacccaccacctcctgcctcctctcctctttggggatcaccagctctgactccaccaaccctcatccaggaatctgccatgagtcccagggagtcacactccccactcccttcctggcttgtatttacttttcttggccctggccagggctgggcgcaaggcacgcagtgatgggcaaaccaattgctgcccatctggcctgtgtgcccatctttttctggagaaagtcagattcacagcatgacagagatttgacaccagggagatcctccatagctggctttgaggacacggggaccacagccatgagcggcctctaagagctgagagacagccggcagggaatcggaaccctcagacccacagccgcaaggcactggattctggcagcaccctgaaggagctgggaagtaagttcttccccagcctccagataagagccccgccggccaatcccttcatttcaacctaaagagaccctaagcagagaacctagctgagccactcctgacctacaaagttgtgacttaataaatgtgtgctttaagctgc

SEQ ID NO: 6269 - DNA, 366 bp, Homo sapiens
ggcgcagcgggacgcggggctcggatctgaaaggcggccagatccacatctggatctggatctgcggcggcctcgggcggtttcccccgccgtaaataggctcatctacctctacctctgggggcccggacggctgctgcggaaaggaaaccccctccccgacccgcccgacggcctcaggccccgcctccaaggcatcaggccccgcccaacggcctcatgtccccgcccccacgacttccggccccgccccgggccccagcgcttttgtgtatataaatgttaatgatttttataggtatttgtaaccctgcccacatatcttatttattcctccaatttcaataaattatttattctccagtg

SEQ ID NO: 6270 - DNA, 255 bp, Homo sapiens
gtgacatcaactcagagcctcctcggggctccttcccctcctttgagcctcggaacctcctcagcctgtttgaggacaccctagacccaacctgagccccagactctgcctctgcacttttaaccttttatcctgtgtctctcccgtcgcccttgaaagctggggcccctcgggaactcccatggtcttctctgcctggccgtgtctaataaaaagtatttgaaccttgggagcacccaagcttgctcatgtggc

SEQ ID NO: 6271 - DNA, 647 bp, Homo sapiens
cgtggaggggaatgggggctccgctggcgctagagccatccagaagtggcagtgcccaacagctttgggatgggttcgtaccttttgtttctgcctcctgctatttttcttttgactgaggatatttaaaattcatttgaaaactgagccaaggtgttgactcagactctcacttaggctctgctgtttctcacccttggatgatggagccaaagaggggatgctttgagattctggatcttgacatgcccatcttagaagccagtcaagctatggaactaatgcggaggctgcttgctgtgctggctttgcaacaagacagactgtccccaagagttcctgctgctgctgggggctgggcttccctagatgtcactggacagctgccccccatcctactcaggtctctggagctcctctcttcacccctggaaaaacaaatgatctgttaacaaaggactgcccacctccggaacttctgacctctgtttcctccgtcctgataagacgtccaccccccagggccaggtcccagctatgtagacccccgcccccacctccaacactgcacccttctgccctgcccccctcgtctcaccccctttacactcacatttttatcaaataaagcatgttttgttagtgca

SEQ ID NO: 6272 - DNA, 236 bp, Homo sapiens
gtgctggtggacagtgcccctcccaccttccttcttccccacaacagaagagaccagcgactcccgcaaagggacaaggttcctccctctcctgcagagtaggcatctgggcaccaagaccttccctcaacagaggacactgagcccaacggagttctgggatgggaggggtgggagcatgggaagggaggcatcccacccccaagaagaactgaataaagattgctgagcaaagg

SEQ ID NO: 6273 - DNA, 197 bp, Homo sapiens
cttggcccgccttccgccagccgcgccctgcgccacctacccggggtcctccacagcggaggcctgcaggaatgtcccttcccaccacaccccacttccctctccttccactttcacagctgtccttccctggccgaggcattgctttctggcctcagctatgtaattaaaacgcccgaagtaaaatggccttctcc

SEQ ID NO: 6274 - DNA, 1544 bp, Homo sapiens
tactgggaaccctttctgggtctgatggtgctgcctcaacctgagagctttcataagtagttctgaattcccaagctgcctaaaaaggtataaatgtgtaaaaatctcattattgccaaaattggataaatgcccatcttagctaaaacctcaaattgctagaaaattcacagggaagaaaacatttcaagggctatacctcagcatctaggctttttggactaaggagctttcctttttgaagttatatgataatgtacaggtcacagatcccctttcccaacactttgaagatgaatctggagtctgcttacttggaaggcaaagagtgacttgtgtctattgaaagtatatccgttttccccccacatggggattcatacttgagaaatagtgcaaagatgcttatctggaactgtgttctggtgaaagaaccaaattactggcttgttagccaacagcttctgatagcaattcatataaccctctaagaatacctgtttaagtcttgagtgttgaaaggaattgtttactttggaatataggaaaacagttgaatgtcagactctcatttgtatgtgatctaaatttgcaatcaatttcaataatatttacaatttgtgataaaactgacttttacagattccttttcacaacataatttaggtgtctactgttcttattgtattttgttctgctgttgatctctccagcagccgtctcatgcttctcccttgctaaaagaagtttggattactcaggcagggccatccagccccaccactagaaaagctcttcagaatcttgtccctctgttgagcccagatctcatgtgctacgaaggaaaccccaagacccagagaggaagggtcaacctggaggcaggaaaaagttggcttggatccatgtctcatcaataaccttaccatatgcttaggtcccctctatgctgtcatcagacctttggcaatggggtggtcactacctcacaaggcaaagtgttgtatgattagaaattacgtctccagtggttagctcacattgcctctcaagagacaggtttccaggtgtcttcattgtagtgggtattaattgtcttcagcctcttgatatccataccttcctgtcctctgcctagaagcaaggccagcggtgcctttacggactgatcgtgtggtgcgatttagggattcttcagttttgcttgctttaggtttccaaaagttatacattggtgttttgattggaataaagaaatcctataagctatttgggaaaaattatagtgtatgtttcccatccagaaacatgcctttctatttattagagtattatattcctgtgaaaatttttctaattttcttcacttgttttacacaattttgttattgtagttttttccattatatttttatagttgattattgcttttacatgggaaagttatttttaattatatatttgtatagtcatctcactgttgttaattttcaatagtttgttggtttagttctgttaacttttggtaaaatgacaccatctac

SEQ ID NO: 6275 - DNA, 1113 bp, Homo sapiens
atgcccaacactgcatctctcttcctgcttctggccttgtatcttgcattcacactcaatagtcacggaatgccgactaggtgctagctgctatgggaaatgcaaaaataacaaaatagttactgtgcccacggagcctacccgattatagcagaggtaagttaggaacgaacatgttagtcaatccgggtgaagacatgtactgatgacacaccatggatttcagaggaggaagtacggagtcgttgcataatccgcccctggtgggtggcactctcaggtgctcctgaacagaagatttggccctcattttccctcagaaccccacggcaaggatatatgtccccttgttctctctgcttctgtcttgaggatatgggaagcctagagaaacgcaagcagactggattgggatagaagtatttgtgtacctggattaatgaactatgattttttttttttttttttgagaccaaatcttgctctgtggcccaggctggagtgcagtggcacgatctcagctcactgcaacctccacctcccaggttcaagcgattctcctgcctcagcctcctgagcagctgggattacaggtgcgtgccaccacaccaggctggttttcttgtatttttagtagagacgggggtttcaccatgttagccaggctggtctcgaactcctgacctcaggtgatccacccgcctcagcctcccaaagtgctgggattacaggcatgagccactgtgcccggcctatgattcttttttttttttttttttgagacaaagttttgctcttgtcacccaggctggagtgcagtggtgcaatcttggctcgcaacctccgcctcccaggttcaagagattctcctgcctcagcctccgaagtagctgggattacaggcgcccgccaccatgcccggctaattttttgcatttttagtagacatgaggtttcatcatgttggccaggccggtctcaaactcctgacctcaggtgatgcacccacctcagcctcccaaagtgcagggattacaggcatgagccaccatgccgggccatgattcttaagagaattgactgggcctcatgaataaaaaaattagaaaatct

SEQ ID NO: 6276 - DNA, 131 bp, Homo sapiens
attttgtgtttaaagatttctgccattatatgatgtaggccagctgtgaattgtcttgttttagcaactgacattattttgtatatcagtgcccatttatataatggttataaaatttacagtttgaaaat

SEQ ID NO: 6277 - DNA, 766 bp, Homo sapiens
gtgtgtcggtaaactgtcagattaagttcctcaggtcagcatgtatgagctttcttctgctgtggagagatctagccagtccctgactttgcaacagacctactgactactggatcttaagacccatgtctaggaccaggagtcagcataaggacgctgacctctcctggctgtgcctgtgactccagagtcctatcttactgtgacttaaagtttgatggagagaaagctgtaggatccataaattctaccaggaaaccagggtcttcctgttcctagcactgagaatgggcacccagtggtccaagaacactttctgggctaacatagtcctcacacagggctgagaaagaaagtgtctcctttcctggaaagcacatgtaaaagttaagggcctgaatctcttctaaaccaataattgacctctaggcacccaccgtaatactgctaccttcagggcagaagacactgctctttgtaacccagccaccaccaaaaagcaaacagaaagaaggaaggatggttaagccattggataatactgaatctgtttccctaagtgacttaaccttagagcaagcacaacatccaggttaattttttgtaagatttctccttttattattgccctcatcatagttcctgattgtctcttaaagtaagtggtttatagacattactatttctgataataatttacaaactactataaacaaatttataaacattactaatttctgatgaaaataaagttgtttctccctcc

SEQ ID NO: 6278 - DNA, 313 bp, Homo sapiens
agtaaatataacaaattgttattagtgattgggcttttcagtatctgtatggtgggaagcagttactgtatatgtcccaggcaatgtgctaagcactttacacacattcccatgtaatacttaattctcagcacaaccgtgatttaggcagtatcatttccattttataagtagggatgcaaaatccgtgtcactaaactagtgaatgaacccaggatttgaactcagttactgtacaactgtgagccagaagaagatacacaacttttgtttaaattcaattttcattaaaatgaaggctcttgctaaagtt

SEQ ID NO: 6279 - DNA, 2787 bp, Homo sapiens
tcctggtggacggatcaggagaatgggcagatgctcagctggaagcttttgaacagaaaggccgacttctggggggcctgtctgggagctgggaacgctgcttgctcagcacgagagccgggctctgcagggaggaaggagaggtgctgccggaggaggtcgtgagctcctcttctgctgcaggagtggtccaggcagggggtgacgggtactctgttatggcacagagaagggaggggccacccccaagggactaggggccaaaggcctgaaagctgagcagtacaggaggctggttccagctttacaccctgaggacttcatgtgtccccaacctttaaaaatgtttattactgcccctttccactcacctggttaaaaatcatcccatgctctgagatgagctgccacctcaagcccgtgaggagcatccgtttggtaggggtaacagaggggacccttctttatcttctcaagaagaagatttcagggtatcatccttacagacatgaaaaagctatgggaaaattgtgaagataaatgaaagttttaattctaggattctggaaacagagacagtaagagttctccaaggattttgccttttttgtttgtttttgagatggagtctcgctcttgtcgcccaggctggagtgcagtggcacgatctcagctccctgcaacctccgcctcccgggttcatgtgattctcctgcctcagcctccccagtagctgggaatacaggcacccgccaccatgcccggctaatttttgtagttttagtagagacggggtttcatcatgttggccaggctggtctcgaactcctgacctcaggtgatccatcagcctgggcctcccaaagtactgggattacaggcatgagccaccacacctggccccattttttatttattacaaaatcaaagacatgggtgatgcctggcacatgttgtctggagtctggcacactggttatcaatagcacattcagtgtattcagtgatgtcattctttatttatttttgagacagaatctgtcacccaggctggagtgcagtggcatgatctcagctcactgtaggctctacctcatgggttccagtgattctcctgcctcggcctcccaagtagttgggtctacaggcacgcaccaccacacccagctaatttttgtatttttagtagagatggggtttcaccatgttgatcaggctggtctttaactcctgacctcaagtgatccacccacctcagcctcccaaagtgctgggattacaggtgtgagccactgcacctggcagtgatgtcattccttactaggcttccaaagccactgctgtggccacagcttccatggagacaggcaagctgagcctctatgtggcaccaattcctgcagctgtttgtgttggagggaaaaaaatccaaatggacatcaacagctttcatcaactaaataaccacagaaaatatttatgaagactataaagcaatgattacttttgaattggaaaggaatcactattatttgaaatgtttcttcaaaagtgagcatccggacaggaaccatcatggatgctgaggccatggatgaaggcctactcgggaagatgatatccttgcagtctcaaaacggcaccccacaaaggtgatatcctaatttacaaagggaaaaaggtaccttaatctgaaatctggcaaatgcagcctcaacagaagtgacagaattgaacatcgccaataatgggacacacagacatcacatgcccccagtctgatgcaccacggagtcgtctctgatgtattcttgtcaaaaaatgtttgcctgattctaatcatgaaagaacaattagaaaaaatccaaattgacagatattctgcagaataaatggcctgacctcatcaaaaacatcaatgtcatgaaaaacacaaaacattgcagatagcgtgaaattaaagattacagagatataatttaatgcaagatctctgactggatcctagactgcaggaaaaagtctgctataaagaacatttggatcacttgtagtagctgggaaataaaacaaaacattatttgtaaaaggggggaaatctgaacatgggtcttgcagtatttatgacagtttttgcggggcagagatttctagattgacagctgttttagtactttcaaggtgatgctctgtctgctggtttgcattgtttctgtctgagttaagagactggcagaacacagagttgcagtagccaaacactggagaaagctgggccctacagaaacctaacgctgaagaaacctcaggagccaaactggtggagaaaacaaagagtcctccctctctcccttttcaaataatgatcatacatcttcaagctgtctgaaatggttaaggagttcagtctgtcgtcaggcacacaccagagccagctagcccacacagaccccatcagagcaaaacagacaagagaatttaattcatatccacatagaaaggacttctaggtaggaggtagaccctttagctcccttccaattaaaggagtccccaattctggcacctgagagtcccctgggtctaacagctatgatatttatgtagtgtgttgcttacctaaatgaatacaatttccttccagacacgtgacactgatattaaagtgctaatgagagggatctatttcttcttgtacgctaaaagagaaacagcagttcagatttcccatcagaagtccgaggactttgttcttgataactactaccaataaaaattgagtatttg

SEQ ID NO: 6280 - DNA, 1160 bp, Homo sapiens
tggggccatcccgaccccaccccaacctgccatcagcagcccccacccccgccatttgcagggaggacctgggacacccagcgtgggtcaggcctccacaggcatttctgggcctggggaccacatcagctctgcgctgtgatgatgaccacagcccaatccagggcttcctcctctgggctctgctttctagggtggcatttggagcatgtcacccactggatttacagactccagccccttcctctgtccgtgctcacagtgtgtctccctttttggttttctttttttttttctttttgagacagtcgtgctgtgtcacctaggctggagtgcagtggcacaatctcggctcactgcaacctccgcctcccgggttcaagcaattctcctgcctcagcctcccagatagctgggactacaggcacacgctgccacgcccagctgattttttatattttagtagaaacggggtttcaccatgttgctcaggctggtcacaaactccagagctcaggcaatccgcctgctgcggcctcccaaagtgctgggatcacaggcgccagccactgcgcccggcccagtgtgtctcccttaacccaagagggccctcagctgtcccagggggcagtgggccatcaccagctggccagggcatggcctattctgccacatttgccaccctctgagcccaccagtcctgggcacagctgccctacatgtctgtcctgagatggacgtcaggtccagcctgccccggcagcccgggcccgtcctcctcagcactcaggccaaccccagccaccgccagcctgagaccaggtgtcctgaggctccctgcactgccacagcccagatgcagttctcctgacccagccgtgctacccggacacttgtcattgttaccagcagtctccaaactggacagtgcacaagggcccagaacaactctgatgccaccacaaaacaaacatgttcactagcggattccattctttgggttaaagctgcctccagcctcaggagcagtgtggaggaagatgagggccaggaaagaaggaaaccttggtttctccatccttgtgaatgtcctcgtctgtttcaaatacagtgcagtcagttttatatgatgtgcaataaaccaaaaaggctttattaaa

SEQ ID NO: 6281 - DNA, 92 bp, Homo sapiens
cagccagggggccagaaggactgacaccacagatgacagccccacctccttgagctttatttacctaaatttaaaggtatttcttaacccga

SEQ ID NO: 6282 - DNA, 2663 bp, Homo sapiens
cattgtgagagcatcaccttttccctttcatgttcttggaccttttgtactgaaaatccaggcatctaggttctttttattcctagatggaactgcgacttccgagccatggaagggtggattgatgtttaaagaaacaatacaaagaatatatttttttgttaaaaaccagttgatttaaatatctggtctctctctttggtttttttttggcgggggggtggggggggttcttttttttccgttttgtttttgtttggggggaggggggttttgtttggattctttttgtcgtcattgctggtgactcatgcctttttttaacgggaaaaacaagttcattatattcatattttttatttgtattttcaagactttaaacatttatgtttaaaagtaagaagaaaaataatattcagaactgattcctgaaataatgcaagcttataatgtatcccgataactttgtgatgtttcgggaagatttttttctatagtgaactctgtgggcgtctcccagtattaccctggatgataggaattgactccggcgtgcacacacgtacacacccacacacatctatctatacataatggctgaagccaaacttgtcttgcagatgtagaaattgttgctttgtttctctgataaaactggttttagacaaaaaatagggatgatcactcttagaccatgctaatgttactagagaagaagccttcttttctttcttctatgtgaaacttgaaatgaggaaaagcaattctagtgtaaatcatgcaagcgctctaattcctataaatacgaaactcgagaagattcaatcactgtatagaatggtaaaataccaactcatttcttatatcatattgttaaataaactgtgtgcaacagacaaaaagggtggtccttcttgaattcatgtacatggtattaacacttagtgttcggggttttttgttatgaaaatgctgttttcaacattgtatttggactatgcatgtgttttttccccattgtatataaagtaccgcttaaaattgatataaattactgaggtttttaacatgtattctgttctttaagatccctgtaagaatgtttaaggtttttatttatttatatatattttttgagtctgttctttgtaagacatggttctggttgttcgctcatagcggagaggctggggctgcggttgtggttgtggcggcgtgggtggtggctgggaactgtggcccaggcttagcggccgcccggaggcttttcttcccggagactgaggtgggcgactgaggtgggcggctcagcgttggccccacacattcgaggctcacaggtgattgtcgctcacacagttagggtcgtcagttggtctgaaactgcatttggcccactcctccatcctccctgtccgtcgtagctgccacccccagaggcggcgcttcttcccgtgttcaggcggctccccccccccgtacacgactcccagaatctgaggcagagagtgctccaggctcgcgaggtgctttctgacttccccccaaatcctgccgctgccgcgcagcatgtcccgtgtggcgtttgaggaaatgctgagggacagacaccttggagcaccagctccggtccctgttacagtgagaaaggtcccccacttcgggggatacttgcacttagccacatggtcctgcctcccttggagtccagttccaggctcccttactgagtgggtgagacaagttcacaaaaaccgtaaaactgagaggaggaccatgggcaggggagctgaagttcatcccctaagtctaccacccccagcacccagagaacccactttatccctagtcccccaacaaaggctggtctaggtgggggtgatggtaattttagaaatcacgccccaaatagcttccgtttgggcccttacattcacagataggttttaaatagctgaatacttggtttgggaatctgaattcgaggaacctttctaagaagttggaaaggtccgatctagttttagcacagagctttgaaccttgagttataaaatgcagaataattcaagtaaaaataagaccaccatctggcacccctgaccagcccccattcaccccatcccaggaggggaagcacaggccgggcctccggtggagattgctgccactgctcggcctgctgggttcttaacctccagtgtcctcttcatcttttccacccgtagggaaaccttgagccatgtgttcaaacaagaagtggggctagagcccgagagcagcagctctaagcccacactcagaaagtggcgccctcctggttgtgcagccttttaatgtgggcagtggaggggcctctgtttcaggttatcctggaattcaaaacgttatgtaccaacctcatcctctttggagtctgcatcctgtgcaaccgtcttgggcaatccagatgtcgaaggatgtgaccgagagcatggtctgtggatgctaaccctaagtttgtcgtaaggaaatttctgtaagaaacctggaaagccccaacgctgtgtctcatgctgtatacttaagaggagaagaaaaagtcctatatttgtgatcaaaaagaggaaacttgaaatgtgatggtgtttataataaaagatggtaaaactacttggattcaa

SEQ ID NO: 6283 - DNA, 3123 bp, Homo sapiens
ggcggcgcccacccgctgcccgaggtgctctgtttgtcgaaacacagtaatatttgtatttggctgttgtgctttccaagcgccacagttgccctccccggacgtggtgttatgtggtcatttcagccctaacttctgtgtggatcacagttattcagggttcattttcatccattcttccctttcgctcccttccctggaaaccccgctgcctctgggtcatccgttcagcacgtggtggagaacaagtgccttcagggctggcctcggcctcgagtctcgggacagaggccgccagtggagatcatggctttgggtattatttgacttttagaacaaaagctgtggttaagatctcatttttattgctttttcccacgtcccacgagacactattttcggttctctggctaataccctgtttttgagtttattttgtttctgtctatgtcacagtgttcctctacgacccgacctctctatgtaagcacacatgcgcacacacacttgcattcatgaatctgatataaagtgccagtaatccgccaagagggggtgcgaagggggcatgtcacgacagctccgccaccccccattgcccacccgcactttcccgagcaccgcgccccgtgggctgtgggtgagccgcgctccctgcactgagcgggtttaggggctcgcccacatgcatgcaggccaagacagcaaatgccagccgggcacgacgcccgtgtgcccaggcctcgggggtctcagagccgcctctcacccccgaccctccacccaggggtctccccatcgggagtggaggtgttggtcctggaagctgactcatcggagagggaaataccaaataaacatccgaggttgcatttatttatttatttatttacccggaagcatgtgcgctcccgggaggggtgctgggtcctcagggtggggggtcatagccacaggggagggcagttcccaggaaggtaaccagatgtctcttttgtgttttggccacctggggccgcccccaacctccccaccccaagaggggtctgagtgggacctcaaagcatggccagtgcaattctgaggctaggggaataggagaagcccaccagctgcccctgccacccacgggggctcctccctgccggggtccagctcagaaccacgggggtctgtgccggcagcaccggtgccatcttggcttccacaaattccagaagtttcttggctgcctcccgctctcagatggcacagggcctatcagtggcaggatttaatctggggagcaaattccagctctgaaatggagttctcacaccgtatctagggacagaggcatctggatgcaaacgcggggtttgttaggggcggaatcccgagggtggtgtgggggagctccgtccgggcagttggctgctggtcctgtctgattatgttttgccatattgagtctgaagtttgtgtggaagtgagctcgcccgagttgtccggtcggagttgtagccagtctttcaggggaccccgggacgctgatgaggcccagggtgcactccttgtcagtcttgcccgttgtccctgtgcattttgctttccgctgtcaaatctcactgtctcgttttcacaccgcatcagtccccatcatcactactcctccccagagacatacagattgccctccccggcatgaagaagtcacaattctgacccgccacctctccaggggcggtgcctgggatggccacccatcaggacagccagagccagggtcccggcgtcctgagagtccagggcacctccccccattagctgtaaggtttcctgtcaggtgtgactgtcagtttgctggtcttccaataccgaagaaagggtggttgtgacaatacctcttgcttctaaagaatgtattataaaacaccgcagatttttttttttccttaaaaaacactacctgatgctttccttgttcgtggggattgtggtcacatgaagctctttctgcatcagtattaaggtgtatatttgaatgtcctcccctcccctttcccctccaggctgtgtagctttgaggggctgggcgtttgctcacgaccttgctgtctcgctcagaacatgctccgcaaagttctccgcacacacttcttccccatcaagcccatttccttccccaaccacaaaggtgtttgtgattcctcaccccgggaaaccaaggagctgcaaagtggagtctggttcagccccgtgcagactcacccagagcttaacgttgtctttcaaacaccctgagccttcctaaacagccagtgcagacgttctctctgggccacgaagcccctcgggtcctccccgtcccctgctccgatgcatacctcagtgcagaaccacagaatctctgcagcggaaacgccgtgcatctcttgtctgttggcagcgagcacatcgtgctggagacacgagtttctaagcagctggcacgagggctgctgacggcatgggtcgtgcttcagggtggcaatacctcttaggaacttagggcaggaagcaatacttcagcattgaatgtgtgtaaatagttgctttgagttgcaattgctattttcttctcagtcccagctcagatcgaattatatatccatatatatatatatatatatatatatatatatatatatatatatatggtaaacaagcacacacaattttatccaatgcaaacaaatgtagagcatcagttacaaaaccctcgaatagcttgagagccccacaggctctgccacacccgtgacttcatccacactgacgtcacccgcgggggctccccctgcacatttgcacacgatccggagagccgaaggccgcgtgcttcctgtcacatgggctgtaatcatttgtagtttccaaagacacgtctgcatttgaatttctagattttcgaggtaaggagttttttttaattggttgtttggaaaatcacatcatgcctagaatctgaaattgaattagcaagaaccgactgtttgcattttccatatatccttttatctgctctttttaaattgttaattctaataatttcaaaatgcattcactgaagaaatggacattaaaatattctaaaatttaaat

SEQ ID NO: 6284 - DNA, 868 bp, Homo sapiens
ctacccccccagccctcctctcccttctgggggctggagggagccggggcagccacagggagagacatgggcgaatgagtgagaaatttttacaaaattacgatgtcatttgggtctcttttatgacctctttttcaatactgtaaatcgacctttgaacgaagccactcaacccgaggtcccggggctggggtgtcgcagagcgtgtgggagcatcggcaccccagggcggggcctcggccccgggggctggaggaagctgacacggagatgcctggcctctctctgccaaaaagcattttttcctttaaatatgttttttaagaacagggaaaattaaacaaaaccccaggttatttcttccctgcccagagccagcctgggattgtcagccttcaatcccctttccttcctctttttgggttttcttctttctcctttaagcacttacatggttgggggtaagactaggctggggcattctgggggcccggaggtctccgttgcttcttggttggggtttgctgctgctgtgcccccctcccccttccccatctcggcactagaattcgccactctcccaccccccagcccccacctctgcctccaggtctcatcttccaccccaaaaatgtctgtctctctctttttgttttgtttgttgttggttttttatttctttttggtttgctttctgtttttgttttgtttttcttttttttctttcttttttttttttttttacaattttgaggtcttcgtgttcaaggagaagctattatattttgttaagaaagtggggagaaaaaaaccaagaggccaccgtgcctttgtaaagaaacaaaataaagtttgtactttgtttttt

SEQ ID NO: 6285 - DNA, 67 bp, Homo sapiens
ctgctcggctccccccgcccaccccgccgcctctaatttatagcttggtaataaatttcttttctgc

SEQ ID NO: 6286 - DNA, 614 bp, Homo sapiens
cctgcgcccccgtcacctccacctcacctgtgctgccacttcctagtgcacacctcacggctcatcctcaagctggaagatacctctctggccccggcacatgtcacccctgcactcctgccttcccgtgggcacttccacatcctctgggcctctggcagttcccagggactgttttcacctctgctgtctctggggtcagctgctgctcatcagctgcccgctagcatgtggccaggggtgcagggtggcggggggtcagcagcatgtccctgggcaggccctgggcaccctgtctcccctggtctcactgctgacctgggctggtcccagcctggattggcctcatccaggatctttggtcaccccacgctgccccatcttgcctgctgttccagttctggtcaagggccttgggggctggccccccaccaggccttctagagcagcaccagtctcagggccctgggaccagctgccctacttcccaggtttgtagccaggagaagggggcatcacagagctgatggtccaataaggggggtgtgagccccgcagggactggcccgcacctgccttggatgttttcagcaattaaacttttttaagctggc

SEQ ID NO: 6287 - DNA, 85 bp, Homo sapiens
cctgcccgcctcgcggccccttgtggggatcgggggcaccagaggggcagaggcaccaacatctgaataaagccattgttctccc

SEQ ID NO: 6288 - DNA, 1894 bp, Homo sapiens
cggagctgggactcgggactcccccgcctgtcagtctggccccctgtgctttgctccctgtgctcagtggtcactttcccgctcccacttggggctgggagccgtgccaccatcccctagaagtcctgtcctcttcaccctgccctacctgagccgctgactcttctggcaaaaattctgttgggatttaaggccaagggtcagtgggtggcagggggctgacaatgagcttgtgtgttgttggtctgcttggtgtgtgtgatcgggaagataagctgggaggggtctcctgctggggtcctgatgcctctgtttccaaacaaggtacaggttcagtccagactctttccccctgggaccaacagcagccagagcagttagccagttagtccccaggcctgtggccacaggcgtttctgacctgctgggccgagaatgggtaagttgtctggagtcaggtgggcccacgtaggacagggtcacaaagcctgggtttgtttctgggtactttgcgcctctggggtgctagaggtggggcatggtggctggaagtaaaactgccaactctggccctcagaactctcaggtatagaagcccaggatgtctaataccctgtcccagtgcccgagagctgcctggtgtcaggtagagaggacactgtacctgggtgaatgatcagaccctggtagctaagaaggaacttgtccctttgagtcagtgtgcagaccccctttcaggccatgcctctgtgaaccctgtattgctggggccggaaggagcccctgagcctagccccttcccgtctgccctgtgtcctcactgcgtgtgggtatgacctctgcctggtggctggtgtatcccaactgggcaagagatggcagagggtcccccttgtgggtgcgcttggatgtgcagagccttctccatggattttcttccctgtaagtgccgggcccctcaccccagctgacaggctgttgctgtgcctgctcacacctgctcctgcaggcacactgggctagggacgaggaaggagcagccacaagtggtagaactgccttggtggacaccagcctcgccctgtctttatttcctgaatggtttgtgaacttgctcacctggaccactgtatcctgccactgtccttcctggtctcgcactgccactgcatggcctcctgtcactgtgaatcgtggcccagtctcagtttgtagtttctcattaaattggccctttcactcccccgccctgggcctctgctctcttgcctggcttccttcttttttgagggaaagagggtggggctgcaggcagtctactggcaggacgggaggctgagtcctcagggtctcacaccctcagtgctgatgccatgccaactgcctgggacaacaccaacacgtaaggacctaattaaaccaaaccagagtcgggtgtagaccagccctgggatttccagctgtgactgggccagggcacacgttggtctcggcagtggctgtaaggtcaccttccttcctctgatgctggtttcaaccatctatatatggcatccacgcatgggatctgcaagctggagccctcctacccgcaggcttgagcacagcatcatccagccctggggaggcgcacccttaagcaacacagactgggctgaggctgacaggcagaagactaacagagcgcagtctgcacacgcaggttctgggcgacctctggccctggccatctctgcactaactcatctgaattatgaaggtggcagtcttggtcagtagtttaaagagtttccctactttttaaccctttttgaaataaaacttttacaggtagtagattcctattaataaaattatttaagttcatgtttctcttttagagaatgaattgttt

SEQ ID NO: 6289 - DNA, 750 bp, Homo sapiens
gggaggcccctcccccctcccggaggccaggaccccgtggggcgggggagaggacgtctctgcgggcccccttcaccccttttctgtctgcaccccttgttccccggagccctggaggggagagcgcggactctagccaggcagggacacgtctggtgccagaacacgcagctgcccacacgcaaggtcatggccccagcggccccggcacatggagtggttcagcgcggcctgggtgcctggcggacagaacttcagagaccacgcagccttccttcgaagacgcacctgcccagcccagcccaggggtgccgtggaggaccaccctggcagagacattgctgatccctggcttggagctccttgggggccggcaggcctcgacccccaccctagggaatgcagagcctctccgcatgtgtgcgcgtggccgtgtctgtgtatttctacgtgtgtcgctcttcagaagcaacctagttcctggggcagctggactttgcatgttagtgtgagcccccagccccctgcccgccgccccctccccagggccctgcctcctccccaccccctcgtcagccagcgttgctgttccttgcagagaaaaggattgtgggaaactccaggactcttcccaccgcctcccagcgcctgcctgctggggctgcctgcatgcctcccctgcacctgggggtacccgcatccacttcctttcccccttttaacaaaagagaagaacgaattccaaaccac

SEQ ID NO: 6290 - DNA, 385 bp, Homo sapiens
aatctgacgttgggtgattggtccaccctgaagctgtgtgccagggagtgaggaggacagtgagcaggtagctgccatgtgcagcccaggcccagtgggggccagaggatcaggccccgggagcagccggcagacagaggcaagacgggggctgcggccctggctcggcagctcgggccagcactgaggcgggacgagggcctcacccagaacctcgtggtgaggcccagagttcatgggctgccctggcccataccaggcagggccctggggggaaagtgtatccatatacacgcacaggtgccaactgaggtgggaccttaggaatgaggactggggcacctggaaaatgccattttttggaaaataaaatttaagaacagct

SEQ ID NO: 6291 - DNA, 1562 bp, Homo sapiens
tcaccaggcctgaaactccctttccaggactctcatccctgggcacagaattcaggaaactgctagacagcctggtccgaaagcattgccagctgcccgtttcctcccatggcccagtatgaggccagcaggggacatttgggatgcccaggccgcagaggaagctgggcactgggtgcagaacaagggcaaggacaggctctgagtgtccagtggcagccagaacaggtgacacagagcaggggcttcagccacagagacacactcaggaggccagaagccgacactcaaggtgttcgtggggctggctcctgaagggcctgggagggtccatcagctgcctccagcatccagtggctgctggcatacagcctcatccccacgtcccaacccctctcctgtgtgtctgtgaccctgtgcgctgtctctgtgtgtaccccccacctgctcccccccccttttttttttgagacggggccttgctgtgtcccccaggcgggaatacagtgccatgatcatagctcactgcagcctcgaatccctgggctcaagtgttcctcctgcctcatcctcctgagtagctggggttacaggtgtgtgccgccatgcccagtctcttttttggtagggccaccactcactgggtttagggtcccccaatacactgtgacctcatcttaactaattatatcatcaaaacccgtgtttccaaataaggtcacattctgaggtctgggtgcacatgaatttgagggacccctcgtctgctgcagggagccctgctgtaccccagccttcccaggacgtggtctccagcttcttcatcctgccagagtttccaaatggagcccggggctctgcagcattccagtcccctttgcagatccatagctgctctgcagggcggaagacacctggggcgggaaagcacccctgagttccatcttcctgacatgttgcctgggatgtgacgggcctgacatctccccagggccggggcccagggctgcgtttgctcctggccccttagtgtctggaatgtggccttccacggttgccccactttgtctttctaaggtaagaagccttcaccttccagcttttgtctggcctgtgctgcgtgggagccactggtctgtgcacatccacggtgggtgagtggccaagacaagcagtgtgatagagtccttggtgggtttagtcatctcggaagtcgtagggcagctatggaaaccactgggttctggaacgttccagccaggcagtggttgttcctcataggtaggtggccttggccttcatcccagcctgggatgctccattgcatttgtcacctagtcactgtatatacgtgcacatttgaccttttggcacagcccaggttccaggtgcgtgacctgccctttttctcattcccttaactgacattatttagtgtcagaggccgagcacagtggctcccacctataatcctagcactttgggaggccaacgcgggtggattgcttgagcccaggagttcaagagcagcctgggcaatatagaaagacctcttccctacc

SEQ ID NO: 6292 - DNA, 124 bp, Homo sapiens
ccaccggcggatcccggggctgctgggcttcctgagtccccagcggctctcaacacacacctatgtaccagagcatctattaaatgtgagccttgctttttatgaaaagctgtgctttgaaaac

SEQ ID NO: 6293 - DNA, 492 bp, Homo sapiens
tcacagcacccaggagcttgtctccaggaaggcggccccgtcccctactcatacccaccacagagcaccagccagtgccaacgccaggctgctatttatctccctatcccaccccctaccccacctaacacatttgcactgccgggaatggacactggaagtgccaggaggaaggaaggctggtttggtggggtagtggggaggtcagggaggcggggccaagggtgtcccacattcccaacaccgccctctgatcaccatgggaatctttggactcaggacagggccaggcgcagggctctccctcctctccccttcgctgtcccctccccctggagggcatggtgtcggggggtggcactgagctatgagtcccggggatggtgaggaacgccacagacagagccaccctaggagtgagtatagtgctggtgactgtgtttcatagccccagtccagggctgtctaagaaataaagatcatcagactcca

SEQ ID NO: 6294 - DNA, 2032 bp, Homo sapiens
gctgtcgacaccccgccctcacccctccaatcccccctctgaccccctcttcctcacatggggtcgggggcctgggagttcattctggaccagcccacctatctccatttccttttatacagactttgagacttgccatcagcacagcacacagcagcacccttcccctgaggccggtggggaggggacaagtgtcagcaggattggcgtgtgggaaagctcttgagctgggcactggccccccggacgaggtggctgtgtgttcacacacacacacacacacacacacacacacacacacaggctctcgccccaggatagaagctgcccagaaactgctgcctggctttttttcttccgagcttgtcttatctcaaaccccttccagtcaaggaactagaatcagcaacgagagttggaagccttcccacagcttcccccagagcgaagaggctgtagtcatgtccccatcccccactggattccctacaaggagaggccttgggcccagatgagccagtacagactccagacagaggggcccttggggccctccaacctcaggtgatgagctgagaaagatgttcacgtctaagcgtccagtgtgcacccagcgctccatagacgcctttgtgaactgaaaagagactggcagagtcccgagaagatggggccctggctttccagggagtgcagcaagcagccggcctgcaggtgagcatggaggcccggccctcaccgcctcgaagccatgccccagatgccactgccacagcgggcgctcgctcctccctaggctgttttagtatttggatttgcattccatcccttgggagggagtcctcagggccactagtgatgagccaagaggagtgggggttgggggcgctcctttctgtttccgttaggccacagactcttcacctggctctgaagagccactcttacctcggtcccctcccagtggtcccaccttctccaccctgccctgccaagtcccctgcatgcccaccgctctccatcctccctcctctccctcttcctcccgtggagacagtatttctttctgtctgtccctttggcccagacccagcctgaccaacgatgagcatttcttaggctcagctcttgatacggaaacgagtgtcttcactccagccagcatcatggtcttcggtgcttcccgggcccggggtctgtcgggagggaagagaactgggcctgacctacctgaactgactggccctccgaggtgggtctgggacatcctagaggccctacatttgtccttggataggggaccggggggggcttggaatgttgcaaaaaaaaaagttacccaagggatgtcagttttttatccctctgcatgggttggattttccaaaatcataatttgcagaaggaaggccagcatttacgatgcaatatgtaattatatatagggtggccacactagggcggggtccttcccccctcacagctttggcccctttcagagattagaaactgggttagaggattgcagaagacgagtggggggagggcagggaagatgcctgtcgggtttttagcacagttcatttcactgggattttgaagcatttctgtctgaacacaaagcctgttctagtcctggcggaacacactgggggtgggggcgggggaagatgcggtaatgaaaccggttagtcaattttgtcttaatattgttgacaattctgtaaagttcctttttatgaatatttctgtttaagctatttcacctttcttttgaaatccttcccttttaaggagaaaatgtgacacttgtgaaaaagcttgtaagaaagcccctcccttttttctttaaacctttaaatgacaaatctaggtaattaaggttgtgaatttttatttttgctttgtttttaatgaacatttgtctttcagaataggattgtgtgataatgtttaaatggcaaaaacaaaacatgattttgtgcaattaacaaagctactgcaagaaaaataaaacacttcttggtaacac

SEQ ID NO: 6295 - DNA, 877 bp, Homo sapiens
gcacagctcttgcaactcttcgtaacggcagacgctggccctctcctacgacgcagtgacctccttggtgtcgtcctctcccttgccctggtgcaggccaagcattttatacataccctcgctgccaggctgctcagagtcccgcccacatatgagacaggcactggctgaagacaggcaactctcgtcccaaccatcattcaccctgagtgacgtacttcatcctccaatgactggacaactgcgatgccttttcctcccttttcctgtacactcccagcaacaaactcctcatgataactgcacacaatctgaaaaccactgaaggacaagccaaccacagcagccaagcccactccttgcagcatgggtactggtggcacaccagacagtgacactgccccacaaaggcctgggcccgtgggggctgctgcctggcatgacatctctccagatttctggcttaaaaccaactttccatccgagaagcctcctcagtagttactctgctcatgagacagatctgggctccaagccaggaaaggtgaacagaaaccacaagtgtccagccctcggtgctggagtggacgttaattgtcagccaccagactgtcccggcacctacagagaatgtttcacagttctggcatttaaatcctttgatagtggattgtgctgctgttagccttagtttcagtgctttacaagtctcgcttattatctcactggtatttaggtatacaaaacagttgattattcaccacgccaatatctgggtctctgtatctcatgtagaacataagaaaatgggaactaatagggaaatttatttatagcatgaaaataaacctggtggctggagtctgcttgtacggtc

SEQ ID NO: 6296 - DNA, 634 bp, Homo sapiens
agcctcaagctgcccggggtggcacgtcgcgaaagcttgtttccccacggtctggcttctgcaggggaaatttcaaggccactggcgtggaccatctgggtgtcctcagcccctgtggggcagccaagttcctgatagcacttgtgcctcagcccctcacctggccacctgccagggcacctgcaaccctagcaataccatgctcgctggagaggctcagctgcctgcttctggcctgcctgtgtctgctgccgagaagcccgtgcccccgggagggctgccgcactgccaaagagtctccctcctcctggggaaggggctgccaacgaaccagactcagtgaccacgtcatgacagaacagcacatcctggccagcacccctggctggagtgggttaaagggacgagtctgccttcctggctgtgacacgggaccccttttctacagacctcatcactggatttgccaactagaattcgatttcctgtcataggaagctccttggaagaagggatggggggatgagatcatgtttacagacctgttttgtcatcctgctgccaagaagttttttaatcacttgaataaattgatataataaaaggagccaccaggtggtgtgtggattctgaa

SEQ ID NO: 6297 - DNA, 461 bp, Homo sapiens
gtgtgagccaccgcgtctggctgaaaagcactttcaatgagactgtgttgaataaagggccaaggttcttgccacccagcactcatgggggctctctcccctagatggctgctcctcccacaacacagccacagcagtggcagccctgggtggcttcctatacatcctggcagaataccccccagcaaacagagagccacacccatccacaccgccaccaccaagcagccgctgagacggacggttccatgccagctgcctggaggaggaacagacccctttagtcctcatcccttagatcctggagggcacggatcacatcctgggaagaaggcatctggaggataagcaaagccaccccgacacccaatcttggaagccctgagtaggcaaggccagggtaggtgggggccgggagggacccaggtgtgaacggatgaataaagttcaactgcaactga

SEQ ID NO: 6298 - DNA, 398 bp, Homo sapiens
gactcacacacgactccaacgggattgtgagaatcaagtcactctcatgggaagaatttttatatgggaaagcggataaaactttcattggactggaatgtttggagaatgttaatttccaaatcaggaaccacaaactgccctctaataagacatcggctatctaagcgtgtgggtgccccctttctgccagcagttctggttcttaagaaaatcaccataaatcagacatgaaaattctggctccaaaaatagcattttctttgtgcaaataaaaacgtgtgtatcaagtatgatgttcccccaacgtggacacactcagttcctcacaaagccaagcccactgcagctgccacatccctgggcttacggtgcagcaggtgcttttttcaagacag

SEQ ID NO: 6299 - DNA, 488 bp, Homo sapiens
acaactgggacctggacctctgggtaaccctgggtcgcctggattaacaggaaggctgagggtgtgggcaaggctgaagaaaggggactgggtacttggagactttgcctgggcccctgggaacatgtgttttgtggtgaataaattcacaaggcaagagctggtgtacaggtttaggaaaaaggctctaagcaagttcttacagcacttgtttgtgacattcagtcagataatggccagaagtttttgttaagagccagttcttagaagaacctatgccaaggtcacccatagagtccattggtgtgaaagagaaaggcaaagaggtgtggcgggggagcgtaagatttggagtcagaagtctcagttctgtcatttgtcctggagcaggttattgagtctctttgaatcttggttttcacatctgtaaaatggaaagtcctgcttgtttcatgggatgggtgtgggaataaacaataaatgtcaaa

SEQ ID NO: 6300 - DNA, 2219 bp, Homo sapiens
gagatggtggaagcaccccttgtcctgtgcttgtgggagactttgcagggaggaggcagcagacactggagatgacattcttccacacgagacggggcttcagccgggcatggtccctctcaagtatctcctggaggaaggggtatggggggcaggtgtggggtgtggggtgttcccggccatcagcacagcctatgaccattgcaacaacctctcaccatctgaagagcattaaaagcatttaaaaaggagaggtgcccactggtggctgagtggaggttccaaccccatcccagggagtggatcaagggtggtatttctccagctgctcagacacatgggctcaacccacagaatccctcttcctcctggagctggaggccccagattcccagatctggccccctggcagcctgacagggaccttgcgtgacttctccaaggcaaatttccacctaagtgccccttgcgcctctcctggggcctgggcaaagcagttttctaattcttggcttggttggttctaggggagctggcttgaagtgggtggggaaaggcgggggtggcggtctttggattggacggatgttgccttttggtgcctttgcagtgggaggcggcatagctgcctgtctggggaagacagttctcccagcactcccacccctgggcacagcaggctggtactgggaggctgaacccctcttagagcctgaccttttcatctgccttctggttgtgtgaccatcactcaacagccatttcacagcccctgtaattatggcggcggggggctggggtggtggtggtgggaagggcttgtggagaggacacagtctttgtttaaaaactttgtcccgatccatccagaaaagagtaggtagcttgcatcctgacagcctggcaaagtcaagaaagttgaaggagaaacatacctttggagagggggttttctttaaaactagtgttaagaaatgcttagggattttttttttcttatttttcataactaaagctttcacccagagccggctctgtttgcactttgctgccgacattgcaaactttttggcagggtgggagactgagtctcattctgtcacccaggctggagtgcagtggcccgatctcagcttactgcaacctctgccctccagggttctggcaattccgcctcagtctcctgagtagctgggattacaggcatgcgccaccacacccggttaatttttgtatttttagtagagaccaggtttcatcatgttgggcaggatggtcttgaacccctgacctcagatgatctgcccatctcggcctctcaaagtgctgggattacaagtgtgagccatcgcgcccggcctgcaaacttttttgtaggtatttctggtaaacaaatccttaggttatctttgctgtggttgtggtttggctttagtcatgatttcaaagtagaaatagctaggcattattttttgaaatatatgacctatatgtagtcaagaatccactgaacagaggcaagcaaaccttttggaaactggcttttgggcagacagtaaacgtccagtttgatgctggaagcatgaacagcttcatcaggtaggtactcctcaactctgatgagtttgtcctttcagcctaagggggtggaagggagttgtttgagaatagcaaatacgcatgttgattgcgagtgtgtggagacaaaggcagttcccaccacagttaggtcctggccattgtttcctcgcctgcgatgctccttgtacatcctcaccctcctctcccgcctctgccttctgctgggtcaaaggtggccttttctctccagccttgaattgttccctgttggcttcccaagggcccatctgctggtacagtccacacttccacagccaagacccgagagggctttcactgccccaagcctctctcctgtgaccctgggattctgtcttggcagaatcctttgtcagcggctcttactctgtccttcctgtttggccacagctctttcaatcaatgggtattctagaaccgcaggatgtcagagctggaagggacgcgataccggtttacacaaggggaaactcctcgaggctctgggagggacggagggttttggtgacagagcgagagctaaaattgaggattcctgaatccagatcttgcctcccatcagccatctttctcccaataaatttttgttttgtgcaagg

SEQ ID NO: 6301 - DNA, 1904 bp, Homo sapiens
tttccaagctggtgtgttcaaggcgaggacggtgtgtgggtggccccttaacagcctagaactttggtgcacgtgccctctagccgaagtcttcagcaagaggattcgctgctggtgttaattttattttattgaggctgttcagtttggcttctctgtatctattgactgccctttttgagcaaaatgaagatgtttttataaagcttggatgccaatgagagttattttatggtaaccacagtgcaaggcaactgtcagcgcaatgggggagaagaggttagtggatcgggggtccctggctcaaggtctctgggctgtccctagtgggcacgagtggctcggctgccttcctggggtcccgtgcaccagccctgcagctagcaagtcttgtgtttaggctcgtctgacctatttccttcagttatactttcaatgaccttttgtgcatctgttaaggcaaaacagagaaactcacaacctaataaatagcgctcttcccttcattgtgtgcattgtcggcccttcctcgggttctcctcctccagctgcctgggggctttttaataaacttgtctcacctcgtcagccactactgtctgcagcccctttgcaaagtggatgcactgaatacagtccggacagacattgtgggggtctttttattaaatcaagaacattgttaaattcaattaaggtttactctgctgccttggcagacttacgatctcaacagttcatacgagcaggtgaaaggattataaatagaatttcgttaaagtggaacagacgacaagaaagccttttagcaagagggcatgctcactagtggttagtaagctgtcgactttgtaaaaaagttaaaaatgaaaaaaaaaggaaaaatgaattgtatatttaatgaatgaacatgtacaatttgccactgggaggaggttcctttttgttgggtgagtctgcaagtgaatttcactgatgttgatattcattgtgtgtagttttatttcggtcccagccccgtttccttttattttggagctaatgccagctgcgtgtctagttttgagtgcagtaaaatagaatcagcaaatcactcttatttttcatccttttccggtattttttgggttgtttctgtgggagcagtgtacaccaactcttcctgtatattgcctttttgctggaaaatgttgtatgttgaataaaattttctataaaaattataattcagtgagttacgtggaagtggaggaagatttctactctccctggaaacaggcctgggaaaccttggcatttgtaacaaggtttcactgagatgtacttttccttctaattccgttttgcgggggcagggtctcttgtttctttttttttttttttttttttttagcctctaactagtcacatttactcttaagaaatgaaaggttttccaggagagaactgtgtacaaataaggtgactggagatgtgacctgatgtgtcacgaggcccttcggggcggcaggcgctatcgtgggcgtggtccttgcaccgtcccatcggccttgccttccagctccgtggcacggtttcctggtctttgggccagtgtgtaccttggagtgacttcctttctcaacttccactgcagtgtgtgtgccttctgctctgagagctgccttgtgacccgtgtgatagaaagcagggagtgagggtccccgcggacctggcccttccctccttcctcccccagaaagaggagttagagcaggggtgcgagagccgttcgctgtgggtttgtctttgaacaaacattaaggtgtcttgtttttgttctgggctgggggttggctgtagtcttaggtaactgaaagttcctactctcccttaaggtattaaatgactctttttccaaagaa

SEQ ID NO: 6302 - DNA, 1584 bp, Homo sapiens
aaatcttccattaatgttttatctatagggaaatatacgtaatggccaatgttctggagggtaaatgttggatgtccaatagtgccctgctaagaggaagaagatgtagggaggtattttgttgttgttgttgttggctcttttgcacacggcttcatgccataatcttccactcaaggaatcttgtgaggtgtgtgctgagcatggcagacaccagataggtgagtccttaaccaaaaataactaactacataagggcaagtctccgggacatgcctactgggtatgttggcaataatgatgcattggatgccaatggtgatgttatgatttcctatattccaaattccattaaggtcagcccaccatgtaattttctcatcagaaatgcctaatggtttctctaatacagaataagcaatatggtgtgcatgtaaacctgacacagacaaaataaaaacagttaagaatgcatctgcactgtagtgcgattgacatgtgcaagagattaggaagtttggctcgtaacagtttcagctttcttgttatgccttccatcacagcccaggctcaccccaagaactccaggctcccctaaagaatagcaaatcagtgtgttcgtgatgactgtgctaccttcattatagttcatttccaagacacatctggagccaaaggcccgagggaccctcaggtggggagagctacaggaatctctttggatgttgatgtgtgtttctctcaccctcggcttcgatggtcttgttcagagctgcataaactaacacatttatgtctccgagatctaagtgtggatcttctgtctgtgacacagtggccattgtagtttatcccgaagacgcctatgtacgtaagtttgcatttcctcccttctggtgatgactcagggttgtatagtatctgttaccccttccctcccagagtaaccataactcgttccgtttccaaacagccatggtggtgtccaattagctgtgtatcgctcttcccagagttgttaatgtggtgacatgcaccaacagccgtatgtgtactgtgatctgtaagaagtacaatgccatctgtctgccgaaggctagcatggttttaggtttatcttccttcacatccagaaattctgttggacactcacttccaccccaaactcctcaaatcaaaagccttcaaaacacgaggcactcttggatctaccctgagtatcctccaaactgtggatacagtttagtgagacaagcaatttctcccttctgagttattctctctgttggtggcaaaccacttcatagcaccaacagagatgtaggaaaaattcctcaaagtatttgtcatttctgagtcgcctgcattatcccattcttattctcctcaaacctgtgcatatatgacatgaaatgatatccattttttttttaagttagagacagagaggggaatacttatgcatggggagcctgttagcacagtgcctgccacaaaaacaagtgcccccgacaagatagttgctatgttatgacactttctcagatcaggattttctagtttaaaaattaaatatcataaaac

SEQ ID NO: 6303 - DNA, 786 bp, Homo sapiens
agttccggagctgggttgcttctgctgcagtacagaatccacattcagataaccattttgtatataatcattattttttgaggtttttctagcaaacgtattgtttcctttaaaagccaaaaaaaaaaaaaaaaaaaaaaaaaaaagaaaaaagaaaaaaaaaatccaaaagagagaagagtttttgcattcttgagatcagagaatagactatgaaggctggtattcagaactgctgcccactcaaaagtctcaacaagacacaagcaaaaatccagcaatgctcaaatccaaaagcactcggcaggacatttcttaaccatggggctgtgatgggaggagaggagaggctgggaaagccgggtctctggggacgtgcttcctatgggtttcagctggcccaagcccctcccgaatctctctgctagtggtgggtggaagagggtgaggtggggtataggagaagaatgacagcttcctgagaggtttcacccaagttccaagtgagaagcaggtgtagtccctggcattctgtctgtatccaaaccagagcccagccatccctccggtatcggggtgggtcagaaaaagtctcacctcaatttgccgacagtgtcacctgcttgccttaggaatggtcatccttaacctgcgtgccagatttagactcgtctttaggcaaaacctacagcgccccccccctcaccccagacctacagaatcagagtcttcaagggatggggccagggaatctgcatttctaacgcgctccctgggcaacgcttc

SEQ ID NO: 6304 - DNA, 79 bp, Homo sapiens
gcaccgccctggcgcctcattccgcgctggcgtaaaattggaaaaggctgagaaacaaagtaaaacagtattttgtttg

SEQ ID NO: 6305 - DNA, 668 bp, Homo sapiens
acctgctcccctcaaaagcttcgtgccaacagagaggttcctgtttgaacccaggagagtggaagagagattgggactgagtgctgaggttgggaaggcacctgctcccacagaagggggaacgcaagaggcatcccaagacctcatctgcctgcagtgtcaaatcgatggcctggccttggcttctgattatttgcagctgcgatggatgtttacaggaacccagccagagtttgcctccctgcacttcatcccggagcgcacctgcttcccccacttcaccttcggagaggacacttcaaactgcggacacacgcaaaagcgactcccagctccgtttgatgtgagttgagccttcaggccagctgggtttagcccgaggctggtcttagatgcagcgactgtttcaggggtgactcagaagaaaaagaagctgaggaagctgttggggggctgagggtgggattctcgctccttcatttcaggttactcgttcttcagcaagttggcaaaacagacatcatgctggtgagtgccacgttactcccctggctggaaatgcttttctgaaagtatgagtgttgtgcctacttaattctgataaacctgtctaagcaatacttaggaggcttacttctttggattaaaaaaaaatgtatgcaactcca

SEQ ID NO: 6306 - DNA, 264 bp, Homo sapiens
gcttcctgggcccctcacccccagctggaaattaagaaaaagtcgcccgaaacaccaagtgaggccatagcaattcccctacatcaaatgctcaagcccccagctggaagttaagagaaagtcacctgcccaagaaacaccgagtgaggccatagcaactcccctacatcaaatgctcaagccctgagttgccgccgagaagcccacaagatctgagtgaaacgagcaaaagtcacctgcccaataaagcttgacaagacactc

SEQ ID NO: 6307 - DNA, 426 bp, Homo sapiens
ccggcagcgcccgccgtgcacgcagcattaactgggatgccgtgttattttgttattacttgcctggaaccatgtgggtaccctccccggcctgggttggagggagcggatgggtgtaggggcgaggcgcctcccgccctcggctggagacgaggccgcagaccccttctcacctcttgagggggtcctccccctcctggtgctccctctgggtccccctggttgttgtagcagcttaactgtatctggagccaggacctgaactcgcacctcctacctcttcatgtttacatatacccagtatctttgcacaaaccaggggttgggggagggtctctggctttatttttctgctgtgcagaatcctattttatattttttaaagtcagtttaggtaataaactttattatgaaagtttttttttt

SEQ ID NO: 6308 - DNA, 139 bp, Homo sapiens
tgagaccgcactccttggcttgttcctgcgtgtttcacccaaaggagaaaatgctaggatgaagtcaatcttcttgcaggaacatgttactatggtgatttctacgcaacactaattaaagcttgtacctggaagacta

SEQ ID NO: 6309 - DNA, 156 bp, Homo sapiens
ttgcacaaaatagcacatccaccaaactcctgcctgagaatgttaccagacttcaagatcctcttgccacatcttgaaaatgccaccatccaataaaaatcaggagcctgctaaggaacaatgccgcctgtcaataaatgttgaaaagtcatccca

SEQ ID NO: 6310 - DNA, 1637 bp, Homo sapiens
gactcagccagacgtggagggagccgggtgccgcaggaagtcctttccacctctcatccagcttcacgcctggtggaggttctgccctggtggtctcacctctccagggggcccaccttcatgtcttcttttggggggaatacgtcgcaaaactaacaaatctccaaaccccagaaattgctgcttggagtcgtgcataggacttgcaaagacattccccttgagtgtcagttccacggtttcctgcctccctgagaccctgagtcctgccatctaactgtgatcattgccctatccgaatatcttcctgtgatctgccatcagtggctcttttttcctgcttccatgggcctttctggtggcagtctcaaactgagaagccacagttgccttatttttgaggctgttctgcccagagctcggctgaaccagcctttagtgcctaccattatcttatccgtctcttcccgtccctgatgacaaagatcttgccttacagactttacaggcttggctttgagattctgtaactgcagacttcattagcacacagattcactttaatttcttaattttttttttaaatacaaggagggggctattaacacccagtacagacatatccacaaggtcgtaaatgcatgctagaaaaatagggctggatcttatcactgccctgtctccccttgtttctctgtgccagatcttcagtgcccctttccatacagggatttttttctcatagagtaattatatgaacagtttttatgacctccttttggtctgaaatacttttgaacagaatttcttttttttaaaaaaaaacagagatggggtcttactatgttgcccaggctggtgtcgaactcctgggctcaagcgatccttctgccttggcctcccgaagtgctgggattgcaggcataagctaccatgctgggcctgaacataatttcaagaggaggatttataaaaccattttctgtaatcaaatgattggtgtcattttcccatttgccaatgtagtctcacttaaaaaaaaaaaaaagaaaaagaaatggataatttcatctactgcctttacttggggttaatgtgattcttaaacaccttcatcatggaactctcagagtggggtccgttttggtttcctggtggtgggttttgaaagataagggaaagcacattttgagcatgtctgggtaccatggtgcggatgcttgggaaccagaactgtttcagaggaatctaaagtctgattttagttttcagagacacagcttgttgtaaaacatgagaagacatgatttctaggactcaagcagcaagccaggattctaggttggctgctgtgtcatctttgaagtcaagacaaagctgggctcgaccttcaagggtcctcgttttgataatacttcagaatagggaactcatgtgaatactactatgtagaaataaaacctagaccttgagcgaacatctgtatattggttgaaaacgatagtggtaaccattgatcccccttcatttgatgtttggaaaattccagtaattatcatttttgcaacgaatatggataccacatagtactttggtgttacctgcttttgaaaaataaagtctttggttcacccggt

SEQ ID NO: 6311 - DNA, 108 bp, Homo sapiens
ctttttaaatgatatgaagaaatcagaggtgaaaattgtacattgggaatatatttatgcaaattttattgaaatttattgtaaataaagattttctcagtggtctag

SEQ ID NO: 6312 - DNA, 730 bp, Homo sapiens
tatgctggcttttatgtatgatacctaatcagagcattgaccagaaaaattgaaagtgttctgaggcacatagcagaggagctgcagatttcctgcttgtattggcgtatatcgttcctcctgagcagcaacccacagtaggtaggaaaatgggctgtttcacaggcctggccacgctctcacggaaccactggcatcagatggtgaagtgactgctacccggttgccatctgttgaacagacttttggatgaagtgtgttggggaagaggataaggttatatctaggacaactctttgagttggtccttcatataagaatcgtgacggtaagagaataaacacttgtactgggatcagaatacatgatggatgaaattctttacatgttttagcagaatgaatttgtttaatataataaagtttgctacttatctgtatgtaggttgctaaaaaggattttcttaactcagattttaagccaaataaccatttaacactagtatttgttaaatggggtatttttctgtatttgtatgtttcactataataagggaattaaggataatgtgcattgagaatattttgaaaaataattgactcaaattttatttcttggtcttttgctgtttaaatgatgattttgaaagattaaacctgtactgttggtattgtgttagtgtatggaccaatactgcctgtaataaagattttatatatagatgcctttc

SEQ ID NO: 6313 - DNA, 3587 bp, Homo sapiens
agtcagtgattcaactggaaggaaacctcaatgctgcctccagagctttttggaaatactcagatcctggccgcctttgtaaccttctctaaacgtcaggcctggacttaaaagattttttaaaacctccataagtagtccaggggcggtggctcacgcctgtaatcccagcactttgggaggccgaggcaggcggatcacaaggtcaacgagatcgagaccatcctggccaacatggtgaaaccctgtctgtaccaaaaatacaaaaattaattgggcatggtggtggacacctgtaatcccagctactagggaggctgaggcaggagaattgcttgaacctgggaggcggaggttgcagtgagccactgcactccagcctgatgacagagcaagactcagtctcaaaaataaataaaaataataaaacctccataagtaatcctgacatatgttcctgggtataatctgtttctaaattgtccttctgtgtatttgctaatgtaatagagggaaaaatagagtgcttctctgtggttgttcagcactttaggtagccaaggtgagaggattgcttgaggccaggagtttgagactagcctgggcaacttggtaaaaccccatctctacaaaagaaaaaaaaaaattagtgtggcatggtggcatgcatctgtgctcccagctcctcacgaggctgaggtggaaggatcaagtgagcgcaagaggttgaggctccagtgagccacgatcaccccactgtgctgtagcctgggtgacagtgtgagattctgtctcagaaaaaacaaagtataacattgctttgcttctgagtatactgttggctttccaaatcagtgggtctgacttgaggtctgtgatgtgacccttttcctcacctgctcaaccattattcacatggactccatcatattcatttgtagtcattcccagagtggcccagtgagggtctcgctgtatgagagtcggctacggaatttaggagaaacagaagtttcttggctttcatgctgagcttgttggtctaagcttatgagtcactggattagcatccatatgggaagggaaattaacatggagtcatttatacagggactaaattgaatcctacctaccggaggcaagaacatgatttatcttccataagccttatcctcttcctccttattcctcagtccatatggatttgcttatgtatgacaactccaaggaatcttggaagagtagattgctaacgtttccacaattgtcaagtatattctgaggcagtaaacacctttttaggtacgtggcctttcactggttgtgaattggtatgcatccgtagtagtaagttcacagattcactgcagtgcaggaatgttcttgcatgccaaagactcaactgctttcaaagataatgtgggtgctagatgcagtggcttacatctgtaaccctgttagggtgaccagacccaacaccaggtcgtgggggtgacaaagtccagtggagtcaaaggattgagaaaaagacagtttgagagagaagtaggaccagcagaccatcgggatggtggaggctgtgaaggccgtgagctctgggagcccacactatttattggtaatccaacaaagaaacagatggtgagaatgtgaaggtcagaagggcaccttgcattaagcacatgatttacagctgtgatggtttagcatttgctctgctacttgagatgatggagagcaggttcttttaactcaagttacagtcgatcctgggagagcaaggagccagcaagtctagacattccagagccacaggccctggattttatccaagccacgagggattttatgccctgggcttagattatggtgcgtcagggcagccttccaccctttagcacagagcttggtgttccaaagaccacaaggggttttagacccttgaccctggacatattccaagactcttttacattatgtcagaatgcaagccctgcctcagcttctcccaacactcagcttttcgcaacataatcccagcactttggaacgctgggtggattgcttgaacccaggagttcgagaccatcctgggcaatatggcaaaaccccatctttaccaaaaataagctgggtgtggtggaacatgcctgtggtcccagcttcttgggaggctgaggtgggaggattgcttgaacccgggaggtagaggctgcaatgggccatgatcacgatcctgcactccagcctgggcaacagagagagacagtccctggcccactgcccccttccctggcccagtctcaaaaaaaatgaggctgggcgtggtggctcacatctgtaatcccagccaaggctggcagatcacttgaggccaggagttctgagaccagcctggcttacatggtgaaaccccatctctactaaaaatacaaaaactagccaggcatggtgggaggcacctgtaatcccagctacttgggaggctgaagcaggagaatcactttaacccgggaggtggaggttgcagtgagctgagatcacaccactgcactccagcctgggcggcagagcaaaactgaaaaaaagagaaaaaaaaaaacatctagctctccctgaaattagaggagtctagcctgcttttgctgtttttttggtagcgagagtagcgggcagtgggggagatggtcttactctgttccccaggctggagtgcactagtgtcatcacagctccagcctcaatttcctgggctcaaggcgatcttcccacctcagcctcccaagtagctcagactacaggggcatgccatcacagctggccagtttttacgtcttgcgtagagatgggttttccctgtgttccctaggctgggctcgaactcctgggctcaagtcctcctgcctcagcctcccaaaatgttcagattacaggcatgaggcagcatgccaatcctgtttttgcattttagtaacacaaattgtaatgttaactttttaaattatgaaagcatctaaaatataaaattatttgtaaccccactgtccttttgggcttctataaatgaatatacatctaaaatgtgggggtttagcttaattgattgttttccatagaaactaggttttatgggaagatggttggatagacttgtttcacttaaaggtctggtttgtgtaggacaaacccacatatgtaatcgtgccagtctgttctctgcatgacataattttccagcaatagctgtgtggtttttgtaatcctatcatctagtcagttcaagatcttgcaacactgtgtgattctttgctccgtagttcagtcttgttgaacatgacacaggtgtttactttcctgttcttgcatctagtttcattctaataatgttctctgttgaaaaagctggcttcaatttattgagcaagatgctggtgttatcatctaacataaaacctatcttataataaagtgttgacacatgtaatgagtactgtactgaaaaatggtggtatgtatatggtttgtactgattatgtatcgcttttataccatcaaaaagttgaaaaatcataaagttgaatcatcct

SEQ ID NO: 6314 - DNA, 437 bp, Homo sapiens
gcattttcttgatgaccctgcacaatactgtgaggaaaattgactgcagaagcctacttcacaccgccttctcttattttctgcccattgataaacctctccccatattttgcaaagaggaaattcacagcaaaagtccacattatgtcagctttctcatattgagagctctgctatgccactgttgaatttttcccaagattcctgtccctagccctcacttcaaactctgcttccttggacagatttggcaatagctttgtaagtgatgtggacataattgcctacaataatgaaaacctacaggaatttttttatttttcattttccccttaggcatatttagtatttttcccccaggcagatcattctgagtgtgcgagtgtgtgtgcacatgttacaaaggcaactaccatgttaataaaatattcaatttg

SEQ ID NO: 6315 - DNA, 5087 bp, Homo sapiens
cgctccttcccgttcccgttcacttttcacttgcactatttttttattttgccagaaacagcagctgcacacaacctcttgctgaaatataaaaatagcccaggcaggtttgtgaatttatgtccttttgcataaatcagagagctggggccctgtcctgaattatattcaaaatagaactgcatttcctttaaaatggagcgaatgatcctggaaatcagtttttaaaatattagactatctctgcatggatgtttgaataaattctcctaatgctgtgtttctcaactccacttttgaattggattgtattctggttagcatatggtcaaagtctgcctatcgacctcaattccaatctgacagccaagtatgatctttgataattccttaaacaaactacacctgattgtattaaattgtggtcacgattcccaaaacgctaggcaaaacaaagttcatctcctttcctttccagcggaacgaacagctgtctcccttgttgtgagagccatgcagacttattttgacaaggagccaagtaggcaccatttactgttcaattctgagacttctgatgataggaacagaatgcagttgatacagctcggagcttaaatttgccttcctgggtgcctagaaaagtcacctttgcacataaattggccatttctgaaaatctcctccaagagactgaaaccaaagctctaaaacgccgcttcttcagtctctggggagcacgttgagttggttcacatccacattctggctgtgtagccactccacagatgggtggtctcttgggatcagaatgcccctccactcatgagactcttcattttgtccactttgacaggaaaagtgggaatgtatgcagagctctcaaaagaaacaaaaaaggccaaaacggtgccttcagccacatcctctgaattggccctgacttggactaaatgcactaatgcaaaatcccttgacaaaagcgcataggttatttcaaaccagcattgttttttatgtaacctgttttaccgcatcttctcagcagcttctgaccactgctcaattttctcctttacagccattgttctggtggacaaataacctaggtactccaaatcctggcaggaaaaatatacagcattatgaaacagcactcagtaatcctaaaatgatttccaaagctggttacacatgacctgcaaagtctattaaattaaaagactttctcattacagagtttagtcaacgtagcaaaaccatgggaaattaaatggaaagataattaaatatgtaaattcataaggaacaaaagacgagaagttaattatacaataggctggtgacaccagagttcattgttatgtgccacaagaaaattaaattttttaaaaaactagaacgctcttcttttagtgttttgctgaaatcctgttttgtatttgtttctttacaacaggtgtaggtataggaggtcaagaaaaggagttcggtaaagggcatagctaataacaaccacacattgggccaggcacagtggcttacgcctgtaatcccagcactttgggaggctgagacgggcagatcacctgagatcaggagtttgagaacagcctggccaacatggtgaaactccatctctactaaaaatacaaaaattagccaggcatgctggtgcacacctgtaatcccagctactcgggaggctgaggcaggagatcgctggaactcaggaggcagaggttgcagtgagccaagatcatgccactgcactccagcctgggcaacagagcaagactctgtctcaaaaaaaaaaaaaaaaaaccacacacacacacattgagacttgagatgtggtgacacttggatcataaacagagggcttcgattccaggatgggggttcctccagggggaaatgaaaaggagctctcactctgttcttacgtatgcacaatgctctgaattgtggcacatgggtttgcagaaggataatggagataattgaaagtaatgaaaatgaaaccaaatctccttccccaaaaacttaaaagaactgattcaaaagtaccccaagaatatgcaaagaaaagggaatcacatcaacagatgattggataaagaacatgtggtatgtatacataatggaatactattcagccactaaaaagaatgaaaccatgtcttttgcagcaacctggatggaactggaggctgttatcttaagtgaaataacttagaagtagaaagtcgaatacttcatgttctcactcataaatgggagctacataaagtgtacccatgaacatagagtgtggaacaaacattggagactcagaagggtgggaggagggtaagggatgagaaagtacctgatgggtacagtgtacacttttctggtgttggttgcaggaaaagcctggacttcaccacttcgcaatatatccgtgtaacaaaactgcacttgtacgccttatatttatacaaatttaattttttaaaagggaagagagaatcatattaatttctcaccactttttaagtaagcaaacagcagtatttcccagaggcaagaggttcagcaagaagtcaggaaatgtttttgtagataagcatctatcattctgatgggccatgactagtgtgttcacttgtaattcctttgcctttaaaaaaagagaatgatatcaaaaaataagtgccttatactgtgaaaaacgataaaaggacttcctgattctaagtgctatggttttgaatgtttattatgtgttttaagtgctttggctcagaaaggtgggggtcacgtggccaaggtcgcctaactcatcttggtggagaaagaacggatgtagatggcccaaggcttgagtccatgctccataacactgtcctgtcttggaaaacgtttctcagaggtgaaaggttgcaccagctcagccagtggcaacacactgagtacggtattcagcaccttggacagcgttagctggaggcccagggatttcctcccagctctgcaaagcctagaccagaccctgattgcaccaggttcagggggcagaagcttgtccaaagagcagatggttccagggggaggatttttactgggggagatttagaaaccgaactgaaccataatgagtcacgggacacagccctgtctgcagcagtaactgtccgcagctctagctgctccatgtctggagttaccaccacagggtgtaggaaaccaccagctgtctcaaggcaaggaatgtcacctaatgctcccctttccaattaatcactttaattggaggaaaaaacaaaaacacaaggacatgttacgggggaaggttttttaaagtgatctcaaattggattgcaaaggctcaagtgactttgggaatggggctggggagatgatcatttactttttacaataaataattttatctcacatctttagtcaagtttctcctaagtttggggagaatggggaaaaaatgtagtaagctttatgggactagcaacagaacgttttatcctattttgtgattttcagtattaagagattattgatcacttgcagagttacaaggcaagcactagtttaaatctgaattagactagggccattgaccttatatacctgtaaaagacactacggtgtatacaactgtagaaacaatatacacatagtagtttaatattacagtctgtattccaatgcagaatcttttgagaaaaggttgccaaaacatcatttgcatttacttgaacccttttttagacagaatcttgctctatcacccaggctggagtgcagtggtgtgatcacagctcactgcagccttgaactcttgggctcaaccaaccttcccacctcagcctcccaaattagctgggactataggctcgtgtcaccacatctaattttttatttttatatttgtggagttgaaggtcttgctctgttacccaggctggtcttgaactcctggccccaagcagtccttccaccttggcctcccaaagtgttgggattacaggcgttggccactgtacccagccttacttgaactcttaatacttattcccaagtggtacctaaaatggttttgtgcagtcacaatattaggtagcaatattatattgagctggaggaaaaagaagatttaggagtaaattgccaaggcaagttctgttaaaagctttctgtaatagacatcagggattttttttattcaggtaacctcaacagttttgattgcacatgtaacatagtacttgacaggtaatactgatttttataacttcataaaatattctcaagccatggaggagctcttatgtattttttaatgagtacacacacacacacacacacacacacacacacacacatatagtaaaagtggaggattcttttcttggaataatgatttctagcatttatctagaaaagattttgctgactaaattttccttttcctccagtggatttttaaacatcagtgcatgcacataaatacagattggatttttcctttaggctttatctatgtaaatgaagtcgattaaatgtgaataatcatgttacccttcattattctgaccattatgtttgagaagtagatttcttcactaaaggggctttgcagcacacttagaatgagtgagccactgtgcctctctagaaactggcttcttgtcatcatttcaacatccactcaaacgctcacccctgaaagtggccttcctgcttgatatggtttggctctgtgtctccacccaaattggtttggctctgtgtccccactgaaatctcatctcgaattgtaatccccataatccccatgtgtcaagggacggacctggtgggaggtaattggatcatggaggcagtttctcccatgctattcttgtgatagtgagttctcatgacactgatggttttgtgtttgatagctccttcacactctttctttcctgttgccatgtaagacatgcctgcttccccttccaccaggattgtaagtttcctgaggcctccccagccatgcggaactgtgagtctattaaatctcttttctttgtaaatta

SEQ ID NO: 6316 - DNA, 1015 bp, Homo sapiens
ccaagacctgagggcagcaaaccgctggtgctgtcgctgtgagcaagagccggctggcacatttggaagccgcactgtatttaacttaatcaaatgtggtatgggaggggttggaaaccaagttgtctcctgggggggagaaaacaggttttatttttgtggctgtggttttttcccctttttaatctaactgcctgttgacattgacactcatcacggttgtaggctgtcatgaatgtgtacgtgcttaaccagtgaattccgtgttgctcttgtgaggcctttcctgtcatgacccagtgtgcttaagaacctgcctgatggggagtgtcggctgtgaaatctgcaaaaagagctgacattccagctgctgtgatcatgaatttgggggtgtactgtcctgcctgtgcatcttctcgcactgagattttgaggcagttgcagccctcggttagtctcccagtggaaaaatcggttgtgcctccctgcttcccaccatagctgcctgaaaacatgacgctctcaagcttgtccttccttcaggaagatgtccactcatgcccacccatgagagggcttgccgtatgccctggcctttgggcatatttatgtagagttcctttctcctaagacgtgagtttctcatgggggatgtacgagtaaaaaggttaacttctgttcttatgcgtggcgctgtgttcactttccagagtctctgttcgtttgtttggatggcggtctcggggtacggcagcgtgtgtgcgtacgtgtctgtgtgtgtgtgtgtgtgtgtgtgtgtgtgtgtgtgtgtgtgtgtgtgaaatcgtgcaaatctacaacatgtcccagcccattctccgttgaaacagatcacagcaacgacaaacgctcatggcgctgctttgctccacccgcttcagatagatcattgttagatatttcacatttttgtatggtggaaataaaaatgaaaaatgtatttccaaaagatgaaaattaaaaacattttcatagg

SEQ ID NO: 6317 - DNA, 57 bp, Homo sapiens
ctaccttgacttgaaatgctcttttgcacaaggaaataaagcgtcctctcagtaatg

SEQ ID NO: 6318 - DNA, 171 bp, Homo sapiens
aaaacatgaattaccaaagaaagcaccttcttggcctgacagaccattggtggggctggcacgaatccagatctggatcctacatctgttgggtcttaggcctccttccctcctcagtgtctttcaaatgactttcatcaaatgactttcaaaataaaaccttattttggc

SEQ ID NO: 6319 - DNA, 1720 bp, Homo sapiens
cggcagaaatttgtgactgagatgtgacatttgggattccccatcacttgtcatgccctcagcacccagcttgtgccattgggcattgatggcattgaactagagcgagtgcctgcctcggctgtggcacttccaggttcgactgaatcaagcatctgaagactgggtttttttgttgttgttgttccccttacagacaaaatgaagactatcatgtgcaatcttttacagtggggttgatgatacatttggaaggatttgcttgtttaatatgtacattttttgtgttaacagctttttgacacaattactgggtaatttctaatataggcagcagactgttttacgggttgctgttttaacatgggtttttgtcagatccatggtcttaggacttgactgatgagctttcagtgaagaatcctctaagataaaacttctatttaaagactttaactagaaagtgtttattttggctacattgttcaccttctgctgtattggtatttgtctgttgggatttcaagggagtgtagagaagacagaaggaaagctgagagctggcccgacatggtctgggacacagagttggagctggcactgaagatctccagggacttcagagaccaataaaagcccatagggaagagagagaggatatagggaaacagaatcagatgtgtaatatacttggcacagcgaaaaaatggatttaaaagacaaaaatggaggtccaggtagatgtaattcacacagactgaaagtgagttcgggcttgtgtaaaacacatgagattggatttgaccccttggctctcaagtgtccccttagatctagaactgctccttggtggccattagatcgagtcagttttgatctgcatcacttagttattgggaatttctttgttggaaacaggaaaatttttttagattatttggtgtacggttttgctcacaacaataggtggaagttgctagtgcagtcttggtctgatggctgtgtgcatcgcacattcggcttggtgaaatccttctctaaagcctctttttgtatttttataactaaacagaggaagtcttcagaagacctcgctttaaaacaaatttgtgcaaacactgctagagtcattttgaagctcaagcattttcactttgtttcttacatgtgtacttttttgtttacttgtgaaaatggccatctttaagcatatttattttctgccactttatttaaaggcaagcaatattttcttgatcataaatattttgtaatgaaatacttcctcttttccagggctttgtatgcacttgtataattacattgatggcaatgtagagtttgaatttcagtctgtaaatacttttttggaaaatagaaatttttattgctttaaagttttggatatgggtggttttcttttccgggtttggtggaaagtaatttgagaactttaaggttgtctttttaactgctggcaaaatgttgattttttaatattagataaaacgagtaaacgaaattccccagaaattagtagtaagtggggtctttgtgggttgggaagtagttttaatgtagaaagacatttacatataagtctgtttaatttcaaaggagtttgtgaaaaaaaatccatggtgaaaatgaaacaatgacatggttaatctggaacttacgttcttataccaataaaaggtacctcaatacatgttctttc

SEQ ID NO: 6320 - DNA, 2305 bp, Homo sapiens
ctcccatttggaatatagaattaggatgggaaaacactgtctgattctgcacacaaaagtgggtttcaaaaatacatccttttctgtgtcatgaaaaccccccgaagccattgacttcatcttacctgtgttctatcatgtttttcttttccattgaacacagctttgagctgaagtctttcttttcttcttcctttttctttcttttttcaattatttgaagaacttgtggcatttgttaaagaatccttaatatattttaccaaatttttagtaactattatgaaatacaatggtgttccaaaagaagaaagcactaaaaactcaactagcaggaagcggttttgcttccattgagccacgtcggtggtgtcatcctacatgtagcataatagagtctctcagcctttgcttactggtgtttccgacagtattaacccagtgcgtggcatgtctttgaagcaaagcctgtcccgctagcctgtgtgttcacacaccaaaggagaagggtaggcgaggggttcggagtgtattttcaggttggaatgtgaaggttcctggcttccatgtgacttgtaagtgtgccttgttttttatttaaactatgtctgtagttgacaaaagtggcttcatcacaaatttttttaaacgtttctactttggggttccatttaggagctttctagaaagttgaggatgtttgaagcttcccttctgtgttccagtttgatatgggttaggttaaggaaaaggagatggtctcgatgtcatggatttaaagtcagcatttggattacaacacacattattgtgtgtcgagaggcagcattggaaagagcctgattttctaaaatatgcatcaagtgcataaattacaaatcagagctgagtggggaggtgcttcagcagcagcgggatcaatacgatttccactgggaagagacaggaattctacctacacataggaaggccaaggttgatccacttaaccttgttattgtaattttaaagctggtatcggtagctgggaagctttatgtgtgtgtatgtcagctcagcatcttttaatcgtgtctgattttactctcgttacttctcgctgttggaagcatctctgggtttcttgtggcgtctggtgtggaatggccttcctctctaggtgcctgaggtgtccgctgacgggtggcctctcacccccctctagagaaacctgacatttacaatggattgtatttgtccggcaaaaaaggcggattcattcatagagcagaaagaacctgttggcgtaaggtcttccactagttagatggtttcttttggggaaatgtttatatttggtaacttctagaaagccagaaaatggactctgatttcatagcattttgataaaatgccacaaaataagggctatagagagatttttacaagtcagattttttgttccccaaatcttttaaatgaagccagtgactcccagttctcaacacatggccccagtcaagacagaacaccatggaaaaaaccctgtaagtattatggcactctccgaatcctcctgaaggcatttcctctacagacatagtgttacaggaagtgaaatgcaaatgtgcaattttttttaaaggagcttttaaacaaagtaataataattggtgttgagaacatcagttgccttattctaagatttcataaggctgagtttgcacgcttggacttcagttctgctagcatgtaaagagtggtggactttaaaaccgtaagaggtatcattacaagtcacctggaacagactcaaagaacaggttctttgggcaacagacaaagaagaatcaagttctgtgctgtcccgtgagtgtgtctgagtaccattcactggagttgctgcttaggtctgggacgtgtgtgtgactcttaacaattgctgtctgaaaatgagagagaagacttcggaagcacattgtgttcataatgtactccacaatggccagtccaattgctatctatttttttatccagaggcttaattaaatgatgtggtaaaatgatgtttgagcattaagacaatgtaattctttatttctgggtggaaagatataccggattaaatttatctgtttaaaaaaatgacaaaagttatcaccaaaaccccctttcccatcttgcactgtttgttttggattgggtttgggggaaagagatgtttttcttagttgtctactttgtttgaacacttttgttgtggttcaagtgctgttttgtgtgttgggaccaaacagttgtcaataaactttacaagcgagcatct

SEQ ID NO: 6321 - DNA, 987 bp, Homo sapiens
gcgaggaaacgagacctctttcgttccttctagaaggtctggaggacgtagagttattgaaaatgcagatggttctgaggaggaaacggacactcgagacgcagacttcaatggaaccaaggccagtgaataagcaactttctacagttttgcaccacggcaagaaaaccaaaaaccaaaacaaacaaacaaaaaaaacccaacaacaacccagaacaaagcaaaacccagcagactgtacttagcattgtctaaatccattctcaaattccaaatatcacagacacccctcacacaaggaatataaaaaccaccaccctccagcctgggcaacgtagtaaaacctcatctatacaagaatttaaaaataagctgggcgtggtggtacacacctgtggtcccagctactagggaggctgagccaggaagaacgctccagcccaggacttcgaggctgcaatgagctataattgcatcattgcactccagcctgggcaacagagaccctgtctcaaccaccaccaccaccaccacccctactacccctgtattcaaggtaaaaattgaagtttgtatgatgtaagagatgagaaaaacccaacaggaaacacagacacatcctccagttctatcaatggattgtgcagacactgagtttttagaaaaacatatccacggtaaccggtccctggcaattctgtttacatgaaatggggagaaagtcaccgaaatgggtgccgccggcccccactcccaattcattccctaacctgcaaacctttccaacttctcacgtcaggcctttgagaattctttccccctctcctggtttccacacctcagacacgcacagttcaccaagtgccttctgtagtcacatgaattgaaaaggagacgctgctcccacggaggggagcaggaatgctgcactgtttacaccctgactgtgcttaaaaacactttcactaataaatggttataaatcac

SEQ ID NO: 6322 - DNA, 1720 bp, Homo sapiens
tgctttgtttggggtatcttttgtcttaaaattgtattattaattaaataacttatttattgtcccaatgttaccaaaatgcaccactaatgtttgtagaaattggagtttctacaaaacacccctcatgtttaactacatttgtgaataaaagctaactcttgtcatctagcttattggatttgacttgaaaaaaaaagtattgtttttacgaagtattttttgtttttttgagatggagtctcgctctgtcacccagactggagtgcagtggcacgatctcggctcactgcaatctctgcctcccggattcaagtgattctcctgcctcagcctcccaagtagctgggaaaacaggcctgtgccaccacaccggagtagtttttgtatttttagtagagatggggtttcaccatgctggccaggctggtcttgaactcctgacctcaggtgatctgtgtgccccagcctcccaaagcgctgggattacaggtgtgagccactgagcccagccatttaggaagtattataaaggcccttaaagtttgtaaggaaatgaaagggctttgtattaccttttcaataggcaacaatgtactttttctttccttagactttggcttactggaagatttaattaaaaggtagaggagaagtaaatttgctgtaataattttgctgtaaataaaacaaagagtttattttattagataaagaatgtgaagtaagcatgaagagacaggctttgggagaaataccagaaagggatttttcaaagatggcattgtttaatctccgtgtggccctcggttgtgcaatcacagatgagccagaagagggccagccccctacttgtttgggctccgaaactcttaccaaacatcaatttttattcttgggatagaaaaatagtatgtgctatctctaatacgctacttcgatatttattaaagaagtatttttaatgtagtgtccacaggctcatttcattgaaaacaactgactatgatgatagacagctcctgattggcaaaagttcgatggtatattcagaattaaattttgcctgcacacctaaacactgacaacatttagcttaaaggttttccatggagaagagtggtaagagctgtagttagcaaaattggcatcctctttagggtgtcaattctgtgctgctttgcaaattgttgaaacttttgattttctgtttggcaatgctagtcagtgttcacttcttacagattagccaagaatttttatctaaatgcagaaacttattaatgaaatccatttaaactatacttacacaacattttgggaggccctgctggtaaaattatatatggatgcagaagtattgcaagagtccattttccatttttaaatctgcaatatctgattacattgatgaattccgttgtattgtatgtgtgaatataaatatctgaattctcccgggggacttggttttcgtccaaggatgttggcagtggacacttagtttacctcaggaattgcaatcatgtaagactatattcggaaaaaatgctggagtatataattttggatactgatataaaatcatcaagatggaagttaagcagaattgtcacgtgtagtccatagcgcttttatatgcattattctgtaatttgtttgtactgcggcaactttttatactttcaatgtatcatttaataaaaaaaataagcaagtc

SEQ ID NO: 6323 - DNA, 567 bp, Homo sapiens
gccaggaccctcaaccgtaccccagttggaccagcccgcacagcctgcagtgctggagatggaagtgacccgtggtcatcgatagctccacacgatattgagtctagacctgtgtttgctctctgggaggaaaatggcagagaaagtggccaattatcacagagcatcagagccggaaggacctagcaatacacaggtctgcccgggcagggcccatctcgccctgtccaccctgcagccaatgtcaacagcgactctcagccccgctgtactctggactcacctgggggcctcaagcacatgcccaggctcccggctagacccttaaatcagaatctctgaggctgggaactgccatgctgtgtgtactttttacaaattaacacttttattttgggataatcccagactcacatgcagttaaagaaacaataatatagagagattcgtgtacttggtaccccatttcacccaatggtaacatcttgcaaaactctaggataaagcatcacagccagggtgttgacattgacacaacaatcttgctcgatttcccgttttacctgt

SEQ ID NO: 6324 - DNA, 6369 bp, Homo sapiens
cactgggcacgaggagtgggccacagcaggatctcaacgggaaagcagccagaggggttgtggggcctgaaccccggcctcccaccctgggggaggccctctgtgaatgggtctctcctggccatagaatgatggaaagggaaggtcagcaggtcaaagcaggatcagccaacaacctgcctttggcaagctgcgggtgggatggctcagtccctgcactgtgactgtctcacctcttctggttgatcctcaagtcctacaggttccttgtcttccccttccagtgacccacccctgaccccagacgtgtgattttcagacttttctttcgagcagcagaacttcgtttacggagcacagtcataagtggaggttcagggtgctgacgaaatccaagctgctctggttgaagctgacaagtgcgaggttccctcccaaagctcagccctctgggcggtccccttgcccagggtatctcctacggtacctcttcagaacccaagggctctgcaaatgccagtttgacaagcactgcccagaccaaccatgggttcaaactccagccctgccctttggttcatttttctgcttctcttggctgggggactctggtgccagccttgaaagtcatggtcgtgggccctttcccatggaggctgcagccttaggagagctctgagcctctcagcagccctccttgggttgaactattctccttagtaactaggtaagtgggaaagccttttgatgtggcatggccaaggtccagccacaagtgcaactgccacctgtccaggggtctgggcctccttccctcaaggctgccacacaaagtagcagaaataggatgatgtttgtgagcaccagactcaagaccatgaccttctttgatccttgaaaatgggaactttgacagccatgaccatgaaactcacaaggcaacgcgatgaaactcacaaagcaatgcttggagcaaaactcctgagctagacagcacagcagcacccatcccctgccagagcccttccgttctgaggtcagacacacaaaaccttcgtcaattgcacaccggtgctgttgggagtgaccaaaccacatgaaccagacttttcccgtccaggaaatagcatttcagatttggtttttaatttcatgcccttcggccacaggctcaacgggacatgcaacataaaaatgggaaggttatttaaacaacaaaaaacagtatgatttaagtgttgagttaccagaaacccaaaaggtttccttgccacgagccccctggagtgtcatccctgttcaccaggagagctcttcgcaggaggcctcccttgctcctgtaatcccacctcccctgaatgatgggattcccttggaaaaaggtctcacccctggtagccatctgcccttcccatggagagccagtcctgacacttctctccagcgtgggtttgaaggggctgcccttcgctttgtgtgacttgtcctaatcctagccagatgtgttgccccatcccaagcctcgcaaggcagggtgtcctgttggcaatggaggacgtagagaagggacactttagatatttattatttacatgttttagtcgatgactaattagtaggtgctgtttttgcagcttgtcaattatgttaccttactaactgaagctgcctttattcacaaaaggccccttttcccatcttttcccaccccctggtgtctctctctctctcggtttctctttctctgcgtctaccccccatcctcctcatcctcagagtaaagcaggggcatcgaacaccacgcaaagaaagctccaacccgcatcttccactggctttgagtggggtgccttggggaccgttggagccttgtttttttccttatgcagagtgtcagcctcactctccctcggattccaagagtattggaattcctgagcctcccatcctccccctactcaccccccgtcacaggcacaaggaggtgacaggcagaaaacgtggagggtgagtggggaatgtgctagctgcagagagtttgtggggaatgtgctagctgcagagagtttgggccattcctgcttgctccgtggttgccttcccatggcccatctaattatgggcattcatgcgaccttaacagagggaaacaggctcctttgagagagatccatcttaggaggagggtcgtcagatccaggcagcagagtccgggagatagccattctcaacagcgattccagggatctcagggtacttttctcagaaagcccctatgatctcttttacagactctatggtggccacgcgctgggtgccacatcctctttctgcccccggcctctgcctctggccagggtttccctggggctgccgaagccactttgggagcttccctttcaccctccttgctgggccaccagtgctttgtgttcgcagcgttatttgcagtggctttggggactcagcagtggcaagtccctgtgcataatgtgaacctgcagacttcaagatggggcccctcctgcacccactaacatgtctgcctttttttgtttttatcctggaacaagtggagaaatggcagagctggctgactctggggacccttccctttttcccatggcttcatttcttcctcaccacaactaattcggggagctgagaagtcacacagggtattcctctcccttctctgatgttattaattaatagaccagagaataaggttgcagatattacatttgttgtgtttttgtgttttgtttttttttttaaggaaaatcccaaacaaagcccagcatgatttgagaaaagaggatgttttcccagggaaaataatttttttaacctgcctgagaatgatttatttatttgttggaggccattggtcagacagcctggagcttgggctgtggaagatttcaaaagcatagggctgtggtctctggaaacctattacagcctgcagctgtgagctgagccagtgacgaggtccctggaaactcaggaaggctgacaggtgggccttggggtattggtttgtggagaaggaagcattctttaggctgcggcactccttatagtttcccacccaccgagtgacattcaggcagaaattgagctcaggagacagccagccttcccacatcccacttcacttcccggtccacacgtaaagcagtgtgtctccaaggaggcagtgagcaattcccaaggtccccgtgttgtgagaagcgcgctgctttctccctttgcaggggaaaaaaaaggctttcctggtgagatcatgagtccttccggcttcatttctcattgtgggtttaacttctaaaacgcaaatggagtttagagaggatgagcagaaccacaggacctgcccccatctctcactcactgcaattgcttctactctgggcacaagtagggtgtctgaagaccatgtttccctctggttctctagtttgcagataacacagaagacactggctagaaccttaagctttctgccaaaaagatgcagagagcagggcagtagctactggcagtggggtgtgaataaagagtcctttcacaaccaagttcactgaggatttggagcaccagcttcccagcagtatcgaggggtggagaggtgtacattcaggtggaggggtacatctaggggtggagaggtgtacattctagaaacagctgttaacacactccactttaaagacagcaagctagacctgcaggatcaaagccacacactgtggtaggggttacaaatgtttatggggcccagaatactagcatagatgcgtgaaatggttggtgtgaggcaaaagggcatggtgggggcaaggatggggactgtggtcttactggcatgcacgtgacctacccagaatgagcagctgctactcagccccaacctgtcattgtttgtaaaaatgtaagcacagtgtagtggaatcttccaatttggaagggaagccggaaatccagatttaatggaaaaaatctgatttttcaacgtcgggttgtttgtttgtttgtttttgttttttttaacagatagtgggcaaagaaaaattccactgttccacgtgtacactgccagcaacctctgctctctggagaggtggtttaaagtgagattatgcattgccctggtagaagaggaaaaaagccagcatcaggtcagggcaaaaataacagcccatgttgaactcggaatggggacctcttgctaagtcattccactcctcaagagaccattccacagaggggggatggatcattcagctctcctggtcccaagattgtgctgaagggaagaaggaatagaatctggagatctggactgctgccccttagatatgcagaggtccacatctgcctggggctacagcttgtgggactccatcaaaccaggccgaaatggcaaagacagtctaggaggaggaggaggtagggtgtgaaacagccaggctctctccaaatcccaagtgttgacacagccatcttgtcccatccctggaagcctctttggaaaccacatagagctgtgctggctcacgggatgtcctgtttgcttctgcctcagttaccttactttgcccatgggtctaccacaggcgctacctcattgtgtctgctgagaagtttacctgggaggggggaacaaagttgtccaaatctgcttgagctgaatgtatgatctatgcaaattctctctctcctctctctcttcctctctggctctcttagaagtttttttgttttgttttgttttgttttgtgtttaccttgcaaacaagatactgtataggaccctcttaagatggaggagggctttcttgcgccacctgtgtctacccctcacgttgtctttggctctggtcttaccaggcgtatgcagggagaaagtgacctctcttccctctccacttggctgggaatattccaactgcctctgcctacagataccaccagaaagcgggttctgcaccttgtcatccccctccctaacgtcatctactccatccctcatgttcctccaacttgcttctcccatccctccttcaaaaacaaaacaaaacaaaacaaaagccttaggtttctcctttttgaaatgtggccttaacattatttttgggaagctgaccatccatcctttccctcccatctccaccaacatcagagaagacagcatcgtgaagcttctgtggcagcctcctaaggaaggggctgccaatctgtagttggcagatgctataggaattgcttacaaatgtcgtctttaagaaaaatgttcttatatttttcctatgggcaaaatgaaggcttgggtgctcatctaaagctcagccaactcctgaagcactctctcagagcatactgctgctgtaatgggctggcttaattatcggcagagtgcttgaaaaggctttgcagacctcccctgcccccaagactgggtgactttatatgtacttcattcaagggtaaatcaggagacgttctccatttatctcttcgtccttcctgcctggaaagtgatagcactaaatattcccagcagatgggtagtgttctcaaaggaatcaccctttccctaccttcagactctattctttacccttccattgctccagtgctgatggaggccaaagacaaccccagggttttcataggaaattcactggaattgtgcgcaattgtctttgtagtccttttgccttttttttttttaaatattatgttgtcaatagcatttgtttgggtatttgttttagaggcctcactctaagttattaccgtccccttcattgttttcaaagacatgtggtgatatagtttttaaaaataactattttgttatagatcataatatgcataaaactgtacagaaatattttgtaatgtgttgattttaaaaaaaatctgtaaataaagttttaaaaaaagaattcaaatggcacacgctgaaatatgtagatattttgctatttatttaaaggagtattttaagagatattgaactatctgaaattgaccagtaatcaaagttccaatcatctgaatgcttttccttgaggtagaatgtgagtctcagaaatgactgcattacctgcccttttttgcaccttttctgtctttttattttgcagaacaacaacaacaacaaaattgtgccttagctgtatttttttgtctaggggagtttgtttctgtctgacaaagcaacattttttgcagaaaacagtggatgtattaaatactgtatcataccaaaaacactgcaggtgtatatagatgctttctgtcatactgtgttttcagatgcagaattttaaaattaaaaaaacactgcctttatgg

SEQ ID NO: 6325 - DNA, 53 bp, Homo sapiens
ggatgtaatacatatatttacaaataaaatgcctcatggactctggtgcttcc

SEQ ID NO: 6326 - DNA, 511 bp, Homo sapiens; identical to SEQ ID NO: 5930

SEQ ID NO: 6327 - DNA, 1583 bp, Homo sapiens
ttcatctgctttaatcagtgtgattaatgcagcacccattgccccgggaaccgtttctgctgtactatctggatactaaaatgttacggaagtagctctttgttctccctcactctgcccttagttaatagaaattcagactcgccaagtaaggcttcgtgcatagtgtcttcatgtcgcgtatagttgagcgcgttcttagcagttggcttcatggacaactcattagtgttttgacttttcttacccagcgttaattgaattcttgcttttagacaacttcctttttgtagtggtgaaccttgccctttagtacagttcaagtgaatctggataattgttcatctttgctttagcttagataccatgtagtggtctgtggctacaggaagctggttctgtctgcttccacagtctgcttaaaaaactgtctgacttcgtgaatatagagaccaagtttaccacttctgatgaagagaccaattaagattcattcctcattctgtttctttccagtgggagaagagtccccatgaaataagatgaaactgattccatgcactagtacatgtaggcttctcccttgtgcaaagcttagcaatttgtaggaaactttgatctttttgtccaagaaaaggaatgtctgacaggcttaagctttcgtccccttgcacttagactcgaagttagtaaatccttaaaggctttttaatagcagacttccaaaagattgcatttaggatttctagcatgcttttaatttcagattttcagctgacattagctatagtatacagtaggttaagactcatgtctatgactttcactctaagactggcaaaaggacagcagtcttctatgtttagtcaatattcatttcagtagaagataatcttatctaatttttgagaccagaataagccttttaaggtaaacctcaaaattatcattttatggtaatactgaccattttagtcccctaggtttgacatgggagatagtgactacactggtgtctgacttttttcctagagatttctccctgaaaaatacaagggctgttggtgagagcagacttgaggtgatgatagttggcctctggtctacaaagatttcataactccttggaaagcttcttataatcattcttaacttcttggtagctagaaatttagagtagttgaaatctttaggaatgaacttctgagggccaaaaaatgtgactgacgggaacaattcttaaactgattaactagctgtaatatagttttgtgaatttattgcactgatgttgtaccttgtggtatatctgtccctattaaataagtgttgttttctcctctttaatattgctgtgaacagtggtgcccattgtagcatatgtttgatttttttttattatttcataagaaaactacgttaattttaccttactttcattgtaaataagcctgtcttcctatctggattttttgtgtgcatacatattctactgattaactacttttgcagttttaatcctgtattatttcttctactttgttttgtgtaaaaggggaaaaaataaaaaaagctggaatctt

SEQ ID NO: 6328 - DNA, 4715 bp, Homo sapiens
atggcaagacagtagatgagtctggttaagcgaggtcagacatccaccagaatcaactcagcctcaggcatccaaagccacaccacagtcggtggtgatgcaactgggggcttactctgaggaaacctaggaaatctcggtgcactaggaagtgaatcccgcaggacagctgcactcagggatacgcccaacaccatggcctgcaaccccagggtcaagggtgaaggaaagcaagctcaccgcctgaacacggagattgtctttctgccacagaacagcagcagacgtgtcgggaggttagctgcggaaagaaatcgggatgccgcggagcacagagtgatttggaactccattccacctgaccctgtgtgtacaatccaggaaaaaaacaaaccccactcagaaacagagaaaactggggtcgcgaagaaatcacagccaaggaagatttgatgcattcagattctcgtgtaacacttgttgcttggcaacagtactggttgggttgaccagtaagtagaaaaaggctaaaggctatgcgatatgaatttcagaaatggactgaaaatggagagctatgtaacagatacactacagtagaagaacttacttctgaaatgaagggaaaaaaaccaccccatcgttccctactcctccccaccacttacccgttccccctttacctaatctagtagattagccatctttcaaattcacttttatttcagtccttatatttcatatacttccgtctcgatgctgttaacaacttctgataacatggaaaattcaaggattgtttaaaggtctgatgatcacacacaaaatgtaattccggttatttaagtcatttctgtgattctatcatgtacagtttccagaattgtcactgtgcattcaaaagtaatgaatctaacagacatttgatttaatgtacactcccttttgcttatagtgtgcattttttttggaggtcattcaaattttccctcttctgtgatagctgtagtttctttcatagaaagtagctaatccagtgtaatcttttacctttttaaaaaccaagatagagtatctattagagttttacattgttgatgatagattaacaataaagtgatgttctggtggaggtagactgaaatttttttaattcatgtttttcatttgatacttttaatttacacttagtaaattaaaagttgtttaatttacttggcattttaggacatgtacatgaaacagtgaaaatgagatccaccaacatcttttattaagttcagttattagtctgtgaagtgctttactttttgcacaattttaatagcttgctattcagtaatacattatagtgaattcatgatcaaggtttccttaaatttagcattgcatttcagtactgactgtgtaagctaaattgctgatccaaaataaaaacccagactagaatagggttcttaaaatcaagtatcaatacaaaatagaacacaattaaaatcttaattgttggctgggcacagtggctcacgcctgtaatcccagcactttgggaggccgaggcgggcggatcatgaggttaggagagcgagaccatcctggctaacacggtgaaaccccgtctttactaaaaatacaaaaaaaattagccgggcgtggtggcgggcgcctgtagtcccagctactcgggaggctgaggcaggagaatggcgtgaacccaggaggcggagcttgcagtgagccgagattgtgccactgcactccagcctgggcaacagagctagactctgtgtcaaaaataaatgactagataaaaaaaaaaattgtttgagtacattttccctgcattttagagattaggacagtggtcactttctagttgccgtcttcacagacaaacttgaaaggtattaaggaaaaaattccacatagctctgggccttttttgtattctgattgccacgttaatctgtaatcgttaagtacccatgaaagaatgtgtttcagtatcagtgcttttttggtactttaacaagtattgtaggcacggtggatttttttgaaatacccatgtgtccaatagcaagttaaggaacctagcgcatcaaattttgttttcttcattcatttggaaccttattttcgcaaaaaacctagctggaataataatgccatattgtattttgcacactgctttattttctagaggctctgggagcaaattacattcatcacattacctctgctctctcaagattaaagtctttcagcaacattctttattgtcatcataaggaaaaacttttatcgcaatgatagtcagttcacattagtttagcactatagatagtattcagaaattgctttctctttggtaaagaagataaataggtgaattttattgcctgtgttttcaggcttcagaggtacctggcaccttactcaagcaaaaacaaaaaacagctttacttcaaaagcatgtgcctctggtaaattatccatcacttttgttttaaagtggtccctccaagaataatgtggcatacacagtgggtttggttgtaaggcagatgtaatagatgacttcaaaagcctgctccttactgcactctggacaaggccctggtctgtatagtttggcttcctctgttaagtcattctacaaggtgacttgccatttgaactttcgtaagagacctcagcagttagactgagaaaagttagagtgctgtagttatgaagtcatacatttttgataaaatacctgtggaaaaccagggatcctctcctgtttctctctcttgcctccccctttccctccattcctctgtcgcctccccctctcctccactttctttaagaatcagggggtacagaataacctacaaacaacctcttcaaagtacccttggaaattgaagttcaatcttaagttttttgctgtctttaatttactagaattgcctaatttttagttgatttctctacagagcttagcttgtgtagttatttctcttttactgttgctttggtgtgtcttgaagtttgattgattatttttggtcattgagttcttagtgtagtttgctagatgattattaagattcttttgtgtctgacacttgtggtgagttgcttttgaaatctgttgagatttccatgtgagaactgataatcaggctcttgatctgcttccctaaattacttttttagagcccaaaccccaggtttagggtgagggtttgtaatacaaagaaacacttccatcacttctgcccttaacccttgcctctattacctaagcttagtaagtagttttcttaatattgtccaatgtttggtgttatctgcattgttttttgtttttttaattgtggttgttctgacgtgtgaaatttaaggaaagagccattttttaaaaatgccgagcagggcaatgcaagtacagccaaatattagacttgatgtgcaatcttcggtcctttttaatctggggtattataggcagtactttaaattgcaaagtcttccgggcctattttcctctacatttttgtaattaactctgggggcttacttgttttggcagtactgaaatcaaaggagctggttcttcttttctcccaattattttcatatgaaagcacctacaattagcctgttagtcctattcagatacatcaaatatcagtgaatgctttactattcgcacatttaagcatctttgttttacataaaattagagtatgaaaaccagtgttcaattttttatcttgttgagcttgtaaaatgccagcaatttaaaactaggacttttccccccataagccaaggaggtagaattactaatacaagggttaaagaaggtagattttgttttcaatatttgggtaatattagaaagattcttcccacagggaagaactagcaagtgtcccaattttttccaaacgttggggaggggaaaattcactgtatcatgaaaccctaagggtttgttgcacttcctgctttttaggcctggataacagtatcaccatccttatttacagaagggtaaaactgactcttaatgagaaaagctttataagttcaagggctgtaaaatatgaactacttagggtcgtttgccttccatgggaacttggctagacttagaaaaagctgtttgttgtgctaatgtaaaagtgtcatacaatttagaagatttttgaagatggtaaacttagaagaattctatgttctgaaatgcacacttttagaatgtttttctttgaaaacaggctaatagttttttctttttttgacaaagtttcagctcctctttaaagttattgtgtcatttttctggtttaaatttcccttatatttccacctgtaatgtcagtggcaacaacatcatacttcacttacttgttaatttactttttacccttattctaagagcaagttgagttgaactgaatcttccttgtcttagtaacaatgtataaatagtggcttttctgtacaaaaggttgtaatgcctcctgatggatataattttgtgattgtatttaaaagttgaataaatcacaccagcttcctgaaaatgttcataatgcatcttttggaaaacaaatacatgcctactttgtgcatatttgcattaacatggcaaagattgtatgaaatacctgtttttcagaaaataaaggttcagtctcaaaagatacagc

SEQ ID NO: 6329 - DNA, 1775 bp, Homo sapiens
actttcacggtgggacgaaacgggttcagaaactgccaggggcctcatacagggatatcaaaataccctttgtgctagcccaggccctggggaatcaggtgactcacacaaatgcaatagttggtcactgcatttttacctgaaccaaagctaaacccggtgttgccaccatgcaccatggcatgccagagttcaacactgttgctcttgaaaatctgggtctgaaaaaacgcacaagagcccctgccctgccctagctgaggcacacagggagacccagtgaggataagcacagattgaattgtacagtttgcagatgcagatgtaaatgcatgggacatgcatgataactcagagttgacattttaaaacttgccacacttatttcaaatatttgtactcagctatgttaacatgtactgtagacatcaaacttgtggccatactaataaaattattaaaaggagcactaaaggaaaactgtgtgccaagcatcatatcctaaggcatacggaatttggggaagccaccatgcaatccagtgaggcttcagtgtacagcaaccaaaatggtagggaggtcttgaagccaatgagggatttatagcatcttgaatagagagctgcaaaccaccagggggcagagttgcatttttccaggctttttaggaagctctgcaacagatgtgatctgatcataggcaattagaactggaagaaacttccaaaaatatctaggtttgtcctcattttacaaatgaggaaactaaactctgtggaagggaaggggttgcctcaaaagtcacagcttagctgggcacagtggctcatgccgataatcccagcaattcagaaagctgaggcaggaggattacttgaggccagactgggcaatatagcaagaccccatctctaaaaaattaggcatggtggtgcatgcctgtattcccagctactcaggaggttgaggtgggaggatcacttgagcccagaagttcaaggctgcaatgagccatgattacaccacggcactacaaccttggtggcacagtgagaacctgactcttaaaaaaaaaaaaaaaaaaaaaaaaaaaaagataactagaacttctagaacatcttgtttacagttagccagaaactatacaagtggtttaacatgcattatcttactcaatccatacaaaagtcttatggaggtgttagcactctttctactgatgaagaactgaggtacttcataaaaccacttacccaaggtgtcttgagtctggtacaactggcattcaaatctaggtcagtctgcccccagagccactacccttacccctcactgaatctgcctttatattgttgagcccatgaccccaaactgctctttccaatttgaacttccagggattttattgtgaacttacatagcaacattaaaatgaagttgaattgtttttaatggcaacgccgtctgtctcctctagcttaccgcttctcacctttcaaccccatctgtggcctttgtccaggcccacagcttagccatggcttccctcctgcatccctgccgtgggttgctggcctcacacttgcagcagctggacagtgattttagaaggccaccagtccccatagctatgtgacaatgagaagcaaacttttttgtgacagattgtattggcataggcatgatagatggggattggtacgttttgaatcagcatttgcaaaaaaattgtcttgaattttaaaataaacaacaaagatttgttcattgagtgc

SEQ ID NO: 6330 - DNA, 1527 bp, Homo sapiens
aagactttaagttccagagaatcagaatttctcttaccgatttgcctccctggctgtgtctttcttgagggagaaatcggtaacagttgccgaaccaggccgcctcacagccaggaaatttggaaatcctagccaaggggatttcgtgtaaatgtgaacactgacgaactgaaaagctaacaccgactgcccgcccctcccctgccacacacacagacacgtaataccagaccaacctcaatccccgcaaactaaagcaaagctaattgcaaatagtattaggctcactggaaaatgtggctgggaagactgtttcatcctctgggggtagaacagaaccaaattcacagctggtgggccagactggtgttggttggaggtggggggctcccactcttatcacctctccccagcaagtgctggaccccaggtagcctcttggagatgaccgttgcgttgaggacaaatggggactttgccaccggcttgcctggtggtttgcacatttcaggggggtcaggagagttaaggaggttgtgggtgggattccaaggtgaggcccaactgaatcgtggggtgagctttatagccagtagaggtggagggaccctggcatgtgccaaagaagaggccctctgggtgatgaagtgaccatcacatttggaaagtgatcaaccactgttccttctatggggctcttgctctagtgtctatggtgagaacacaggccccgccccttcccttgtagagccatagaaatattctggcttggggcagcagtcccttcttcccttgatcatctcgccctgttcctacacttacgggtgtatctccaaatcctctcccaattttattcccttattcatttcaagagctccaatggggtctccagctgaaagcccctccgggaggcaggttggaaggcaggcaccacggcaggttttccgcgatgatgtcacctagcagggcttcaggggttcccactaggatgcagagatgacctctcgctgcctcacaagcagtgacacctcgggtcctttccgttgctatggtgaaaattcctggatggaatggatcacatgagggtttcttgttgcttttggagggtgtgggggatattttgttttggtttttctgcaggttccatgaaaacagcccttttccaagcccattgtttctgtcatggtttccatctgtcctgagcaagtcattcctttgttatttagcatttcgaacatctcggccattcaaagcccccatgttctctgcactgtttggccagcataacctctagcatcgattcaaagcagagttttaacctgacggcatggaatgtataaatgagggtgggtccttctgcagatactctaatcactacattgctttttctataaaactacccataagcctttaacctttaaagaaaaatgaaaaaggttagtgtttgggggccgggggaggactgaccgcttcataagccagtacgtctgagctgagtatgtttcaataaaccttttgatatttctc

SEQ ID NO: 6331 - DNA, 556 bp, Homo sapiens
actctagagttttgtccccccaaaactgccacaattgctttgattattccatttatgctggagattacaaattttttttgtgaaaaaatcagatcttggtgaggacctcgagcagtaagatataaataactcccataagcttagcgttccagtaatggaacactaggcataaatggtttattcagttgtgcaaatgaaagccatctgacagttggctcacattgaacacctgtggagattaaggacgaggacaactatattgatgggcttggatgaactggggcagggcagctcatatttcgggagccaggagaacgagtgagtgctaaaacctcctgttttctgtgttaaacattccgtccctgtttgagacatcagtatgtacagttaacttttgttgagtgtttagcaggtactagggacatactagtgttttccttaatgtatttaatcttcataattatgaaatgggtgctattattagccccatcttatagatgaggcaactgaggttcagggataaagtaataaaattgcctggggtcacccagccact

SEQ ID NO: 6332 - DNA, 14 bp, Homo sapiens
ttccataggtgtgg

SEQ ID NO: 6333 - DNA, 733 bp, Homo sapiens
gagctccgctgagcatctggccttgaagtttgtgttcttccctctggcaatggctcccttcagcacttctgctttccactccaattcacacaggcttggtattaatagaatcaaggccaagctaggttaggaaaagggaagagctttcaccttctttaaaactctcggctgggcgcagtggctcatgcctgtaatcccagcattttgggaggctgaggcaggtggatcacctgaggtcagcagttcaaaatcagcctggccaaaatgctgaaactccgtctctactaaaaatacaaaaattagccaggcatggtggcaggcgcctgtaatcccagctactcgggaggccaaggcaggagaattgctcgaactcagggggtggaggttgcagtgagttgagattgtgccattgcactccagcctgggcaacagagcaagactctgtctcaggaaaaaaaaaaaaaaaaaagaaaagcaacatagtggggtttctgtcaatctgtcctcggctgcccttctcatttgttgatgggaccttgaaagcaagcttgctaggtgccctctgtggctccagcctttaccggaagtgtggtgcatgtttttaacttcagggaagcggtatcctgtcactggggtatgggatgagcatggagaagaggcaccagccacgattccttcctaagcatctcctgttctgactgctcatgaattgaagaaactgacccttgtgttc

SEQ ID NO: 6334 - DNA, 262 bp, Homo sapiens
ctgacagcggaaagccctgtgctccatggctgccatctcacctcctgctgggcagggggcatgatgcgggccagtgctccagccacagaaaagaaagttcatgctttgttcagcctgccttcttttctcccttttaatcctggctgtcgagaaacagcctgtgtctttaaatgctgctttttctcaaaatgggacttgtgacggtgtacctgaggcccccatctccttaaagagtgtggcaaaataatgatttttaaatctc

SEQ ID NO: 6335 - DNA, 149 bp, Homo sapiens
cttctccaataccaggaaaaaagatgcttattttccagatcctggcatcattttctgaatggattgattccaataaaagcatatatcattgtggtagggtaggtggggcgggggtaggggtggataataaagcctctgagtgtccttgg

SEQ ID NO: 6336 - DNA, 111 bp, Homo sapiens
ggcgtctaggagacattcatttggattcccctcttctttctctttcttttccctttgggcccttggccttactatgatgatatgagattctttatgaaagaacatgaatgt

SEQ ID NO: 6337 - DNA, 249 bp, Homo sapiens
tcggcagtgaactcagaacgcactgcacacctaaggcaaatccctggccactttagtctccccactatggtgaggacgagggtggggcattgagagtgttgatttgggaaagtatcaggagtgccatgattccaatgttttccttcttttaaattaaattcagttgctctgcttcctccaagtcctctgtatctttagaatttcccaggtgagcactcataacgcaagtaataaaatactgatatcaac

SEQ ID NO: 6338 - DNA, 3213 bp, Homo sapiens
gaagtcatttggtgttggaggtgggtttctcacctggggctctacgagatgttgctggggctccaccttaaattgtgactaaaaacagttttttatttgtgtgctgcattatgctgttctcacagtagtgagcaatgattgcgcagccctgttaacagtttttttagggatctttcagcctttatggtattacgtagaggcagacccatgtgctgctgttgcaaagaggggaggataggagggggatgttggcctctcccaggctcctcttctgcagtgccagctgacttaagggagtgaactacctgtgaagtagaaaatcagagggaagttttcattctaaggaaggagtttttacatgccacagctcagctgtctgcctgccactttgttgtaaacattgcaaaaatgtggatcatgtaggttagaagtgaattgtttagtgaagtttttgtacttttgtgattttcttgtttatgtctgttttttttttttttttttaacatttgtgtgtaatatagctgacagtccagtgtcgcaattttggaaggcaagatgtgagagagacgagaaccattttaggcatagaactacagacatttctgaaaaggttggtgatgaagaacttcagtcttctgagtatacttcagtatactagtgcaacaagggacacaaagaaattctgtcttaataaagaaagctacttctcaagggtattatgtggactcagtccaagctctcctgtcccattgtgcattgtctgtgacatgcaacttacaaaactagcaattgtaacaataaatcacagccacttgacaagaaaggatattcattattttcaaatggcttttggactatcaaaaacagtaaggcttttgttcagaaatcacctttagtcaaaaggtttaagaagcaaattatttagtagcagaacttatctcaggaaaggaaaatatgcatggttggtgagaatctaataacattaaaatgctggggcaagatgcagtacaaagttgaagagactttattctcaataagttgatttactgatgatatgtcatatgatgcaaaaaaggttttgtgtcattaactgaaaagtagcagcttctctatccaggatgatgagtcaacaggtttcactaatatttgtcatgctgtagcatttgtaagatttgtaaatgatgaaattcaaagaaaactttttctattgctaggagcctgccagaacaaaggccaatatataatgttgtgacatcatatctgataaccagaggtctggtatctacactcctggtgccccatcagtggttgtctccataagtcattttgcgttattaaaaaaaaaaaaagaaatcctgatgttgacattatagcacactgctttctccacagagatgctgatatcaaaaacttgaagatacagtgaagttctgaataatgttacaaaactggttacctgtatcaaagacccatttatgcaaaaatgttaaaaaaaaaaaaaaacacccaaaacaaaaacctggacagacagcacataaacctcctgcaccatacagacatccagtggcttctcagaggaagcgttctctacaggatatttgaattgaaaggtgaattgccagagtacttacaataaaacagccagcttttgctgagtgctttggaaatgaaaaatgactacagaaagtagcctattttgcagacgtttttcatcacatgaacaaatggacaagtctctgaaaggttctggggaaaaaaatttttcttaaagcgacaagactcttagatctaaaaggaaactgacttgccaccttgccagaggaattcttgaaatgtttctgcagccacttggccttgaaaataaagggtgcaactctcaaatcttgttctaacccggctggaggaaccacaagacccaatgaaatagcattttctctccttttcccagcactagtatataacctatgaggaacccttgtctctgaatctgctcagcttgaaattttgtctctgaaggaagagaatgaactcagccctagtctgacagtcctagatttctgtgaaataagagtattcttcaacttagtgctcacactcacataccatgagggttctctgcaggggtttaggggtttcctgaatttgaaagttttttcaaggcctctttttgggtaaaacaattgaaaaggcagacaccaacaaagtctgcaaaattaactgtccagattaagaatattaaggagctgtaaaattagcttgtagaaatggacttatccttaagttttaaaaagttaggaaatcctaaaaatgttaggcttcctgcacaagtggctatgttcatttaatggctagtgaacatgggaatgtatttttatcctcctagctggtggttctgtttggtaaaccagactagaatgatttgagaggggcaaagagaataggcaggaccttccttctatagctttacatatttagaatgttaatacttaatgacattgaagttaccttgcaatgattgataagaggattattaatatcagttaggggaatagggaggataggattttggtgccttcttcagcagacttgctccaagacaaagattctattttgatagtgcaagacaaaaggactcggaagaaaattggccatatgcctacagagcatacaactctgtggaactaaattgtttttactttgtgaaagctgctattttacggaaagattttgattatacagtttgtttttaaattgtcttttatatttatttgtatttggtaagaatcggttgttacacaagctgttctttcccagttacaaaatcctgtgttcggttgtaacctgaactcattaaaagacttgttttcaggtttatcaactgtttattttcactgacatttgagcatgttattttataaatgacgggattccagggtaggaagtgctttttattccccttttgttttttcttttaaaaaattacgtcagttaaaaaaataaaaaaactgcagtcttatggtttagaaaacttgtttagctccatagaggaaagaatgttaaactttgtattttaaaacatgattctctgaggttaaacttggttttcaaatgttatttttacttgtattttgcttttggtacggccagaaatcgagcttgttttttcatagttcctgatattttcagaaaaatcaaaataaatttgttccctaa

SEQ ID NO: 6339 - DNA, 448 bp, Homo sapiens
gaagctctccacttgaacctcttcatgtcatgaatcaggtgccagtggcttagcttgaattacagggtaaaagccatcactttctctatccttttaggtgctttctagaatcaaaactaaactttgtcatcaaaggcccatttataatagctgctttcctagctttttattctatgataaagaaggattgaagcatttttaaaacttgagatttttatcatacctccagcagagtaaggagtctgtgtgatcttgcaatcatggataaggaagaattttccccttccctcccctatggatgctttaaaatgtgattttttaaaaatgagtatgttaatacaatacatgttagtaaaagccatgggtactgatgggccaacacactacagcctactggcaaaatctgacttgcctcttgtttctgtaaataaaatgttattgcccattc

SEQ ID NO: 6340 - DNA, 1809 bp, Homo sapiens
tggctctgtcccaggagcagcagcaaggatctgccagctgccctgcagccaactgaggaattggaccattttggaaattactgaagatccggatattttctactttacacctttctctgccttgtatctgaaagggctctaaaatgctgtatcatgttttaggcactttcttcatttttttggttattttggttatttcctttttggggggatctcccagaatatttgaacctggttacatgttgtgtatctttttttgaagccttcagatagaataagcctgccatttcttgcacaaatttaggttttttttttgtttttttttgtttttttttttttttttttggtaggggagggcatagagcagggcggggggatgggactgttaggttgaattaacattacaaaatgatacagtgccagatctcagtttcgcatattgtttttcagggcaggtctgtactgtgtgtagtgctgtttacatagatgaatttaggttgtaataattatttttaaagatttacacagatttgaatagcagtgttaactgttaaccacattgcattaattcccaggcgatttagagctcttggagagccaaggccagccaagagcatttgtagtctggtgacaacccccttttaagctaatttatccagaaccctgatttccctcacttcttgctcattccttctttgacctattgcatttcatgttgagtttttccatcaacatgctgcacctgtcagtcaagtgagcattttttaagaacacattgtactgagaaccacttaagcattgaatgcggagaaagcagtgctacctcagttttgctggaagtagacttctttgatagttttctttctttgatgaagtttctgtattttcatgttgtaagtggaaatacttttttttgtttgtttgtttcatttgccttggagccaaagtttctgttcctggtggtcgggaaactgcctgccggccaactgacttgaaggaaaactgtggtatggagctctgcttgaatttttttttttttaatatttttatttttttctttgaatatcatcagcttacttgtctggcaagggcagaagcctggggttggcctgaactctgccaaacaaatatcaaagtgtatttaatagttaaatttgtgccctttcccttcttgctgcacccatgttgtcacttaacccccaggagttatttattatctttttgttaaagtcaggctcatttggggtaatgtgatgactgtttaggtttacatgaccctcctctcctttccctacccccaaatatgtatatatacatatataaaatatgtatatattttacctatataaaatatatatatatacacatatatgtatctatattcctttgtttctttgcctgcttatactggccataaaagagggagctgccttcaatgtataaagtataagaagagtgccagggaatgccataatggaggcttttggatctgaatttggaccatttcactaaagagaacatgagtttgctcagccctttcctcacaagagggagggccccggttccccagacttctccacgcgctggctccataaaggccagctttggccaggctgccacaggggcctgaggagctcactctgggcctacctggtttcagttagagggtcctcctgttatttttccatttaaaaagtatgtcctcagaaaactgtactggaaggatgggtggcaggaacttgtatagttcagcttccaacactttggaacagattaaaaagggaatcttttaaataaaaacgtataaaa

SEQ ID NO: 6341 - DNA, 28 bp, Homo sapiens
atgggcttctaaataaagcagtcaaaat

SEQ ID NO: 6342 - DNA, 259 bp, Homo sapiens
aacaaaggaacttgatgttgagatggatgcttgaggaatattgctgctggttctcataatttctagagtaaatgagggagtccagtccccagtgaactctccttttgtgcttatcatgttttaccttaaatgctgagatcctcatttatgtttgtagttggaaagcaaagctaggtagccatttcttctgttctaccaagttataatagcattcatttccctttatatttccctgaaataaagcacattccaattgtgc

SEQ ID NO: 6343 - DNA, 249 bp, Homo sapiens
aaacgttttaattttcaatgaagtcactgaaaatccaactccaggagctatggcagtgttaatgaacatatatcatcaggtcttaaaaaaaaataaaggtaaactgaaaagacaactggctacaaagaaggatgtcagaatgtaaggaaactataactaatagtcattaccaaaatactaaaacccaacaaaatgcaactgaaaaataccttccaaatttgccaagaaaaaaaattctattttaaactt

SEQ ID NO: 6344 - DNA, 102 bp, Homo sapiens
caaatctgtggtcatatgagcatttatcttgcagacacccaagttttgtgcctcaccaggcacaagtttgctgtacttatcaaggactgtctgtagactcac

SEQ ID NO: 6345 - DNA, 1027 bp, Homo sapiens
ttgaacctctagctctactactaatttgcctattgcctatcgcctctctctcccattcagacaagtgtttgtagactctgaagcctaatgttactcatgacgtttgcctcattgctttgcttatttagcaaatgcatacaacgaggaaaggaggtggctagtggtatcagttctctgatccacttccatttaagctccccaggaaatcccatgacaaactggcctctggctggcgcgctgattagacttcagttcctgaaaaggaccagtggagggaagagctatacttctggagaagtaggcctggagttactacagtatgggggaaaagggtcgagttagaacaaagctaaggcaattcctattgcttccttgcgcaacttctcaaaacgatgaaagtcagaaggctgtcaaactcaaatatctttgcaaacagtttgaatactgtgaattcattacgaagaatgttcgagagaaagcaggggtctaatccaaaagaaatgtcattaaccaatactccaagtccttgagttttgttatatctgaactagttgaactgtgactgacaggtaatcctaatatatccaaatccaactgaataccaaattgagatggcaaatttttgtttgatataagttagcttgttagcatatgccctagagggcctccatccctgtattctaatgtttttactcaaagctctagcctttaggataggtgaatatgtaaatcttttatcactttctcaaattcaaactaaaggggaaagatcaaaccccttcccttcctacctgttttctgagctggctgacttgccagccacaagctgctcttgcagagttcttaccattcctgtaaatgttttgacttgttgcagaaattcctatctactttattaagcagtattgatctgactgtggaaacatcctctcacttgcattcttttaacttaaaactatttaagaactgatgttccgattattgtatatatttttctaaaaaccaaataaagctacctatgaaaatg

SEQ ID NO: 6346 - DNA, 6639 bp, Homo sapiens
tatttctgcaatcaaagtgttttatctgtaaagatgtttatttatttagaacccctgccctcccaccaaagcctcctgtgcttttgttttgtacttttttgagtcacgtgcccgactgtgtgtgtgtgtgtgagtgtatgcgtgtgtgtgtctaattcaattgcaaattgttcaaagcgtcgccttattctgccattgaaccaaataacagccataggcaaaacattgacaccaagctaactggaataattgtagacgatacccaggacggtccctttagcaattgtacatatttctttctagagaactctaatgactttctttggatatgagggttttgaaacctgtgaaccagaaaagctaccattagtgcgtagaaggaggaaggagctgactcgtgtttcttctgagcaggacttgtccttactgtggattgtgggtggcaccaggagctctaaaaactgtgactctaacaacgaaacaaatcgagggaaaaactcttgctttctgcactttcgccccatctaccagtctttgtaaagggcaatattttaacactaatgtttctcaggtatatactcagctagtctaggatggttgcacaccagtaaatggattaaagaggaaggtgccatgtgggtgactgtgtcatttctcctactgccacagatagacattttcgaggtagaaatgaagcctttcaccaccttcctatctgtggtgacatgtgcaccaaaacctgtcttgactcttgggataggtcctaggaagtggcagattggatagccagaaagccagtcactcgtttaattttttttccttctgaaattactagctaaggctcttggaattttgcactgtagtagagcagttaacacctttgacagattcctggaaaaaacttctagattctaaactgggtgaaagactggacatcattttccttgtcaggtgttgcatttttccgttagaggtgggaagctccacgatgccctgtgtctgtgggctcatgttccctcatcttgtagcttggagaggaaagaagttgccttctgccaaaagccaatggtggtatgttgaagcgttgtgtgatcaagtgttacatatgcacttcagatcctgtctgtcagtctctgttagggctgcctttcagtaactcatttattatttcttctttgttcttaagatttcatctcatgcccagaactcacaagcaggttttggagtgtgttccatctggccgtgtcagtgcaaattgcatttcttacaaaggagaacctcaccaaaaaaaacctcacagataagcaaagtatatagttttgcaagctttttcaaggtctcctggcaatactttcctgctcaatttttagcttttcttttttttttaaatgtcaagagagtgaaggtcttgattctctctgaatagcatttgtcactttgccagtaaatacagcatgctaagtttatgtgcttttaaatattagcgtttttcgtcagactcttcaagttcttcttgaacccttggtgcacagatccatatataacctcccttttcagtattgctgtgtgtgaattaactacaacacatatgcatgcatagctgtgaattctgcactactttttttttcttttttccccccaagaatatctcttgggaaaagtttttagtacgttacttaactttattttgctgctaatttgcgcattagccggtaacttgcaagtctggagaccacttactgttgagggtagctggaattttagacccttggcagtatttaagatttagacatttagccttgtgaaagttaccacagtgctccatgtgattcattgactgtgagcctgttgtccattgcactcagccctgtactcacttcttcactcgctgtcctggttttactgttcagattttggtgggttctcaaagcagtaccactctcatctgctcagtacatctgcggcaactggctgccttcgatgctgtcattgcgttcagcccagcacatcacagccccatcagtgtgtagccaccgctctcgtttttctgtatcgcttttatctcctgaaaaagatgcaccaaataagagatcatctatatcaggaattgaatgtctaactcaaacctctcatttttgtttaataggtagatctcatttgaagtctcctatctgaatctctgaaacaattatagtttgattagacaaaggtttttaataacacttcttttttgctgtagtcaagcattaatagaaactagtttaattttcacagtggtaaatatttttattcttgagttatctaggaatggattttccacgatgtctagtgacttaaaaaaaaaaaggaaaaacgtttctacaaatccctttggttttccatgggatctggaataaaatgtcagtgtctataaactgtatgtcatggagtttagtccttgtttcaggtttaatagaaaaaatcaggaagtatcatggcattgtctagacatcatgaagctattttatttccatagttggtaaacagtgaaaatttcattatctccaactactaggtacaactttaggccacaggaaaggttatttggcccgaaagtttggaggtgctccttgaggtgggaagtatcttgtgggaaagtagttacttgattcaatttagttcattggtagggttggggacttggtgttggtttctttctttcttttctttttttttttttttttaattttcccagcaatatttagcacaatgagcgtgtatgtgctttggggttaaaaattatctgctagggatgataggcctgggtttctcgttgacatctagatgggcctgattagagcagtcatctcctggtaggcacaaaataatcaccaacagtaatgttgtatctgtaatgtttgtttgctttttaaagttttattcttgatttcttgtaaacatccattgcactgaggccgtatcattccttaagacagccctacatcttgccttggtaatcccttagataatgtggaaactcaaaccgttaggctccagtcatcttagaccatttcccatccgttttgtattttctcgtcctgaaagcagctgaactgaaagtaagtaataatatgctggaccagtgggaacggatgtgggagtatttgtggtgtgctaaaatactgtaattatctgtgaggctgcctgacacgcttttgcaatcttgttttcatcattcattctgcaaacgtttatggagggccttctttgagcacagaggcaaaactgaaagcttcagggatttgctgtagctgaggagccctgggagcacagcccatcaagcaagggatgtgatggtgtcctaaatggagtgacagttctcctgggaaaagagatcacgtggattccggtcaaatcggctaaggcttgtggttctcttgagcaagtctgttccttctggaaaccaaaagtgcccttcatctttagagacattttactcttccatccaccttttcagactgagctgtctctactatttaggggttgaaaatccattacacagtcactttacgttaacattgggtcatcttatgtttgtatgagacggatgtgggatttgaggggaacattgtcattcccttaaaataactatcatgaaaaaaatagcaacagtatgtaaagggaccaagagtggcagcctttagggaaaatggagcagagaagagctgtgaacaaagctcatttatttgaaataagcgtgctttatttcacatagaggggcatcagacgttacatttcattcggacaaattactgaacagccgaagtgattgtttccaatgtaggttattataattattggatacaaagatttaactagtgtttctgggttggatttttgaaatagtatgcaagtcataagcacagtttcaataaaacacgtattctggaggtgcgtggaactttgtattatttgtagttgagaaaggcaaactttgctgacaaaccagtacctatcacaaacgaacacaaaaagtagctgttactgtgcaggctgtctttaactttcatttcataaagggtacattattgttaaactctactacatggtttggggagaaatccagtggttttatttaaatgaacactctcacactgccttttgatcaactttcaaagtattttgcagatgcattttgagcatgaccatttttttccccaagtaaaaacaattgtgcgtggcctccatataactcagaaagcatgctcttactacctatgcaagcaaacaataaaacatatagacatgaaatgttaagtcttaaaaaaaaaaggcaacaattatggagctctatttttaaatttgtgattttcaaaatatggcttactcatcattgtgtagaagagcatgaatgcgatttcttgttttgctctgcatatatttctctgctgtttttctgatcattggcgagattgtaaagtattttgcaagcagaagtggaattggatatgttgaacacacatcattggtgtacatactgtatttagcctgaagactttcctaaagtgttttgttctaaaaataacctgccattttctatagattttaattttttatatcttcaagggttctattttggtcacaaggaaagaatgtggcttctaatagtgctaagaattaaaagatgcttttatagagacttagagctattttgaaaagctttggggcttcccagccactgatcacaattagactaagcccatggaatttctgggagtgttgtgcagtggattcggttctagatccatcttacatttgtttagtgtttcccaatttttgggagaaggggtgcacagcaaatttgagagacttttttgaatctcacacatgtattttcctcaagattcttttaagcctcttctgaatgacttgtctgagatagtgaagacccacattaactagaatcagctggggaactttaaaaaatacagtgcctgggtcccagtccctagcttttgatctaattcatgtaggggtgggatccaggaattaccatgtattttaaaagcttctgggtgtttctaatttgcagacagattgagaaccactatgatacgtcatccctttactgagaattatggcgagaatcactgccatttgaattactcaggagtgactgattcctcagttgtgtaggagaagcagaaaaaataagaataaaaagaattgagagatactgatatcaaactcccatttgaaatacaagggcccttctgattcaaggcccagttggggagcttggaccatgttgtgaatggcctagcactcgccagtctggtggaaattggtggtcttagttgctggagcaggctgagtgtccccgcggggtttgcatctgtccccagaaccttttccccaggcccgtgggggaatagggaagtcactctgagctagaaattgtcgaagaagaaaagaaacaaccttcctagccttggaaagcctgtccctgcttttgatagaattattgcctttttgtaggaattacagtagcaaaccccaggctgccgctgaatttcctacttttgctcattctctaggatagttcttatccagaatgtggtttcaggaattcttttttttagtttgaaaatgaatgtgaaacattttctttggtgtcttttttttaaaaaaaaaaaacccttattgctattttttcgtgtttttgttttgttttgttttttgtttgttttaccattaagtaatacacatcccagaatttggcactctgtgttaactgtggaggcaaataaaatttagttttaatctgtggtgagctgaatgcactacaacaccttcgaagtaatctgatggtttcattctgtcgagcctcatgctgcctacaaaacaccacaatttacctggtgttttcaacattttaaggaatgaagatacaagtagacatgcaagttggaaatgtttctttagaaaggccatccagaataatgatatctgttgcagtcgtccaaatgcaatatgaaatttcctaggtgctattataaacggtgtggtgtcataccaaatgcaaaagcagttacagtatttccgaagttggagttctctttgtaggcctttcaaatacgtgtttgcattccatagaggtctgctcaccaactgtgcctctcaccactggttaaaattgaatttaagcctcattgacataagtcgtttcttgattgaactcttcagtttttacactggaatttctgtagttgtcttgaaagctgcatgtcacatcactgtacacaaagtgctttggtattactcatgcaccgtggatagtgatttctgtgtcgttttcattttcagttgtacagtaatatggaaggcaggatgtctttcctagaggctggaagaaaagtgtatcgtacattttaaatttattttagaacaagtgcatgagatgtgtcactgatttctgttatttatttgtatgttttattattcaaagtgtatgcacttttaagaagcagaatttatatttttacgtttgaaacgttttatttctgaaacagcgttgattatatagtatacagttggaattaagagaaaagtggaaaatgtaacaaaatacaataaatttattacaagatgtcctcttca

SEQ ID NO: 6347 - DNA, 277 bp, Homo sapiens
ccccaccacacaccggaccaccaagagagccagggctgctgtttcgcgactcaccagcacagatttgctcagaaactctgcccaagattgggcagaagttactttaaaaagacttggttcagctggtcacggtggctcacgcctgtaatcccagcactttgggaggccaagccagatggatcatgaagccaggagttcgagaccagcctgaccaacatggtgaaaccccatctctactaaaaatacaaaaattaacagcagagcgagactctgtctc

SEQ ID NO: 6348 - DNA, 3267 bp, Homo sapiens
cttttcacaagatggacccttcatttcaagcttaggctggcgttacttttgctgtctagtcaggactaatcacggtgtttcagtgcggagtgccaagagtcctatcctgacgtcaggctctgggtgtcaacctctgacttattctgcagatgctctgtgtgtgtgtgtgtgtgtgtgtgtgtgtgtgtgtgtgtgtgtgtgttcggggagagggtggtagcacagggcttgggatatcggcagtgtgggaaatgcgaagcatttctcatcatcatcatctctgctacagtcatgtttctgcatgtcagcgagcgacactgtccctgcctcaggttggaggttttatcagccaaagtgtttttttcatgtatcgttcgttccattcatccactctgtgccttgtcagcctttgaaaggcttggttgctcccaggctgctgttctcagggaccttaaaagggacctggttagtcttggggcagagagtatctacttgggcactctcttccaagaaagaccttgtctccattttcattagacaatgcttcttgtgtgtgttctggaagatcttctaaatggaatgcttgttgcactgttcccaggcgagtggctgccatgagacctgaggaccacacttgggggaccaatcatgtccttcaccactgtgccttagaatcgcccctggacagagttcctgggcagaggggaaagcagctcccaggccttactcaggcctcaggtccatgggttgggcagccagtctgggcccttctcaggatcctcatctccatcctcatcctcttccttcacagcatttacttggagctctttgtgacacaccatgtcagtcatgatgaatcggccaacagccagcccttgccagctgacgtcacagtctaagatgggaaactgtggtacagatagacatgaagagagcttagcagtgattgaggtggtgactaaatatacagtcattgaataaataccatgtagcaagtgtactttgtggagtgttgagtaagtggaaaatggaaagccagttgcatttagagatgataggcctaaagggaactgtcttctgtcgagaagtaaaggaaacttcatgaaggatgtagaagcttagctgcctcagagaagagagaacctgaagatctgaggcaagctggacaggagaggtggatatttgttgatggaagaattcaagtttataatcaattcccacttagcacctactgtgtgctaggaacttgaatgtgtatgtttgacaagtcctgcttggcctgatgggtgggagaaggaacctgagcctggctgagatggctaggcggagggctttgaagtccaagcagctgaactggctgggtgggtttctacctttgaaactgcaagacttgtttggagctcttaattacaatatctgatatttttacagtctgatcttttgacttctacatatagtggaaatctgccaatactaattggtggagatgggaactgtaaaagatcaagtatgctaattttaagcaaatgtaaaaactcataaaacaggtaaacagtggggtgatttcatttgccataattcacataagacgaattttaatctaaaagtactttcttgcttgtattctgtgtggcttttttttgttttttgaggccatatctcactctgtcactcaggctggagtgcggtggtataatctcagctcactgcaatctctgcctaccaggttcaagcgattctcgtgcctcagcctctcgagtagctgggactacaggcgtgagccagcacgcccagctaatttttgtatttttagtagagacaggatttcaccatgttggccaggctggtctcgaactcctgacctcaggtgatccgcctgccttggcctcccagagtgctgggattacaggcgtgagccaccgcacccggcctctgtgtagcttttataggctctgttactgttgcgtagtcttgaagaggtacccatcataatgacagcatctccctctgaagggttttggtcaaaatgggtgaatgagacttatacataaagacaggctttctcccctatagttaggaggtgaactcacacatgtgtacctgaacattcttgcttttgaggagacagactcccagtggtactactatgcttaggtgttggacaggataggggtaggaggagaggaggcaggctgctgtcctgaaagtggctgtggtttatggcatcactcccttctaatcagcaagtccagtggccacttagagcccagctcctacctcttcattcacttaacaagtagttattggctgtgcacagtggctcacgcctataatcccagcattttgggaggctgagtgggatgaccgcttgagcccaggatttcaagtccagcctgggctacatagtgagaccgtgtctctgtttttttaaaagctagttgttgaccagctaccctgagccaggcaccaccctgaaggagcttcttttcctctggggagaagcaaattcatgatgtgtgtgctggagatctggcactcatggccagtgctttccagtatcttgaactcttcgggggtcctgttgacccatttcgtgacctacctccgtgactgctctttttcctctgtctcttaagtgtgatggttttccagagtccaatcctcaggactttcccgtccacacacaggcctggtagtcaggtggctctaaaccattaggtgggttgtagacctctctcaagctgccacctccttgctgtcgccagatcgtatttcagtctgtcaggggttatctgtatctggaggttccactgttgcttcagtctcagttacttagaatggaacccagagtcctgcccctttccacctacatgctcttacttgaaagcacctgagacttattgggtccctgattcctgcttcgtctgtatccgcagagtagttgcatgtcatttggcctgttttctaaataatcccacatcatgtcctccctgcacttacattgccactgctctgatttgggcttttttttttttgggacaatgcctctgtcccaattctgagtaacagctctggttcttgccactaccagagttctctagcaaatctgagcatctgacagggtgaaaaattctgaatggcttcctgatgcctgactttatgggatcaaattcaagttgcacgctggcactcagtgcccttctggtatcatctgccaagaccagggcctgcttcaccacagccacaataaagtcctttcaagccctg

SEQ ID NO: 6349 - DNA, 157 bp, Homo sapiens
accctttggctttgctgagagaggactcagatgatagtgacgaatgtctggcagtgaggacacattttggcattcttgctgactctgacagagtgattctgatggacttgtatttaaattgtatgtgttttactctttgaaaataaatctataaaac

SEQ ID NO: 6350 - DNA, 297 bp, Homo sapiens
gttagggtaaagtgaaaacacaattttctggatatattgggcctcttagtattttttggagttttaaatataaaggagaatatctgaatgacacttaaaatgattgcttgtttatgtccagacagacttattttttattctaatgatggtagcaccactgatcttggatgtacatttatgtatactttgagaaaaagggttttaggttgatttttgtaatttcccacatttgtacatgtgcttttaaaggtgtacataaagcttcaaatggcaataaatatttatttttatacattc

SEQ ID NO: 6351 - DNA, 526 bp, Homo sapiens
ggtgggctggatgccacacagatggtctccgtgctggctcactgaagagctgagcctgtggctggcctcagaatcaggctgggtgcagtggctcacacctgtaatcccagcattttgggaggctgagtgagaggatcacttgagctcaggagttcgagaccagcctggccaacatggcaacaccccatttctacaaaaaatttgtaaaattagccaggcatggtggcgcacgcctgtagtcccagctgcttgggaggctgaggtgggagaatcacttgagcccaggagttcgaggctgcagtgagccaggatcatgccactgcactccagcctggtccacagagagacactgtcaccccctttcccccacaagactggcagaggctgggcagcctggggctgatgaagcagagatgttcgctggatcccaggccctggcacccctcaggaaatacaagaaaaagaatattcacatctgtttaatgtgcataaagccaaggaaaggacagttccgaattcaatagaa

SEQ ID NO: 6352 - DNA, 1369 bp, Homo sapiens
agaaccatttccacatattgtaaggtcagtgaaagtacaatgaaaaatacacctgctagcatgcctatgcatggcctctctgcaaataagatgaaggtcccttcaccacctgcttgcactgctaatggccctgtagattccactggatggatttgtaattttctcaaccatttcccctaatgctggatatttgggttatttccaacatttttacgcttccaaataaggcacccataatgattcttgcagagtaatcattaggctcttctataattatctaattatccttttttttttgtttttttctgaggcagggtcttgctctgacacccaggctggagtacagcggcacgatcatggctcactgcagcctcagcctcccacgctcaagtgattccacagtctcagcctcctgtgtagctgggatcacaggtgtgcgccaccacgcctggctaactttttgtactttttatagagacggggagtttttttgtatttttttaaatagagacgatgtctcaccatgttgcttaggctgttctggaacttctggactccagtaatcctcctgcctcagcctcccaaggtgctgagactataggcatgagccaccgtgcccagccatataattatcttaagataaatttctatacatggaatttttatacgtggaatttctatacatgaattaaagagcacagatttttgtatgttggttgcttggtttttagaggcagtatctcactccattgcccaggttggagtgcagtggtgcaatcatagctcaccgcaccactgaattcctgggctctaggagtcctccttcctcagcctcctaagcaactaggactacagagtacatatgtttttaagatctttgatatcttataccttttggggactgtatcagttaaaaactctaccagtactgtagaaacatgatcgtgtctctgtttccttgccacactgggcattaattacttgatccattaatgagttaattgcaccctcaataagagtatggtaaagtgtgacacatttacactacagaatattatgctgtaaagaataaggatgtaggccaggtgaggtggctcatgcctgtaatcccagcactttgggaggccgaggcgggcggatgacgatgtgaagagatcgagaccatcctggccaacatgttgaaaccccgtctctactaacagtacaaaaattagctgggtgtggtggcaggtgcctgtaattccagctactcgggaggctgaggcagaagaatcgcttgaacctgggaggcggaggttgcagtgagccaaaatggcgctactgcactccagaccggggacagagtgagactctgtctccaaaacaaaac

SEQ ID NO: 6353 - DNA, 737 bp, Homo sapiens
agaaagccctttcccagccctccaccacttccaccctggcgagtggagcaggggcaggcgaacctctttctttgcagaccgaacagtgaaaagctttcagtggaggacaaaggagggcctcactgtgcgggacctggccttctgcacggcccaaggagaacctggaggccaccactaaagctgaatgacctgtgtcttgaagaagttggctttctttacatgggaaggaaatcatgccaaaaaaatccaaaacaaagaagtacctggagtggagagagtattcctgctgaaacgcgcataggaagcttttgtccctgctgttaatgcgggcagcacctacagcaacttggaatgagtaagaagcagtgcgttaactatctatttaataaaatgcgctcattatgcaagtcgcctactctctgctacctggacgttcattcttatgtattaggagggaggctgcgctccttcagacttgctgcagaatcattttgtatcatgtatggtctgtgtctccccagtcccctcagaaccatgcccatggatggtgactgctggctctgtcacctcatcaaactggatgtgacccatgccgcctcgttggattgtcggaatgtagacagaaatgtactgttcttttttttttttttaaacaatgtaattgctacttgataaggaccgaacattattctagtttcatgtttaatttgaattaaatatattctgtggtttatatg

SEQ ID NO: 6354 - DNA, 3815 bp, Homo sapiens
tgatgatcttctcttcctaaatgcccccttagccattttaccctaatctcattcttggaagcaatcttttcttagctatgaagtgtaatttccaagataaacttgagaatataaataaactaaacactttcatcctgttctcacctctgcctctaacttcatcagtctgttcctcctcttctgtgtgtctcagcttctcctttaagaatgtggcgaagatacattgtccgagttcagaatgaaatacccttcagtacattgaggccactgcaactggattgctaagttcggcaacattcaagatcttccatatgggtgagagttgtcttcaaggatataaaaaatgccaaaagtttttttgttgttattacctactccgtgagatcctggatgaaacttgataacagattttcacatttagatagaactttgaggagtctgatcggaactacatcaaatccatcttggttttgaagagatccacaaaagaagagtgaagattttatagctttcctcagaagtctgttacagtgtacctttttttttttttttgtcaagaagttgatccaaatagctagggcagaatccctgtattgtcactgaaatcctgttactaatgccttgccctccatggaggtgagaagcaattgatcacccctcatccttttctgtacccgaagacttaaatcccctggctgctgcttctccagcctataagtaatcccaggtcctcctactgtttctcatagccctgcacttgcctctcagttgctctgggtgctcctgccggcctcttccgaactaccatgccctcctcagatagaataggaggcctgctcgtggtgtgtctcactaaagcaaagtaggatttcagatgcgttctagttctatcctctaacttctctggctcttatctagaacatgactggcatgttggcatatttcgtacctcccacccctgcactgcagtataatattataatagtgtttctaaaactttaaggggatagggaagaggtaatagacacctgaagcatttctaagaccagttggactcctttggcctgctgtcgatcagatagccacctcagcttagaccagcgctctcaggtctggctgttaaatctcccagtctcttttcctgaggcttctagtccctgttcaccgcatcagaaacctaactgtagtgtgccaagtaacttaacacaactctagagctcactgggtgaaaagtgggaacatttataaaaacttcaatccagaaatccagaacaccgtttttgttttcctcatttacttgttttgtctgaaaaatctctttgagaacccccggcagtaacccagtaaacactgaaggaaaagttctgatgggggatggttaattgacttttgaagttacagatgaaacccagagatttgattttccatggccagttgcttcaggatggagtcagtggcgtttattcccttagtatgtaggtgacccagggtggctttgctttggcaagggagaagtcacaagtttaatgggaagggaaccggagttagggctgtttgtgggtgattattttgctcttctctctccctttctttgtcaaatgctcttatttgaagccatctggaaatgatatttttccttttggtatgtttcaatcttttgaaacttgttcagcaaagtacctaggagggtaggcactgtagaaagaaatctaatttatggtgccagaatagggtgtggcctgttggaaggcaggtgactcaggtagacattgataaatgtttctgatttacatttgttggaaatattatgactgttcacatctcaataggttgatttttctgtgttgtccaagttatagatttctaatgctaagtacagttccatgttggtagtgtgcgtagcacagtaagatgtttgtggtgccagtgggcttgtgtttatattgtgtagatgttctggaattccagctctagagaagatgtaaattaatagaaatcaccacttaataatatgtacacaggattgatattatgtggaagcatgattcaggaaagtagatgacttattcataaatatgaagcactgttacatgtaaggccatgttctagccacagtgaatgatagaaaaaggaaggaaggggcatggtgcctgggctcaaggaactcacagtttgatagaggaagcatcacagcaaaagttggggccacttacaccatggcagttacagaaggccaggagctcagtcatgagaacatcaccttcccctgcagaagagttgcgctaagttgcccagaatcatattctgtaccttcatctctcaaccttccccagtggcaggaaagggtcaagcaagacccattccctctctagtgggacaaactgattctgtttaactctcatatgcctgggagcaagctgaggtggaatttgggttcccctatctctactcctaattgtaaatgggctgtctagacatgtgttacattaatttgatgaactttgttctgaagaaatggaaggtctcccccccattttagaccaacactacctgtctccctgcattttatttgttttcacctggtacatgtaagtcaaaatgaataatcatgttctgaccaatgtgtcttttagatcacataacattgcctttatgaagattcatagaaaaaggtttttttatctagatctcagtgccaaggaaagctctgatcctaagcgcagtatgtgtacacacacacgtctacatgtgtgtgtagatctgtatgtatgtattacaaacactgtgatttttgtaacttaagctgctttttctctctttgttctggctgctggaaagttcaacaaaacttacagcccacctcaaccaactaccccaacctatatttatttaatttcatcttatttccttgtaaattgtgtcaaatcctgtttttgaaaagcagcatagactgacaacttttcactatcatcttatcgaaggcattttggaaactggggtcgtatgtcccacctaggcttgctttgttactgccacaaatacctccagttcttaccagtgatgttattatgcattcaacctaattcattcatctggaaagaaacagttttttaaaaagggaaacctcacacgtaaatggctcagggcagcctggccttggtggaatgagcatgagactggaagctgaaagaagcaagttttaatcttgtcactaaatgagtgttgtttgacacatcatagcctctctgggcctcggctcctcatctgaagagaagttgaacttaactgctaagttgctctggctctaatgtttcatgaggctgtggagcgtgatatagatgcggaagaggttagaagaccaggctgccggcccagctgtcctgtgcctgccacatctggccataccaaatccatcgcatgcttcaggaaagggaggggatgctgtgacagcaaactcagcccaggagcttgttggggaaggagaaagggcaagtccctcgtggtccacagcaggcaccccccaagcacctcgataaccagtggcaggtaggctgaagtgaaggaagcctctgtcaggaggtctggcgcccagtgacagacaagacagctgtgagggagctggggcagccctggctaaaggaatgtctgagtaacttgtgaaactggaagcctctgcctctgaatgcattccaagacctggtgcaaatggatgtccattcattgttttgtatcagtgttcacttagatgtcttcttgaaaacttgtttgtggaataaatgtctaaaataaatggctcccactggtttctgccataa

SEQ ID NO: 6355 - DNA, 162 bp, Homo sapiens
ccatcgtgccctgctgaggggctggctgccttgagtggcctgatcgccacagcccttcttggaagaaaggcgtccgtgtttcaggttccacgcgagtcacctctttcgtcttaatgttcaccgtccacagctttggaataaaccatcctgggaagttgctgc

SEQ ID NO: 6356 - DNA, 736 bp, Homo sapiens
gacccctgtgggcgtcccctccctcccagccaccgcctgccacaccactcctgcctggtgctcggcagaccccactgtgccctggccttgggtctgccgagcctcctgcagcaggggacgggtgctttggccagagtcacagactgacacgtttcccactgtactggaactctggaaagaggggctccccgacctgcccatcccccaggctcttctgggccttccccttgggaactggcctcatcacactgggagttggtgcttcttgtctctgggtctccagagtttgccccgcctgtgcacacctcacattccagactctagccatctcggcaggatctcctggctccttgagtgcccaggtgccaccaagaggaagggccttgtgggatacaccttgcagaatagggatcggtgtgccccgctgcgaggggccccccatgggggctgtggcccctccgcaggcaggacatcccaacccctggctgggactgaaccacccagagcggagcggctcccttttcagccttgtgagtcacctggcaggccccagctgggctggctgtccgtgtccctcagcctggctggtgattccttgcaggccagaaatgaagagtccctgtaggttttggttttgtttgttttattttgttctttcaccttttttcctcattaaaaaaaaaaagtccctgtggagtgtacttatttattttttgattaaagggaagtaaaatgc

SEQ ID NO: 6357 - DNA, 475 bp, Homo sapiens
ccaagacctcaacctggcccgcggacctcaggccatcgctggcaccagcccctgctgcaagaccaccagagtggtgcccccagaaccctggcctgtgtgccgtgaactcagtcagcctgcgtgggagatgccaggcctgtcctgcccatcgctgcctgggtcccatggccttggaaatggggccagggcaggcccaagggaatgcacagggctgcacagagtgactttgggacagcagccccggactcttgccatcatcacatgagccctgctgggcacagctgcgatgccaggagacacatggccactggccactgaatggctggcacccacaagccagtcaggtgcccagaggggcagagccctttggggggcagagagtggcttcctgaaggagggggcagtggcgcaggcactgcaggggtgtcacacagcaggcacacagcaggggctcaataaatgcttgttgaacttg

SEQ ID NO: 6358 - DNA, 543 bp, Homo sapiens
gcctgctactgcctggggacacggacttctgctgctgccacctgcgccagccctaccttccaccacagatgtctcccagatgggccttggtcacactccttggcttctcccaccgcaagcaacgctgcctgcctctgccgctcctccacatcttgccgctgcccagcagagctggcttctgggtccacctgagcactggacggtgctcccagggcgttggagcaggcggaggggtgtgtggccaggtactaggaggcaccaggaaatcccgcggggtggcccatgcagaccaggcgcacgtggctcatggggcagaattgccaaggacagctcacgacagtgccaccttctcaccattccagccaaggagagatgtgacgttggaactgctctggcacttctgtcaagcctcccccgccccaattgccttgagatctctgctctttgtcagagatttgcaaagactcacgtttttgttgttttctcatcattccattgtgatactaagaaactaagaagcttaatgaaaagaaataaaatgcc

SEQ ID NO: 6359 - DNA, 236 bp, Homo sapiens
tactcgggatcctcaggacgcaggtcacattcacctgtgggcagagggacaggtcagacacccaggcccaccccagagaccctccatgaactgtgctcccagccttcccggcaggtctgggagtagggaagggctgaagccttgtttcccttgcaggggggccagccattgtctcccacttggggagtttcttcctggcatcatgccttctgaataaatgccgattttatccatgg

SEQ ID NO: 6360 - DNA, 808 bp, Homo sapiens
attcaaagtgtcagaggttccatatttgtaatagcaaatgggccctgactgtaaattagtgaagagtgaatgtaacttattacccacagggacaattccaaatgaaggccttaaatgatgctcagctaagctggttcttgtgtggcctctgtaccttcaaaagctgccaagtcctatgattacacgtgatgggacttgtacacttgaagtgaaacacagttttaaaacttgctttgtttagaattcccacctcatttttccatggacaaaagtattctttatgtcctagtgcacttacaatttggtattacctgggagtgaaaagaaatattacagccatgcctaagtgacttcttgaggtgagattgttctgtcagaaaaccctctcccagttcccctgcagctcttcaggaatccacatctctccagagctctttgttctcatgggtggcacctccagagtgaagaagatcctttgtcaagaagggaaacagaggggaaatgagagggtcctgcaggcagagctggaatcaacttccactctgcctcttgcaagctgtgtgaccctgggcacaatttctccttcctctggaaacctctgttttcttagatttggagcagggtggtcacactgaccttgcagagttctgagagtcagagacagaacataaaaggcctggaaaacattctccaaaaagaagctgcaacatgtgtggacaatgggcttttcatgcctctcttactgtctcttactgtctgttgacctggtgcaagaaacatgctctggtgatggctgtgagggaggaat

SEQ ID NO: 6361 - DNA, 808 bp, Homo sapiens
attcaaagtgtcagaggttccatatttgtaatagcaaatgggccctgactgtaaattagtgaagagtgaatgtaacttattacccacagggacaattccaaatgaaggccttaaatgatgctcagctaagctggttcttgtgtggcctctgtaccttcaaaagctgccgagtcctatgattacacgtgatgggacttgtacacttgaagtgaaacacagttttaaaacttgctttgtttagaattcccacctcatttttccatggacaaaagtattctttatgtcctagtgcacttacaatttggtattacctgggagtgaaaagaaatattacagccatgcctaagtgacttcttgaggtgagattgttctgtcagaaaaccctctcccagttcccctgcagctcttcaggaatccacatctctccagagctctttgttctcatgggtggcacctccagagtgaagaagatcctttgtcaagaagggaaacagaggggaaatgagagggtcctgcaggcagagctggaatcaacttccactctgcctcttgcaagctgtgtgaccctgggcacaatttctccttcctctggaaacctctgttttcttagatttggagcagggtggtcacactgaccttgcagagttctgagagtcagagacagaacatgaaaggcctggaaaacattctccaaaaagaagctgcaacatgtgtggacaatgggcttttcatgcctctcttactgtctcttactgtctgttgacctggtgcaagaaacatgctctggtgatggctgtgagggaggaat

SEQ ID NO: 6362 - DNA, 288 bp, Homo sapiens
tcggtggcttcttagccccctgccccccaccctttagaactttaggactggagtcttggcatcagggcagccttcgcatcatcagccttggacaagggagggctcttccagccccctgccccaggctctacccagtaactgaaagcccctctggtcctcgccagctatttatttcttggatatttatttattgtttagggagatgatggtttatttattgtcttggggcccgatggtcctcctcgggccaagcccccatgctgggtgcccaataaagcactctcatcc

SEQ ID NO: 6363 - DNA, 329 bp, Homo sapiens
atgaggccagaccatggacactacacccagcaatagagacgggactgcggaggaaggaggacccaggacaggatccaggccggcttgccacaccccccacccctaggacttattcccgctgactgagtctctgaggggctaccaggaaagcgcctccaaccctagcaaaagtgcaagatggggagtgagaggctgggaatggaggggcagagccaggaagatcccccagaaaagaaagctacagaagaaactggggctcctccagggtggcagcaacaataaatagacacgcacggcagccacagcttgggtgtgtgttcatccttgtt

SEQ ID NO: 6364 - DNA, 83 bp, Homo sapiens
gaggggttcctggagtcactgcagagggagtgtgcgaatcaagcctgaccaagaggctccagaataaagtatgatttgtgttc

SEQ ID NO: 6365 - DNA, 224 bp, Homo sapiens
gaggggctcctggagtcactgcagagggagtgtgcgaatcaaacctgaccaagcggctcaagaataaaatatgaattgagggcccgggacggtaggtcatgtctgtaatcccagcaatttggaggctgaggtgggaggatcatttgagcccaggagttcgagaccaacctgggcaacatagtgagattctgttaaaaaaataaaataaaataaaaccaattttt

SEQ ID NO: 6366 - DNA, 184 bp, Homo sapiens
gtgtgcagatctctgctcagcttcccttgcgtttaaggcctgccctagccagggctccctcctgcttccagtaccctctcatggcataggctgcaacccagcagagggcagctagatggacatttcccctgctcggaagggttggcctgcctggctggggaggtcagtaaactttgaatagtaa

SEQ ID NO: 6367 - DNA, 521 bp, Homo sapiens
ggggtcaggatatccccacccccaccctgggaaagacgcctttccccactcctgaaccatgaggcctcgctctggggtcttggatggcttttccaccgtccctgagactggggttgaggggactgacgggggccaccaccgccccgccctccagcgcctcctcccagggtggctgggcctcctgttctcagggatcacacctgggtgaggggcccaagcccctcccggaaccaaaggtgcaggctcaggcctgcggctttctggctgctgtgctgcctcctgggctccagccctcccctgcccccagcccgtcccctgcccagggcacagcggagccatgggggctgggagtccccatcagaggcagtgaggtgggccccggccctgggacaggcagctgccttctggtctgcatgacactaagacgcttgtccacagcggcgacccaggcctccaagcttgcacagaggcaaggccagacttttccgtcgtttattttcaataaataagcagctcagcgc

SEQ ID NO: 6368 - DNA, 438 bp, Homo sapiens
gttgttgctgtagcccatgctgtttatcaagcaatgctcagcttgaagaatattcctgttttggagactgcctataagttaatattgggagaaatgacttgtgccctaaacaacctcctgcacagtctgcaacttcctgaggcctgttctgaaataaaacatgaggcttttaagaatcatgtgttcaatgtagacaatgcaaaatttgtagttaaatttgacctcagtgccctgactacaattggaaatgccaaaaactcgagtctttaattgtaatgactttgttttatccacagttaagccttttctcattacatatttatgtatttcactgtcatgtcaacatgtctgcagaatcactgtatgtaacaaacagccatatttaagacatgcctggataaataaaattggtaggaatgttttcttgccattatattt

SEQ ID NO: 6369 - DNA, 39 bp, Homo sapiens
gggactgggatctgcacagccattaaattataaatctgg

SEQ ID NO: 6370 - DNA, 438 bp, Homo sapiens
gttgttgctgtagcccatgctgtttatcaagcaatgctcagcttgaagaatattcctgttttggagactgcctataagttaatattgggagaaatgacttgtgccctaaacaacctcctgcacagtctgcaacttcctgaggcctgttctgaaataaaacatgaggcttttaagaatcatgtgttcaatgtagacaatgcaaaatttgtagttaaatttgacctcagtgccctgactacaactggaaatgccaaaaactcgagtctttaattgtaatgactttgttttatccacagttaagccttttctcattacatatttatgtatttcactgtcatgtcaacatgtctgcagaatcactgtatgtaacaaacagccatatttaagacatgcctggataaataaaattggtaggaatgttttcttgccattatattt

SEQ ID NO: 6371 - DNA, 39 bp, Homo sapiens; identical to SEQ ID NO: 6369

SEQ ID NO: 6372 - DNA, 1812 bp, Homo sapiens
atccccagggttccccagagatccccgaggcaggccttgcctcagtgggaccggggaccccaggatccagcattaggattgagactgccccagcgaagatgcccttcccaggctccttccacctggagtccccctccccgggtctgggtggtggccaggctatgtggactaggggaagcccagcagtgcctctgctcagctacctgggctgtggctcagagacctgggggtggagccaatgccaggccagaagccttcaagatcgcatccagatgaagaacccaaggtactagatagtcaggaaatggcatcgaccagccacctccaccttctttcagtgtttaccgaagccaccaataccaaagagaacgggtcctgcggtgctgaacagcctcggtgtggcgatgacagctggcaggagatgacaggaatccagtttcccagagccacaaatcctgttctccttggccactcacccactgtgaggtcctctaggaaaatacacaaagagaggaccagaccaggcagaggaacattttgtttcatatgaactgtggctttgacccccaaactgcaaggaggaacttgctgggccaagctgcagcggcgctgtcttgctggagtggggacctagagtcagagaaaacccacaggctcctctgcccattctcctccatctgcacacgtctcagcctcggaccctcaccactccatggtgaggaaggccatggccaggggaaactgagtttcatccaatgtggagaggagcgttgtcctagagcagggcaactcccaaactgtgacctctgatcatcgtcccttccagcttgctggagtgtccagagagacagatttgccacaagctaggcttacttataatgctccaccctacagaaatgggaccccaagtacccaatcttccctttaggagaggcaggcaggtgggtgagcagcagatgtagtttccatttccctgggggtttaattttccaaactttgtcttttttttttttttttttttttttttgagacagaatctcaactctgtcacccagactggagtgcagtggcacaatctcaactcactacagcctcgaactcctaggctcaagcgatcctcccacctcaacctctagaatagctgggactgcaggtgcataccaccacgcccagctaatttttgtattttttttgtagagacacggtctcaccatactgcctgggcaggtttccaactcctgggctcaagtgatccagcagccttagcctcccaaaatgctgggattacaggtatgagcactgcacccggccacttttttttgtttttgaaacagggtctcactctgttgcccaggctggactacagtggcacaatctcagctcactgcggccttgaactcctgggcttaagtgatcctcccacctcagtctccctagtaggtggaactacaggcatgtaccaccacacctggctattttttttttttagagacagggtcttgctatgttgcccaggctggtctttaattcctgggctcgagagagccactcatccccatctctcagagtgttgggattacagccatgagccaccatgcccggccaaacttcagccttgaatattagtgattttgccatattagtttaccatctgtacaattatttgctttatatttttctttaaattggctcattattcacttaatgaaattattgcaacaggaatcttttgtatcacttctgtaaatggaaaaccagtctcatttgccatcaatagaaggtaaaacatgaaaataaatacaatgtaaacaa

SEQ ID NO: 6373 - DNA, 831 bp, Homo sapiens
cgctggagccccgggtcctggctgcccacctgccctgggagtcttgctgtgccacacagctccccaccccctgctaggaggtcccagtctcacgccttcctcatgtgttgttctacctgctgggatgggggtcagcctctctttggtgacgtcacgttctctgggatcctgaggacccgggcctcaaatcagggaggatacgcgggaggccccctccatccaggcggtgctcctggggtgccgggaccgggcagtgtcacaccctgcctgctcagtcctggggtccgagatgctagggacgcttgagtgagggaggtggtgtgagggccaggtttcctgaaaggcgggagtcagacctccgcccccagccagagcaagcttggggcaccatgcccaggagggaagaagccatccacagccttccctgtcaccggctcctctgtcctgcctaccctggtcctggcgggacttcactatttgacttggtttcctttcagatattcttggctcagggcctgggttgagggagcttagggaaggacgtccgtctgggtgcttttcctccagtttgctggctggcttctccgtctacccacagtgacctcacagagaggccctcctgccacccatgctcatgtggtgtccccaccgcccacttgtttgatgtcactgactgtctacatgtatttatattcttgatattttctaccctcactagaatgtaaactccatgaaggcacagacttttcttgttctcttctctatccctagagtaagaccaacttgaacctggcatatagtagctgcttaataaatactcgtctgtcaatg

SEQ ID NO: 6374 - DNA, 189 bp, Homo sapiens
accccaagactacagctgcaggacccaggacgcccctcccctcctcattcgggcagagggaaatacgggacccggtctctgcctcctggctgccctcctccctggctgtgtaaatagtctccctatcccacgagggggctttgatggccctggagatcctacagtaaataaaccagcatcctgccgccc

SEQ ID NO: 6375 - DNA, 530 bp, Homo sapiens
cctctgaccctccccctgccttcctcttgccttgggacccagtccctctctctttccctccccttcccagacttttgccccggctctgctggccaagtcgtgggtcctcctctgtcccttcattgcatggcacagctcactttggcccttctccacccatcccaaccccattgctaacaacatggtacattccggccccaccactcagagccttccgaagccaacacttgtccccaccctggccctgcgtccttccctctccagctggttaagagggatttagaattccctttctctttttttagtgcatcgtccatgccaaagtgtgcggcccttcctgacatcaccacagtctgagcagcctcccgcgtcctgcagggtagtccgccccctcctccccaccatcctccctacctccttaactttgtactagactggcctgggcctgcccagctcagcgttatcagtctgtttcatattatttattattttaattttctattaaattattgaaataaagttaagttgag

SEQ ID NO: 6376 - DNA, 212 bp, Homo sapiens
gctctgccacccccaggagggacccttgatacatgtacaaagcatacatagcaccccttgccctgtgtctgtggaacagaagcagcttccttcagagaagactgcagctcccaaggacacaagctgttgggatgctacttctcagcttcacgctgtccctttaaggtgtttattttttaagactcaataaaggagtgtttttaatcacctca

SEQ ID NO: 6377 - DNA, 670 bp, Homo sapiens
gtggacagcagtgtcccggcacaggcccatcgagccgggtccagtacccaaccttcgcacgagtgtgttgcacgtttacacagggtgggctgcccccaccctgcactacctatttttgtgagtctccgtgacccgggtctgtctgctcatgaggggctgcggagttctatattcacatatgcaaacctcctgcctgactcgctagtccctgcaaatatgcaaaccccccatcatctgcacacccgggcagtgctcagagcccggccccaggcccccgcgctcctcactcctgcctctccacgctgccccgtccctctcccccaacagggaggaggtcggattaggggaggttcagaggaggagaatgtctcaaaaaaaaaggacaaaaaacaaacccagagccactcctttaatacagaaacttcattgaaaaaacctagccctgtacagctgcccttttaaagaggtggccattgcagggtctctgcctccccagcaggtggcagatgctcccggccactcgtttaaataactgtcccctggagggggccggggtttgaaggcagggcccctgccaccctcctgggggacacccgtgcatgtttacgccttttctggttgtgtcagtggccggagcatggcagctgggcatcaataaacacctccgagg

SEQ ID NO: 6378 - DNA, 755 bp, Homo sapiens
ggccgggggccgggaccctccccctccccacccccacccccgtggagacagggctctggggctgatggctggggttgggagccagggtcctcttgcccggacaaccccaggactgacgatgaccccgaaagggaagaggccccatctctcggggactgagggggtggagagaggggacctcttccccctactctgcccccttcctgcacacccttgcgctggaggaggggagggggcaccgcctcccacccactgagggcaggagggcttgtggggagggacaccaacagggtttcaaggggaccaggagtcagaatgtggggagacgcctctgccaaggccatcccagcccctatgctgccatcccccagggctccccatcacccgagaggagaggacgccccaactaacccccgctggccctcgggcctcccgagtggccggctgcaaccacggctcctctccagggtaggccagcttgaggaatcttatttattttatttatttacccaaatttgaactagtctgttgggttgggggaaggaggtggctgctacccccaagccttcccagtgctgacaaccccgggggcaggcgagggcgcccagtccctcaccatcggctgcacatcgcgccctcgggccctgccatgtccctggtgctactgacctctcaaggcttcctccaatctggggtcgggggaccctgggaggtgctttacagaccgctaataaaagacgatctgcgtgaacgcc

SEQ ID NO: 6379 - DNA, 580 bp, Homo sapiens
tcactcactgtgtgccaggcaccgtgctggacatcagaaatgcagtggtaagtgaaaacattcattcactgactcagcaaatacttatatagtacctgctatgtgccagggacagttccaggcactggagataaaacaaacaaagcaaaccaaagccccggccctcatgcagctgatttctagtggggagagtagacaagcagacaagagaaataaataaaatgtcatctgttaggaagccattctaaagagaagagagaccaggtgtggtggctcacgcatgtaatcccagcactctgggaggctgaggcgggcagatcacctgaggccaggagttcgagaccagcctgccaacatggtgaaaccctgtctctgctaaaaatacaaaaattagccaggcatggtggcaaacgcctgtaatcccaactacttgggaggctgaggcaggagaatctcttgaacccaggaggtggaggttgcagtgagtcgagatcatgccattgcattccagcctaggcaacacgagcaaaacttcctctcaaaaaaaaaaaaaaaaagaaagaaaagaaaactctgtctc

SEQ ID NO: 6380 - DNA, 464 bp, Homo sapiens
accactgctgggcccctctgcctccatcacaaacctcccgctcccttcccccagccctggagccccctcacctccaccggccccatcccccacaccaaatggccgccttgggcctgcccacccaccccctcaacttcacaccttgatttcactcccacccccctctggcttcaaagcctaaccaaggctgctgggagtccagctggggccggcttccccttcccggctctcacctccgtgtgaatggaaggggctctgcctggccaaatggggccacagaccagcatccccacttaccaggcctccccatgggctctggaggggctcaatccccacccccccacacacactggtgcaggccacaccagtctgttgttctgggaccagagtatttttgttaataaaactcaaaagccatccatgctcaggaaacattgggctcctgtgtttggccctgggcgggg

SEQ ID NO: 6381 - DNA, 396 bp, Homo sapiens
cccccgctcccccgacgcatgtggctccagcccggcctggccgccagggagcgccactggcttcccgccacccgaagggagctctggaccctcagagcccctgcagaggacggatctagctcctgtatatatattttattgcatgcactgtgaccttggggggagaacagaagggggacgacgcccccgcacctcctgcgatctggctggcttggatctcgtttttaacccgttcctgccccacctgccctatagttatggcctgtgttctgctctcctggtcccagtgcaccgtctgctctgtgaactcctcccaccaggcccttcttaccccacgcgtgtctgtccccctcgttctgtagcgtttgtacataataaaacaatggagtggagaca

SEQ ID NO: 6382 - DNA, 62 bp, Homo sapiens
gtccagaagcctcgaggtctcctgtttctcttcctgaaaaataaatatttgcctttcgatca

SEQ ID NO: 6383 - DNA, 604 bp, Homo sapiens
gacctgcctcctgcctgcccctctcccgccagactgttagaaaatggacactgtgcccagcccggaccttggcagcccaggccggggtggagcatgggcctggccacctctctcctttgctgaggcctccagcttcaggcaggccaaggccttctcctccccacccgccctccccacggggcctcgggacctcaggtggccccagttcaatctcccgctgctgctgctgcgcccttaccttccccagcgtcccagtctctggcagttctggaatggaagggttctggctgccccaacctgctgaagggcagaggtggagggtggggggcgctgagtagggactcagggccatgcctgcccccctcatctcattcaaaccccaccctagtttccctgaaggaacattccttagtctcaagggctagcatccctgaggagccaggccgggccgaatcccctccctgtcaaagctgtcacttcgcgtgccctcgctgcttctgtgtgtggtgagcagaagtggagctggggggcgtggagagcccggcgcccctgccacctccctgacccgtctaatatataaatatagagatgtgtctatggctga

SEQ ID NO: 6384 - DNA, 137 bp, Homo sapiens
gcctgctgggggcccagtttggtgggcccttctttcctggactttgtggaggaggcaccaagtgtctcaggcagcgaggaaattggaggccatttttcagtcaatttccctttcccaataaaagcctttagttgtgt

SEQ ID NO: 6385 - DNA, 842 bp, Homo sapiens
cctctgccctggggctggactgcatggcccccctctttccctcagccaagaacaggcctggcccaaggtgccaccccctagcaccttgtcaggctgtcccttgctggggaaagtggcttggttccccatctcctcgccagctgctgatccctacacgggcaggacagatgggcagctgcaaatgagtctggagcctctcatctcccatgaggctcagctggggtctctgtcgctcctgccccagttccctctgggtcccctcctaggtgctgtcctgaatggcccgttgtcatcccaggggtgactcctggtgatgggagtcagcagtttcagattcttacactccatagctccccttaccatgaggtggagctggcttccttttccctgtcttcagccctccctgtctcccccacttcctggccagggctctcattctggacctgtgttgtaattgtgtacagaggatggcgttggcctggggtgggggtgctcgctttgtcttctgtcctttggttctccttccataatgctcctgtacccagtttatttaaggggacatgcactggaataggaaatgtcccccatctcccttcctgcaccctgctgtgctccctccaaacccaccttgctctgtgttctcaggcccccctgcttttgtctcaccaggacccatacctttcaccttgttcccttccacccctccagttagtccctatctgggtaagggtcttcccttgagctccagggggtggaacccaatgtttacattctcttctgtctctgcccccaccccatgcagcgctttgaggaattggaaaagaacctgctgttgtacctgg

SEQ ID NO: 6386 - DNA, 298 bp, Homo sapiens
ggccacgccccgcccggccttacctcggctccgccttcagtcggcctcttgtccaatccccgcgccccacactgcccagcgccccccgggacctccgcgggtgccgccctcgcgcgggctagggggaggttctcccagcctgagtccgtagccccgccccggcgctggtcccgcccacccagacaccgcccacttcccggcccggggcctgcacaatctccgaccgcatcactgtcttccggagtcccccttcttctcccagactctgtcttcaataaaaactgagcttcccgcggcc

SEQ ID NO: 6387 - DNA, 533 bp, Homo sapiens
aaagatggccacaggacttgcaactcagggtggtgtctgaagagcagagagtggcctggccctggagcctttttctagtcttttcagaatagatcatgggcctgaggcctccacttcttgaggtctgaggcccagcagcctctagaaggtagcctcctggtgtttgttctcccagtaaaatggttttgggcgataacttctagattattcctggatggccagggaggctctctgtctcagcaggtgatgacgggggtaccaggggtgcctctgagacccattctcgtgtttccctgttgtaccttttgcctgcagggcagagagatctggtttctagcaaattcccagtaggatgtcatgtaagttccttccccctcttagagattgaaggctgtaagagtccagatggtggagccaggctgtctgggttcaaatgccatctttgacacttgcaagctaaatgacattactcaaattaatcgttctgcacttcagcttccttgtctatcaaataaaaagaatagtacctgccc

SEQ ID NO: 6388 - DNA, 742 bp, Homo sapiens
gatgaaagaacagaagttgtttggaccttagagccattgtccacaatcacggatggttctcaagagttgattgtaagaaatttccaaagaaggctgcctgcatagtggttccggctgccctttctaggtgattggaatcagcccatctaaagcagtctttatatgcattccgaggccagagtaacattttgaactttggggggatatttgttcatcacttgggtagaagaggagcaaaaatacctctgttttctcttgccaaagtaagatgaagctattccaggttgagggatttttctttgcacggggttgattaatttctgcacagggagtgagattattaaagtaacacacacacaaagtaaattgcaaaatgaaaaaaattagaagcaaatgagttttggaccaatattgttgataaatctaaattgttaagagagatcttataatgcaacatcaaattctttattcaattttactgaagtactggctctttcctgctctggacaagaattgagcaacttgtctgatgactgggaaaggaggacctgcaaccatctgacttggtctctgttaatgacgtctctccctctaaaccccattaaggactgggagaggcagagcaagcctcagagcccaggcctcagtggtcattaagatgttaagtcttttgcggcagattcctggtgatttgatcaataaagagtaatttcttgctaaataaataaaagaaaccttgttg

SEQ ID NO: 6389 - DNA, 516 bp, Homo sapiens
cctggggccccagcaggggtgggaggtgtgggcagaagataaggggccagggagctagaggaacctttagggaggatagtggagaagccgcaggagaatggaggagctgaggatgctggaagaagagaaccagggtggaggaagtgacatgccctggagacttgtgggaagtgggttggagggaggccaggccggcagcgggaggccctgggagaaatggagagaggtcagcggagggctggcctcagccgcggctccttggtgggtgcctggcttggcaactgctagagcagggaggggggagggcaggggattacctaattagagtgggttagcttagattggtagctgctgaaactctcgttgagtcaggagcgggtaaaaggtaggtggggtggggagtggggccccggggtggggcctgggcctctgcgtgcaaaccccagcctccctcttcttcctcaggctttggagcccctgagtttgagttcaataaaaactttatgtggtaaacga

SEQ ID NO: 6390 - DNA, 1600 bp, Homo sapiens
aggctccccaagccccctttgccgggttggagcagctgtccaaggcccggcgccggagtcgcccccgcttttttgcccacccccctgtcccccgagctgaccagcgtcacggctgctacgtgtgcgggaagagcttcgcctggcgctccacactggtggagcacatttacagccacaggggcgagaagcccttccactgcgcagactgcggcaagggcttcggccacgcttcctccctgagcaaacaccgggccatccatcgtggggagcggccccaccgctgtcccgagtgtggtcgggccttcatgcgccgcacggcgctgacttctcacctgcgcgttcacactggcgagaagccctaccgctgcccgcagtgtggccgctgcttcggcctgaagaccggcatggccaagcaccaatgggtccatcggcccgggggcgaggggcgtaggggccggcgccctggggggctgtctgtgaccctgactcctgtccgcggggacctggacccgcctgtgggcttccagctgtatccagagatattccaggaatgtgggtgacggcctaaaaagtgaccatctagacattgtgggcggcccgagatgggctcaggggcccgaacctctgcagcggcctgcagggaggtcccagaatccaccgcaagagctggcctggggtgcggacagtctgatcttgggctctcagcagcctcttctgccagcaccttgctccccgctgccctgggctctccaaggccccctttgctgaggcagggctgaggtgagaaccccccagacctccatacagggaagcaaaagctgtttctcctcccagagatgctaagaggattgaggtagagaagaaccttgttttctctgttgtctttttctttttacttttttaattttttgagacggagttttgctcttgttgcccaggctggagtgcaatggtgcgatctcgactcactgcaacttccacctcctggagtcaagcgattctcctgcctcagccacccaagtagctggaattacaggcacctgccactatgcccggctaactttttgtatttttagtagagatggggtttcaccatgttggctaggctggtctcgaactcctgccctcaggtgatccacccacctctgcctcccaaagtgctgggattacaggcgtgagccacctcacctggccttttcttttttattctttgaccttcccacaagacaatacccattgtctgttttttttgtttatttatttacttattaagacagcatcttgctcctcacccaggctggaatgcagtggtgtgaactgggctcactgcagcctagacctgctgggctcaaggaatcctcctgccccagcctctcagatggctgtgactacaggtgggcaacactatgcctggctaatttttaaatttttttgcagagatggggttcccactatgttgatcaggctggtctcaaactcctcggttcaagcaattcgcccaccttggcctcccaaagtgctgggattacaggggagccactgcactggccttcattgtctttttgctgcacaacctaaaaaaccagtgaccctgtattgg

SEQ ID NO: 6391 - DNA, 1429 bp, Homo sapiens
cggccttaaaagtgactatctagacattacgggaggcccgagatgggctcaggggcccgaacctctgcggcggcctgcagggaggtcccagaatctagggcaagagctggccctggggtgcggacagtctgatcttgggcccttagcagcctcctctgccagcaccttgctccccactgcccagggctctccaaggccccctctactgaggcagggctgagttgagaacccccagacctacataaggggaaccaaaagctgtttctcagcccagaggtgctaagaggactgaggtagaggagaaccttgttttacccattgtctttttaaattttttatcattatttttattcttgtgaccctcccagaacacaatactcattgtctttttatttatttatttatttatttctgagacagcttcctgctctgtcacccaggctggagtgcagtggtgtgaacagggctaactgcagcctcaacctgcagtgctcaaggaatcctctcccatcagccttccaaatatctgagactacaggcgggcaacactacggccagctaatttttaaattttacatagagatgaggttctcactgttgtccaggctggtctcaaactccttggctgaagtgatcctgtcgtctcggcttccgcaagtgctgggattacaggcgtgagctaccaccatgcctggcttccattgtctttgtgtgtgtgtgtgtgtgatggggttttgctcttgttgcccaggctggagtgcaatagcgcaatctcagctcactgcaacctctgcctccagagttcaagcaattctccttcctcagcctcccaagtagctgggactacaggcacccaccacctccattgtctttttactgcccaagttaaaatcctgtgactgtgtactggatctggcctgcggttgtcatatttattgatctgagtccaggcagtgtttttaagtgatatgagttagtagtgaaaattgaaaaggatattttacaaccaaatacaggttttctggtgtcttttgaaaaatccaaagatttggcaactcgacctaggctccgacaaaaccacagttgttgggagctgagccggagccagaactcacaattcaccgtggcccggccacccatccccaccactcccgtgggctcctgaccaagcaccacgtgccattcatcatggcttgcttttagtgtttttggtgtttatcttaaagtacagcgaagaagaaagggaagtatttcttagacccatgtctctgtccaaataggcctttccatctggcatttcccgctcatttatatgacttgctgagttcctatggtcatttgagtttgcaaacagtggtctgtagcactcaggttttctggagttggagagaaagggtggcaagagagaagtaaaagttggttttatttt

SEQ ID NO: 6392 - DNA, 213 bp, Homo sapiens
gcggcaccgcaggctggagttgagcctgaccttggcacgaaggactgacggatccctgaggtgggccactgagtcggggactccggaactgaaattcatgccctgggctttcctcaaggatccctcaagtttccaacttgtaaaaagaaaagtgcctgtaaagattcgaatagattagacttgccacccatctccccagtcttttgtttaaca

SEQ ID NO: 6393 - DNA, 1887 bp, Homo sapiens
tggcgttcacacaaactggtcagcgtttccctggagaggaagaggcaaggtttgtgtatttgggggataaggaaaggaagtgggcgtttgaggaaaacaaagttctgccttaggtaaaaagcagaggtaggggcacagagggctgtggggaggaggcaggaatctgaaaaggtgcctgggggttgaccccattttctgaagctccagcacacagggccccgtgttcacgtcccatccttcactgaaaaccattcacctaactggcttttccttcatgattgttctctcccttgtagctctctgctttttggcctgtatctctcctactcctctgagatggggtcccctacattccagtgcctattaaaggagcctgcacccactctggaccccccagaatagaggggatacctcaggcctgtccctcggctggtggggggggcggagctcatcccaggattcttttcttttttttgagatggagtcatgctctgtcgcccaggctggagtgcagtggcgtgatctcggctcactgcaacctctgcctcctgggttcaagccattctctgcctcagccttcccattagctgggattacaggcatgcgccaccaggcccagctaatttttgtgctgttagtagagacggggttccaccatcttggccaggctggtcttgaattcctgacctcgtgatccacccgcctcggcgtctcaaagtgctgggattacaagcgtgagccaccgacccctgccgaggattctgccttttaccaatgcaggtgaaacatctggcaaggagacacctggagtgtaggtgttccttggtcttgaagacctagaggtggccatagagaggacagtggcctcaggtggggaactccccccccactctcattctgcaagtgcacaaactatcaaacatagcggactctggaactgggccaactcttcactgtatgcattagtgattgcagtgtttttttcttcttcagatatttgcatgttccctggattttgtattttttgataaagatatattcttgggccacagtagctggagatataatgccggaggattcttttttttttttttttttttgagacagagtctgtctctattgcctgggctggagtgcagtggcccaagctacgctcactgcaagctccacctcctgggttcacaccattctcctgcttcagtctcccgagtagctggaattacaagcacccgccaccacgcccaactaatattttgtatttttagtagagacgggggtttcaccgtgttagccaggatggtctcgatctcctgacttcgtgatcctcccgcctcggcctcccaaagtgctgggattacaggcgtgagccactgcacccagcctctttttttttttgagatggagtttcgctcttgttgcccaggctagagtgcaatggcatgatcttggctcactgcaacctccgcctcctaggttcaagcgattctcctgccccagcctcttgagtagctgggattacaggcacccacgaccatgcctggctaattgcatttttactagagacaggtttcaccatgttggccaggctggtctccaattcctgacctcaggtgatccacccgacttggcctcccaaagttctgggattacattttttttttaaagaaagaataaattaattgtgattaaagttgaaatcaaggcatagtctttccagtctaatttttactgtaatgcttgtatgtcaacagttatgaaggccaggcgcggtggctcacgcctgtaatcctagcagtttgggaggctgaggagggtggatcacttaaggtcaagagttcaagaccagcctggccaatatggtgaaaccccatctctactaaaaatacc

SEQ ID NO: 6394 - DNA, 883 bp, Homo sapiens
aaggggaaggactgcctacgttcatttcattttatggagggtcccagaaaagggaaggaggagccccaggtcatacagggcagagtcagaactaaacccgggtctcctgctgcacagagctgaactttgtatcttgcaatgcgctggctgcctccctgtgcgtgtctggaacagtcccattaggagaggtgacgtcatttgcttaaagttttccaagctaccctatcctaaaatagtttgtgtggatatcagggctaaaagttctccccatctattttaggggctgtctgcttttctagtctgtccacacagggattacctgtcatcttgcatgcaatcaggagaatctcataggggcaggaccttcccctactctgcctcttcctccatactaggttggaaaaatctggtttagcccactttttgcaacactcctgccaagtggtcttctacccattgcttgaaaatctctcttgacagggagctcactacctcacaaggcaggtcatttcattgtgggatctatagaaggttaagtaccacattctcctctaaaccttgcctacgacatgtttaatacttcatctacatagcagcccttcagataatcacaaccactttgcccccaagttttcaggttaagtagcatgaatttggtcattccttaaagacagggtttcaatttccacacatgatctctgcaaacaggcactgggttttcagtgtcctttttgaagggtcatataaaaataaggtaacaccacagtgccactacaccttctggggctggacttgtttcagcagctttggttgcactgaatttgggggagctgcatggtaccaggggtttattgggttgcagatatataaatgccctaaactt

SEQ ID NO: 6395 - DNA, 217 bp, Homo sapiens
agcccatgaccccccagcaccacactccgggagcccagcccccatcgggggcttcctgtacctccttttgcctggctctgctctttagactccagatccctacccctcagcaactagctcccctgtcggccagctaagagagctgggacagtggaggctggcagaagctgagacgtgactgtctaggagtaacactcattaaagctttcattttggc

SEQ ID NO: 6396 - DNA, 382 bp, Homo sapiens
tttctgcattgtttgtatcaccacctatgctatcaacgtgagcctgatgtggctcagtttccggaaggtccaagaaccccagggcaaggctaagaggcactgagccctcaacccaagccaggctgacctcatctgctttgctttggcatgtgagccttgcctaagggggcatatctgggtccctagaaggccctagatgtggggcttctagattaccccctcctcctgccatacccgcacatgacaatggaccaaatgtgccacacgctcgctcttttttacacccagtgcctctgactctgtccccatgggctggtctccaaagctctttccattgcccagggagggaaggttctgagcaataaagtttcttagatcaatc

SEQ ID NO: 6397 - DNA, 576 bp, Homo sapiens
gctggccctacttccaggatggatgcatcacactcaaggacaggagcctggtccttccctgatggcctttggacccagggcctgacttgagccactccttccttcaggactctgcgggaggctggggccccatcttgatctttgagcccattcttctgggtgtgctttttgggaccatcactgagagtcaggagttttactgcctgtagcaatggccagagcctctggcccctcacccaccatggaccagcccattggccgagctcctggggagctcctgggacccttggctatgaaaatgagccctggctcccacctgtttctggaagactgctcccggcccgcctgcccagactgatgagcacatctctctgccctctccctgtgttctgggctggggccacctttgtgcagcttcgaggacaggaaaggccccaatcttgcccactggccgctgagcgcccccgagccctgactcctggactccggaggactgagcccccaccggaactgggctggcgcttggatctggggtgggagtaacagggcagaaatgattaaaatgtttgagcacaa

SEQ ID NO: 6398 - DNA, 44 bp, Homo sapiens
cccccaacattttccccaataaaggtctgggccagaatggcacc

SEQ ID NO: 6399 - DNA, 68 bp, Homo sapiens
gaagccggcctgcctgtcctgttgccccaggggcccctttggctttttacaaataaagacccttttgt

SEQ ID NO: 6400 - DNA, 774 bp, Homo sapiens
gccccccccacccttctctctcccagacccttcccccaccacatcgggagcaatacccccaccacccctttcactccatcccctgctccaggctcactcccaaaacagacccaggcagccccacccccacggcagaccctggtgtccctggacctcaccgggccatggaccccccccccgtccccgcacgtagatcgcagcaggcgtgattacacatgcacaccaacatgcatgccgccggcacatgctcgagacgtgtggacaccccagcgtgcgtgtgcgtgtgatgtgtgtgatgcaccagagcaccccctccacccccaccttgggtgtgtgtgcgtggtctgagcttcccccttcaccggggctgttgtgtagactgcagccaagtgtaacacagcagtccatcacgccctctctgtcctctgtgaacagtgtgtgtgcgtgcgtgagaccacagatctgtggacacaccatttgtgtacgtggaattttgtgtttcagtgtttgaacctaatgcaacagcaacaaagccactgatacctgagccctttgtgtctgctacaaaccaggcaggtggtgtgtgtggactcacactcacattctcagaggatccagggaggcccaggtacacacaggccatggcagacaccccatgtctttgttaccccaggggctgtggcatgtcccaggagggtgtgcatgtgtgtgtgtgtgtgtgtgtgtgtgtccaggatgtgcctgaagtattgataggtcttctcagatagagcc

SEQ ID NO: 6401 - DNA, 210 bp, Homo sapiens
ggggctagggtcccagcaccacttcccccttctccaccctctacttcccgcccagtggggctggaatgtggcccagccggctggaacctcaagggccccacccaccgagattgcagcggctctggctaattgggcctcagtgcccgggctattttgaacccaggaatccttgggggtggtgggaggagcggacaataaaggtgtaaacac

SEQ ID NO: 6402 - DNA, 97 bp, Homo sapiens
ggctccttcccagcaacactccggtcagcccctggcaatcccaccaaatcatcctgaatctgatctttttatacacaatatacgaaaagccagcttg

SEQ ID NO: 6403 - DNA, 196 bp, Homo sapiens
gaggcgggtcaaggcaaaaggagtaatgcaacgcctgtgaagccagccccacgcgcgcaccagtcgcgtaagacaacagcagtgtctccacctcggggaccaaggacgcctccgtgcctccagaccccgcctcctccagcccctgcacctgtcatttattcttccactgcccaataaatattcatggcagacttta

SEQ ID NO: 6404 - DNA, 40 bp, Homo sapiens
ggccccggacgcccccggacacaataaaggtgtgaagctt

SEQ ID NO: 6405 - DNA, 1341 bp, Homo sapiens
gcagcccagacggaggcccaagcccagggcaggaacctggagcaaggacactttggccacagcaggacaggggaaaggcagctttatttttccttagggcaactgcagcgggtgggccaggccctcatgggaagtgactgccaatcagatgcagtgggccccaggcagaggaaggccgggagaaggggagccaggaccttctcaccccactgccccttccccttttctggggagcaccgcaggctcctcacccccacttcctgtgaggctgtggcttatggtgtccaacgcagttggtcttaggcatagaagccccagaggaacacggccactgccatcatgagcagggcattgaggttgaccacacgggcccagctcgggtcctcgctgatgtcctccagccgcctggctgctgccgctgcctcctcctgggtaaggggcggaggactgcccaccccacctctgctcattccacaaaaccagagcaggcactggcggaagaggcttggtgccggggcctggggctctgagggaaattgaggccctgcagttagtttgcgggaactcagctcctccagccccacctcccagcatggtgccctaccattcatctccatggcactctctgggcacccattctgtacagggagtgaggagccttgctgctcatcagcatccaggtcctcccgttcctccttgctatgccggagactgaagaccaggcggtggagctggggagggtgggagcacgaacgaggtgggagttctgtccccccatgcctggccctaaagtctcttgcacaccagctcgtcactgcctgccctacccacctctgtccagtctacacacccagcccaggcttaactcatgccaactccaccctacatggctgccctgtgccctcgggataaaccccaagcccctgagcttgtgtttaaagccgttggccttgctcccccagctttgtcagctcaggtctgtctacacccagatggtagcgcttgtgacactggcctggcagtcctgctcacagtgttctgtgcctgtgtgctcccaccctttcctcctgctgctgcagaaacccggccatccttccacacccagatctcttgtcctgtcctcaccccaccctgccaccatcagccctgcctggagccacctgccctttggcaacaaaaccaaacctttttgtgggcgttcaagatggtattgtgcccaccagtcagatcctgtgttttgagtcccaaaggccatgccaaggattggctttgggaggctttaatcaccaacccatcaacatcaagcctcccccaggccggttcaaataaatgtatttaaat

SEQ ID NO: 6406 - DNA, 1174 bp, Homo sapiens
ctacagtgatgtaagtagatagcaaaatactggattttgcacatgctgccctaagaatcactgctgccattgtagtttgctgtattgtctgtattttatatttgattatttgggcttgagtgaaaggtagatttatttccatttgcaggtgttgcacataaaacactccctctttataagaaaaatcataaatgcatataaaatagaaaatatttggagattgcttatctgaaagtcttgctttcttatacacatggttctctcatattaagcctggtagtaactttttagtgtaattacctttagcacttcaaagacgaggaagtaaggaagggaatgcaagactagtgcataaaaatgcaataggtgtcatatgtacagcattcttcttagagttgccttttcatcccaattacagtgagtctgatttccatcctgtatttgcataatacttgtcttaaaataaaagcttttatgattgggaatttatctgcctaatcagacttattattgagacgtcaatgggacgcatttttctgttgagctatgcagtcgtcaaaacagcgatagacagcataggaggtttgaagcagaaatgaaatgtgttattcagagccaatgttgtacatagagcattttcactattgctgaatgggaatgattaaaaacaaggtatttttcgggccaggcggtggctcacgcttgtaatcgcagcactttgggaggctgaggcaggaggatcacttgagcccaggagttcaagactagcctaggcaacatagtgagaccctgtctctactaaaaataaatttaaaaaaaattagctgagtgtggtggtgcatgcatgtagttccagctactcaggaggctgaggctagaggatccttgagcccaggaggttgaggctgcagtgaggtgtgattgcgccactgcattccagcttgggcgacagagcgagacccagtctcaaaaaaaaaaaaaagtatttttctcttaccgttacagtattctgattatattactgacacagtcaaaatgattaactgtacaacctgtatctgctgggtgttcttgttatcatattgtaaaacagctttaaaaatatttatattttaaaaactgtatgtgacattaatatgcctaatgattaaaattatagtgatgaaataacaaa

SEQ ID NO: 6407 - DNA, 793 bp, Homo sapiens
aaaggaaatagctcaccatactcctttccatgtacatccagtgagggttttattacgctaggtttcccttccatagattgtgcctttcagaaatgctgaggtaggtttcccatttcttacctgtgatgtgttttacccagcacctccggacactcaccttcaggaccttaataaaattattcacttggtaagtgttcaagtctttctgatcaccccaagtagcatgactgatctgcaatttaaaattcctgtgatctgtaaaaaaaaaaaaaaaaaaaaacacaaaacccacaagcacttatcttggctactaatgaagctctccttttttttgtttgtttgtttgcttcattgttgattgtgtattttcttcattcctggggagtactaacccaaaagcgtctgtctcttgttttctagtccagtttgagattaatttagaagaaaggaatactgtatgtgaaattcatcttgggctttcccctaaattgcaagataaggccatgtgtaagattttccctaaaactagaatatattaatgcatgtttgagaattttaaagcaccatggtcaaaaccagaagctatattttgcatatttggactcagccatccattaagaacccatgttgtcctctggacatatttatcaatataattgggttttaaatagtataaaagaaaacttgtgatctatataatttatgtatcaccttcattgtaaatttagcaggaaatgcatcacaattatgatttttttttttgcaccagtgaaacaataaagatgctattaac

SEQ ID NO: 6408 - DNA, 5422 bp, Homo sapiens
tcttcaactctgctgctccaatgggtccagaaattactgaggccagtggtgaagtgaagagatgactcaaacatttaaataatttggctttttggtattattgattccacttattttgtaaaaatggttatggctgctgccttccttgtggatgaaaagtggctgtaaagaagcttcctaagaacgtttttttctgccttgtaagatcactacgtgtgaaatgctctgagtacctttcaaatatacctacttttggtggtaagtgtagggatgctttaggtaggtactttgcatctgtcgaatttaaattctaaactcacactgattaaggaactcagtagactactttgcaggggccatgttattcagtgttatctcctccagtacaaagaattcctagaattttgatttgctcaggtgtgagctgacattttattgtactaccccattcttgtgttaagccatgtggatttaggacagtgatcttcaaacttgctttaacttatgctcccttttgagaatcagcatcacttgaaatgtcaaaatatgtcaactctcatagccaaatcaaagaagtgatcattttgactgtgctttttaaatctccacacacctccacctctctcctaattctgcctgtcttaacccctctgtcttagttataaatttctggtcttgtaagtctggaagctgataggcaatttatgaaagagataagaatgtaatgaggttccgctttctgagaaacacagaaatgatacatcctgagacataaaggaaagctgctcttctgctgcctcaggctgtagcactctcaatgttgtcactctacacatacactttctatatacatgtacagttgacccttgaacagggtttgaattgcagtcaacttaaatgtggattttctttcacctttgtcacccctgagacagcaacaccatgctctcctcttcatcccactctgcagcctactcaacaggaagatgatgaagatgaacacctttatgatgatccactttcacttaatgaatagtaaacatatgttttcctccttatgattttagtaacttttctctagcttactttattgtaagaatacagtatataagctgggtgtggtggctcatgcccataatcccagcactttgggaggctgaggcaggcagatcacttgaggtcaggagttcaagaccagcctggccaacacagtgaaaccccatctctactaaaaatacaaaaattagtggggcgtggtggcggatgcctgtaatgtcagctactctggaggctgaggcaggagaactgcttgaacctgggaggtggagtttgcagtgagccaagattgcaccactgcactccagcctaggcaacagagcaagactccgtctcaaaaaaaaaaaaaaaaaagaatacagtatatgtatatatacacacacacaaacacacacacacacgaacacatatgtgtgtatgggtattaactgactgtttatattattgatagggcttccagtcaacattaggctattagtagttaagtttttggggagacaaaagttatactcagattttctactgcaagggggtaggcactcctaaccctcacattgttcaagggtccactgtacatttaaacacttttctatatgcattagagtagccctgtcatcccttcactgaaatcatactgttctcaacatggcaagcaactaacacttttttttttttttgagacagggtctcactctgttgcccaggctgcagtgcagtggtgtgatcttggctcactgtagcctccgcctcctgggctcaggcgatcatgagtacctgggaccataggtgcccgctactacacccagctaatttttgtatttttagtggagatagggttttgccatgttgcccaacctggtcttgagctcaagcgatccacctgccccagcctcccaaagtgctgggattataggtgtgagccaccacacccagcttcaactaacacatttacgaacttgtatacatgtatatttagatactttaccaacttgtaaaatggttaaaggagtactttattatgaaaaaatatacaatctttaaaatttccttacttctacatgatttttgtgctattcccatttttttcctcaggtgagcagctttagttttttattttttttgagagagtcttcctctgtcacccaggctggagtgcactggtgtgttcttggctcactgcaacctctgcctcccgggttcaagtgatcttgtgcctcagcctcccaggtagctgggattacaggcgtgtgctgccacgcccagctaatttttgtatttttggtagagatggggttttgccatgttggccaggctggtctcgaactcctgacctcagatgatccacctgtcttggcctcccaaagagctgggaatataggcatgagccactgtgcttggcctcaggtgagcagctttagtcaatgttgtgaattttagattttaattagacatgcaacagtttcactacctttcaggatttttgtcctgtaacagaggctcttgctttttgacagagaggtaggcaggtggagaggttatcctgctgctgcagttctcaagttgttaagtttcctctggaaggctaacccttgttgggaactaacagtttcaataccagcaagtctaggcctgctccaagttggtcagctgaagaatgaacatcagaagacacagctgctgaaagttgtcctttgatgagacagtgatagtgatttggtaaaatgtcttattttttaaatgtcagttatctttctttaaaaggttttttgagggcagcctccagaaggagctagagagtatattttatagttctattgtggttcataccctgttttcgacttaagattctggagaatgctatgaaacatctccccagaaaaagacagttaattaccatatctagagcagcactgcccaacaaaaatatagtacaggctatacacataattaaaacatttctagtagcttctctaacaaaacccattgaaagccaattttaataatttatataacttagtgtatcaaaaatatttcaatatgtaatcaacataaaattgagatactttaccagctactagggaggctgaggccagagaatcacttgaacccagggggtggaggttgcagtgagccaagatcacaccattgaactccagcctgggcaacaagagcaaaactccgtctcaaaaaaaaagagatattttatattctttttctcatactaagtctcaaaaatctggtatattttacacttaaaaacacatgtcaaggctaggcatggtggctcacatctgtaatcccagcactttgggaggccaaggtgggcagattgctggccaacatggtaaaaccccatctctaaaaatataaaaattagctgggcgtggtggcgcatacctgtaatcccagctacttgggaggctaaggcacaagaatcacttaaacaggaggcaggggttgcagtgagctgagatcacaccactgcactccagcctgggtggcagagcaaaactttgtccccacccctgacaaaaaacaaacaaacaaacaaaacaaaaaaaaacctgtcaattcagatgctaggttttcatcagacgtacttaatctgtatttagatttcttaaaacttactgtggaaaatgtatttacatactcaagttgtttgaaacataactcactgttttccaataactgaagtatccacttttacatgtattaaaattaaataaaattagaaattcagttctgcagttgcactagccacattttaagtgtttaatagccacacgtggttagtggcatctatattggacagggcagatctagagagaatcctgtatctaacaattttaatttttttccctttatgctgttattccttacctagagaaacaatttccctccaaagttcctttgaggggtctgtttaggccaggccaacacaagtgacctatgtggattttagcatcctttttttgaaatttgaggttttatgaagcttgagtttttctggatatttttagtaatttgctggtgtgtacttagctcaaatacttgattgcaactgtgttgggtcaactatttctaatgggacttttccatttgcatgtacagtcactggaaactgctgggcagagaaactctaaaaggtagttggggcacactttttccacctgtcagattggtgaagaattggtgaggctgtggggaaaatggcattctcccacttttgatggatatgtatccaaataaaagtcattcccatgctttctttcatccagaaattttatttctagaaatttatccctccgtacttgaacaattgtatagagatttattcaaaatgatgtttactatagcactgttgctaatggcccagtaaaaacaaccaacacatgcctattagtttggttttagttaaatgaattttgccacatccatgtagtggaatacctcacagctgttatagatagatctagatatactgaaagccattttttcttaaattatagaatgtatatatggtatcatcccatttgtgaagagacatatgcttatatgtgcattaaaaaaccgtaggatatgcaagaaacttaacagtggagtgtgaaaagtgggtgattgggagagggggaattccacttttcatttatctttctgaaccttttgaatcttttttttttttttttttacaatgagcatgtattcctttttttttttttctttccaagatggagtctcactctgttgccaggctggagtgcagtggcgcaatcttggcttactgcaacatccacctcccgagttcaagtgatttctcctgcctcagcctcccaagtagctgggactacaggcatgcgccaccacgcccagctaatttttgtgtttttagtagagatgggctttcaccatgctggccaggatggtctcgatctcttgacctcgtgatctgcccacctcggcctcccaaagtgctgggattacaggtgtgagccactgcgcctggcccgcatgtattacatttataattaaaaattcacaactcaatgtcaagtgtgaaccttgtgttgaccctgatttgagcaagcaataaaaagatatttttgagacatttagattatgaatttcacatttgatgatagttactattaattttgtgaggtgtgatattggcaatgtggttagatgacttcagagaaaaaggaaggtatagttaagcaagtatggcaacatctaataacttgggtctaggtgatgtgtatgggtttcattatactgtcctctttactgttgtatgtatttgaaaacattcatgacaaaaaaactttttaatcagttaaataaaccatgaagaacggttaaagaa

SEQ ID NO: 6409 - DNA, 905 bp, Homo sapiens
tacttgtttgcaaaatctgctgaaacttctgtcaggataacatcagcaaattctcaaacagttatggactctcaggagcattctgactgcatcaataagggccatcgattgtttctttctcgcctgtcgtttagcctgtgccacacttcgggagcaaagctgtgtaggcttggactgttctgggatttccttgtttaccaaggagtattgtcagtgttttgtgtttgggatataagtaagtgtatttgccaacaacaaaaaaaaaccaacaaaaatgctggatggatgttaaaggataaaaagtgatggggtatggggtaggtatgaaaactagggtaataagatgcttgattgttttcaggtttgccaccagagatgcaatattttaaatactgtcagaaagagtgatttttaaaaatatatatttcagattttcagtgctaacagattgcatatatacagttcatttacttttattaaattggcaatcgatattttattgaatggggaattaagaatataaactgtaaattttgtcttaaattgattttttttcttggcctttatttttattacttaaggtatgagttatattttaggagatactttctagacagtttgaagtttgggtgctatatgaagaaaaacatttaatgatatactcagatataaacaccttgttttcttgaatgtaatttatttattagctaaaaaaaaaaaacaaactgctctcaagatggtgcctgttaacctaaacatgaaatatatttattacatgcaaaatatttcttagccacttttaagcagtaatgttttatctgaatggatatttgtttctatatcctgataattatttaaattgttactttcaatctggaagaaaaaataaaccttaatattgaaac

SEQ ID NO: 6410 - DNA, 646 bp, Homo sapiens
actctgcaaacaaattgcacaggtggattttctttccacatttgcctgatttgttctcagcaatccagctggagtgtcttatcaatccagatgaactgagggacatctgttggtctatgtataacttttaaaattggtatagtatctacagagtgtataatttaaactaaccacaaagctttacatcttcattttgactgttccatagcagaataaagcacttgaaaggaaacaagactccctttcacacatggattattataagtttcaatcctggtatctgtgcttgatttttatcagttttgtgtagatttttatgtttcatattttaaatttaaatcccacattgtaaagtttgtacaatttgtcctgaagctttgtgtttggctgcacctgcataagctgctacaaatagaataaagaatttcatagcctgtatctatcatttagatgcatggaaaaaaatgggctttgcacacaatgggtttggagctgactgggaacaatggaaaaaattacattagctgtggttgtaaagtttttttgtttttggttttgttttttttttcttttttctttttttttttttttaccatcttgtgaaaggtttctgaaactcgataataaaaagcggttggtgtaaatt

SEQ ID NO: 6411 - DNA, 1690 bp, Homo sapiens
tcttctgctaatggtgatgtgaattcttagggtgtgtacgtacgcagcctccagggcaccatactgtttccagcagccaacccttttctcccatcacaactacgaagaccttgatttaccgttaacctattgtatggtgatgtttttattctctcaggcagtctatatatgttaaaccaatcaaggaacttactctattcagtggaaacaataatcatctctattgcttggtgtcatttataggaagcactgccagttaaagagcattagaagaggtggttggatggagccaggctcaggctgcctcttcgttttagcaacaagaagactgctcttgactgataacagctctgtcaatattttgatgccacaataaacttgatttttctttacattccttttatttttcctttctctaaatttaatttgttttataagcctatcgttttaccatttcattttcttacataagtacaagtggttaatgtaccacatacttcagtataggcatttgttcttgagtgtgtcaaaatacagctagttactgtgccaattaagacccagttgtatttcacccatctgtttcttcttggctaatctctgtacttctgccttttaattactgggcccttattccttattttctgtgagaaataatagatgatatgatttattacctttcaattatatttttctcagttatactagaaaatttcataatcctgggatatatgtaccattgtcagctatgactaaaaatttgaaaaagataaaaatttctagcaagcctttgaagtttaccaagtatagtcacattcagtgacagcccattcattccagtaaagaatcatttcattcactttgggagaggcctataattacatttatttgcaatgtttctcttcgctagattgttacatagctcccattctgttggttttgcttacagcatatggtaaccaaggttagatgccagttaaaattccttagaaattggatgagccttgagattgcttcttaactgggacatgacatttttctagctcttatcaagaataacaacttccacttttttttaaactgcacttttgactttttttatggtataaaaacaataatttataaacataaaagctcattgtgttttttagacttttgatattatttgatactgtacaaactttattaaatcaagatgaaagacctacaggacagattcctttcagtgttcacatcagtggctttgtatgcaaatatgctgtgttggacctggacgctataacttattgtaaagaccttggaaatgtggacataagctctttctttccttttgttactgtatttagtttgtgataaatttttcactgtgtgatatttatgctctaaatcactacacaaatcccatattaaaatatacattgtacctgaccctttaatcatgttatttatgccaccaaggttgtggatcttaaggtatgtatggaaaggaactcatttatcaaattgtaagtaatacagacatgccatttaaaagaggtaaattcttgttttctatattttgttagtaaattctcaatgaaataagttgaagtttcactggatttcattaacttttaaatattacatatatgtgttttctcagattagtgaaaattgtgaccttaaatttaatacacatatactgcctcag

SEQ ID NO: 6412 - DNA, 332 bp, Homo sapiens
cttgcctttaatattacataatggaatggctgttcacttgattagttgaaacacaaattctggcttgaaaaaataggggagattaaatattatttataaatgatgtatcccatggtaattattggaaagtattcaaataaatatggtttgaatatgtcacaaggtctttttttttaaagcactttgtatataaaaatttgggttctctattctgtagtgctgtacatttttgttcctttgtggaatgtgttgcatgtactccagtgtttgtgtatttataatcttatttgcatcatgatgatggaaaaagttgtgtaaataaaaataattaa

SEQ ID NO: 6413 - DNA, 742 bp, Homo sapiens
aggtcctggcggctgattctagaggaggaagaggctctgtgagatgaataggaggagtcttcaggaggaggggctgtcctctccgcaggcagccctggtcttcagcccctcccatccacggagtgagctggggctgaagttgtccccactgccatactcagtccatgtcaccccacttggtgggcttggggttggttctgggtggtgaaccggggcagacccagctaatggattaaaaaactgcccttcacctcccaaatccccaagggttcctcatgtgttttcaccaaaaccaccccagtgcctgagattgaaaatattgtaactttcagttagaaatcagccacaataaacaacatgggaaaatgccttaggatggagtttgcaaggtttccttgcccattatcagaaggaaaaagagcagaattttcttctcgtttaaccccactcacttccatcttgactgggtgacaagtggtaatgacacagatttgtagcgtgaaagactgaatacagtgtttggccaaaaatttttttaaaaatcatattatatgtttcaattgatctgttagaataaccaagaaaacaaaatgctggagtttctctataaatgacacttttatatcttctttattcgtcgttaaaacgcggtaggaaattaccctgaaatgtcgccttgcaattatttcactgaagatattccaatttccatactatttcctccaatagacccttgttgcct

SEQ ID NO: 6414 - DNA, 363 bp, Homo sapiens
ggagatgtggagacttcatggaggctggcagctgagctcagaggttcacacaggtgcagcttcgaggcccacagtctgcgaccttcttgtttggagatgagaacttctcctggaagcaggggtaaatgtagggggggtggggattgctggatggaaaccctggaataggctacttgatggctctcaagaccttagaaccccagaaccatctaagacatgggattcagtgatcatgtggttctccttttaacttacatgctgaataattttataataaggtaaaagcttatagttttctgatctgtgttagaagtgttgcaaatgctgtactgactttgtaaaatataaaactaaggaaaactc

SEQ ID NO: 6415 - DNA, 1045 bp, Homo sapiens
aatggcaatcaaacattttctggccagtgtttaaaacttcagtttcacagaaaataaggcacccatctgtctgccaacctaaaactctttcggtaggtggaagctagacacatgaaggtaaataaaaagaaaggctgttaaatacaggaaacagttgcatgtagtaacactaatatatttaaaaataagtcaacagtaaaccactgaaaaaatatatgtatatacacccaagatgggcatcttttgtattaagaaaggaagcattgtaaaataattctgagttttgtgtttgttgtagattgattgtattgttgaaaaagtttgtttttgcgtgggagtgtgtgcctgcgtgggtgtgtgcgtgtttgggtttttttcctttaactgacaagccatcttgagtggtcatgggccactgcttttccctttgtgagtcaatacatagtgctgctgtgtgctttttttgtgtgtatttgctaatttttattaattttagtttttcattaaataaatttgacttttctgtaattcaggtttttcctttttttgtaccattttaaagttagtatcttttgatatgcatatttgtttatggtaaaaaatttataacgtgttcaatattttcttttcccccattaatcagttcattagaaatattttaaaatcagctattttgtgaagccatgagttccagaaagtaaaggtgacatcggaaaaataatcaaaagctatttaaagcatctataaggtgctctctttctgtcttctacagatgagtcacacctttgagcttaatctttgaaaggttagagaataaattgatttttataaatactgcaaatcaggcttttgtttcctttttcagatatcttggacaaatcacatattttaaaatttgttcttgtatttattggttttgcagaagaaggcatcgtcatgcacagtatttgtaattaaaagcaaatcatttgtttaaaaaggcagtttgcaaaaaatgtttttggtcttttataattctcattaaaagaatatctggcaaattaaa

SEQ ID NO: 6416 - DNA, 4176 bp, Homo sapiens
agattgtgctgagcgctgagcttgcgctcagggctggctgatcaaactcaagctcacacctgtacctgatgggaatgaacataatgtgaagaaacttatttcccagtgtaaacgcagttgtacagaaaaaaaatgttttgggtataaatctgggttttcaaaaccagcttttttctatatataaattatgctgctattacagatttaacattttctgttaaaggaaagtctacattttctgcctgttcagaactgtttaatagcagttactcttgagtgtatttacctttttatgttttttaaactattttccttaaagccgaaaatattgacaaatggatatggttagcctttataaataaataaaaaaaaaagtgttgctttcttaaggaaagcaagacgtcttaaagtatattttcttgagatgagtatgtcccatcactaccatgaagtgtgctcacccttccagcctcctctgccctcacccccggagttaaagtgggtaagagttggtttgttctgcagtctttggttggagtgttgtgaaagtggacccgcggtgccactagatggcacttggtgcctagccatggtgaatgaccagggcgaagttagtctcacagaataccagggctagaagacatcgtggagcccatggagtcccaccctccttcccccttccaccctgcgcaaaaggggacggcccagtgtgcacgccgtccggccatgcccacagccacagccacagctgaggagtggccgggcaggcagcaggctccccagccagggcttgacacgcccacagtcaggggcctccacatgcctggcctggctctggaagtcacgtcttagcttctgaacaccgtagcgggttatgaggaagtttaatgaagagcccggtcactgtggccatcttgtgtccccaactgcaggagacgccctgatgtggagtttgtacagctttgccaaaaaatggttttctattctcaaaagtgacccaagccaataaatagcattagtagcttctgtggggggatcccagagcccctgtatttattttccctgtgtttgtctctagtgtcctcctaaacagcctttcctgtgagtctttctcagaattgatatcttaatattgtctgttctaggtgttgcccaaattcagtgtcagtgaagttcttttcctgggcaatcttaacatctttactcttattgtctggaccttcaaagggctttgtattttacacctgcgcccccaggctgctcacagtcggcttgctgcctgtcctgcctgtccggatcttgtctcctagtcctgaggagcggaggctgagaactcagtgctggtttgtaaatggtgaggggacttgggggcatcccagagtgctccctccaggcctgcttcttggttttgtttgatcactgcgttcttcaagggatgaatccagagccctccatgaggccaagcttgtccttcaatcatgtttcctctcagatgcgtccgtgatgcctcctaatgtggaactggttgtccattgtttgggcctatggccaagtcacccagctgtggaagcagaggtagaagacgaggccagccaggagggcgacttcagtcacagctcccatgcctcagctttgtacctgttttcaaaagcacaactgaggtgtgcgggctggagctgtcttgcagtgattctggccttctggctcatggttcagtccagcagcctggctgacccactatttctcctctgcttcagaggaaacccaggaaatgcccttactgccaggctgagtctccacccatgctggttggtgctggctaggctgagggggccaccacttttcctggctagaagctacttgacctttgatgtttgagttctgtaagtcttcgtgttctgacttactgcttcagagggattggcctgtcccctttccctttctcggctatgggaaggaaggattgctcattggttgccttcatcagttacagcatgagacggaattcatcattccttccgaaacccctgatatttaatatttaatatttaaaaacccaaattatcaaaccattaagaactcattactggttctcagcctcctccagtactagcctcagtgtggctgctgcataagtatctgtagcctgtctacctcctgcagtggggccgctcgcctcttccctgtctactgctcaggctctcccacttcgtggcatccatgtaaagtaggtggcagggcagagatgtcactctcattcaacagggaggatgtctgttgctcagagaggttgtcctgaggggctgggtgattcctgggcctacattcttcccgaggctccaggccgctgtctctggaagtaaaagagccttgtctgaccttaatgcaagcagtctgtttgaacccctgtaggctgcattcaggagacagaaggtgtctgggccatcctgggcggccggtcagcgttgctaggcaggctcggctgtctggccgggacttgggcctgggtggcttttgagaccagtgaagaagggagagccggcctcatgccgatgcggcttgtggcacggctgggatgtgagggaggactcagatctacacacagaaacccctcttctccccgccctcccccagctcctacctgcctcccacgcctcaggtgtggctgcctgtgggaccatcccccaacccctttcctcgcacctccttgtcctcacccagttcctgcagtgtctctgacccacgcctcccgcctcctggccgacttgcccaggaggtgtctctggctcacctccgtctgttcatcaccttcctccccagtgtttccacttatcttggatgttttagattgaaacagcctgattcccggaagaatcctcttcattcattgctagtgcttcccctcacctcccactctccacttcccagtttgcaaatgtggctttcgcccaccaagtgaaagcggactgagagcagcccttggggacggcccggtgcctggctgcaaggccgcgctggggctctgtcttggtgcacatggcttgaccggactttccctgcttcccaccacttccctcactcccagacctccctcattctttttgtctcttctttttgcctaaagccagtccttaacaccctattcttcctctgcaggtggcttgcagacttttccccacctttggggctcgtggtggtggagagggcagctggtgttaagaatgtaggttaccgggcatgacccggcagatgcttgcccagtagttctggaggaaggcccgggaatctgcaaatgagcgcattccccaggcagttcccatgcaggtgatccacggaccacatgttgagaaactgcagtcacccttagggccacaccgtccctctcctcgctgtcccctctctgtagtgactggccctgaccttcaggagtgcactttccactctaccaggaagccctatgacatcctcaggctccccagacctgcagcttgcatggggcccctcccttcttccacacccaccctccgtatggtcccctgctctgccctcgtgctttgctggcccctgcccgctactcccactctcagacacccaggggtggtgggccctaactggctggcccctcccagcgctgccctctgccgtccagatgctgcagtgtggccagatttaccttccagtaacatacttctagtcacccctcctcctgcgaagtgatctgcagtggctgtttgaccagaccacaaagttcacatctcctgagcttagtgtccgtggctgtccacctcccagccatacttgactgtccccaaactctccctgcagccacatgtttcccatgacctgtgggctctgcagatggacctctctccgctagagatgcccttctcccaaatggcttccctcctggaaggcccagcctgagtcctcgtctcctttccagtgcttctgccagaagcatccccatgatgttgtgaccgcacagcactttgtgtctcgctttgagcacttgccactctggctggtgctgctgccactgattgtgtactgtcttgctgccctttctagactgtgagctcctcgtgggcagggaccgcctgtgttctctgtatttcccacggcgcctagcacagtgccttgcacttgataggtgcttaataaatgtctgctcaactg

SEQ ID NO: 6417 - DNA, 614 bp, Homo sapiens
ctggctcgtagccggaagggaggcagggagagggcgaaggcaggaaggggagtgagaaagaggctgaaattaagagggcgagaaagcagcacgacttgaaacttcctacatgttctctaactgtatctgggtaaaaaggtgcgcgccagctgtgggacaactttgtccatttccttattaggagaaataaatttcgcttagctctgcgcactcccatttccaaaaataaactcgcctcccccattccagttgcagtaatcaagaaagagactgccttgtcattgtttcttatcccccaacttcatgttccctgcaatttatttaaagaaactttgtatttcactacataatctgaaatctttctccctagccccctctgaatccttctgcctactgaaatctgatatattacacacccccaaccttttttttttcagtttggaaaggggtaaagttttgttgttgttgttgttttgttttggatggggaaggtagttttaatttggcaagtgttgctcttcttaaaacactgctcaaattaattagctgaagatacttagtatcctcggctgcttgttagcagagaaaggactcaccttagtggtgactggttt

SEQ ID NO: 6418 - DNA, 664 bp, Homo sapiens
gggatcgctcaacaggacacctctccgcagaaggcttgccggagacgccgtggggagggccatttgaacattacatccaatcaaagtgtcatttgcaacccagatgtaaaactctaatgatttggccatgaggcgctgctattataagcagctggaaatgaatattaatggcagagattaaaagtattccatgctcagtattttttattgtcctgctacagctagtgtgcttttagactttccgccgcagactacatttctagagttagagaaacctgctttttaaggctattgtcctttgttccttcatgtattatattgatagtttttaaaaaagaattagtgtgattttttttctttgcttcttttttttctttcttgtttttcttcccccccaccccccacccccttcggttaactactttttaattgcaattctaggtaattgtgcatcgtgatgtgattgcttggctattgtctgaatatttccttttaattttttaattaaagactaatgctttgattggatttgccagttcaccggacagtgattaaaactatgtaatgaatataatcggtttcagtgcaactggatggtctgcttttaaatgtgacttaatctgactgcagtaactagtacagttcaataaagggaatccatgcg

SEQ ID NO: 6419 - DNA, 181 bp, Homo sapiens
ggctgcctggtatttgattatatattatgtacatactttttcattcttaacttagaaatgcttttcagaagatattaaatatttgtaaattgtgtttttaattaaactttggaacagcgaatttggatgttccagaggttggacttgtattaggtaataaagctggacctgggactcgtga

SEQ ID NO: 6420 - DNA, 431 bp, Homo sapiens
gccggcctgggaccccgcagggacgctggagatttggggtcaccatggctcacagtgggctgtttggggttctttttttttatttttccttttcttttttgttatttgagacagtcttgctctgtcacccagactgaagtgcagtggctcaattatgtctcactgcagcctcaaactcctgggcacaagcaatcctcccacctcagcctcccaagtagctgggattacaggtgcacaccaccacaccaggctaatttttaattttttagtagagacagggtctctctgttgcccaggctggtctctaacttctgaccttaaatgatcttcctgcctcagcttcccaaaacactggggttacaagtgtgagccaccacccctggcctggggttcatttttaatgggaaaagccactgggggctctaactcgc

SEQ ID NO: 6421 - DNA, 1137 bp, Homo sapiens
agcagctcgggctggagacatagcattcattcctgttcagaatgcgacctatggtggcctcctactccttgccccccaccccgccccgccccttccttctgttccccagatctatgaactacaacattatgaagacattcttttgtaccttgttcaactttagagttctaagaaagcttatttattagcgatataaccttgctttgcaaacagaatgcaagcgttaactttggtcttctgtattttggactaaatactaattgactagagtgctgtaaacttgctgtaacatttatggcaattgcaagttgccctgctaggcagttgtaatctggcattaacttattttctatatccagtttaatatgaatctggtgttgatgcaatgcctcagtgatgcattagatctctaataaagtctgtatatacatgtacactttgatcctgctggaaaattttatcagcaaacacattgtctaatctttcaaaacagatttaaggaaaggactgaaagtacagactgaacagtgtggttctttgaaaggtttggttttttaatttttattctaaaattcaacctttttttttgtcgatttaaccatttccattttgaactgctatttgtattgtgctttttacttgagtcgtcttcaatgttaataagtttctgtacagtaataagcacgcagaattctttagagaaaaagaaaacaagcgttgttttggtagttgaaactgagacgtaacattttgccttgtaggtatattcacgatagaaaatgtgtgctggaatttcacaatgctgctaagtatagcatcttgaacaaccttcagtggagaaaatgtagatgctcttgtatatacaataagaaatatcactttcattcaaatgtacatatgttccttacaagagcaaatgcttcttcttgatcaagagagcaggtatagtgtttgtttattttgtcttaggtatggaagaaaaaaattggactgttacatgcactttcttggaaagttgaaaggaaagggggggtccaatttctttaacatttaatacttactaacaacagagatactgtaattttactcaagtaatcaaatacattttttttgcaacagataaaacaaaatactgtg

SEQ ID NO: 6422 - DNA, 1131 bp, Homo sapiens
gagatggtgaatctggtgcaccatgcactttcctgctagactctggcctagttcaagctgaccaatggcagaggactgcctgaagagtaaaactgtgtgaacaatgactgactgccagtgttttccatgtatgcataggttctaacagcagggtttggaaacctgtctctaagtaatgcattacttctgtcagaagtgtcttagggtggttatctagttcagtactccaaattattggggaccttgaggcttaagtaagtatttttctgaatataatgctaaaggtaagttgcattcatttaaactaatagagcagacagaattcagcactacttaatagtttataaatcagtggtttcagttgtatatatgttaggaaatggagaggtatagagagagcaggttccatagctcagcacttttaagtggaagatcatttgaatctcagtcttcagcctgcactgatttgtagcctgcactgtcttactgatttacaaactgaaatcactgagaaatgtctttagttcagtgagaagaaaccagaacacttgttcctagtgttgtgttgttttttttaagcaaattacttactgtatttttatggcaggagggagaaaaagtgttacaacggtttctaatgaagtccggtatttaaatgataaatgactaatgtgtttagtagagacaaaataaaccaataaatgattgttctttgccatttatgcaggaaactacccttttctcaatataaccaaacaaaggctaatttataaatgctttattgaaaaatacacttatcttcatataaaattacagtagcagtatcttgagaagttttataaatatttttgcagaacactattctaattgaacaatgtaagttccatatttctctcagcaatatgaagttacctagtaactttgtttatactgattcaatttacaattgaattttctccctaataagattattaatttgacttgaaaactgctggaacaatagtgattaataaagatatgtatagataattcagctgttaaataacattttctaatttgtataaatggtactatggtactaataaaaacctaaattctccaaccaatttttttaaactgccaggaacaccc

SEQ ID NO: 6423 - DNA, 2165 bp, Homo sapiens
aagcaaatgctccagaggcatctcctactcctcagtaaatgctcacatgaaagttcctacatgagatttttgtaattactctggtgtatataatctataattcatgggaagctgggagcggggagacctgggtttgaagtgttgaagttttgtatactttttcatttgtttatttctctattccctccttctcataactgccacccctcaggacttaagttctccataatgggcagtaccttctcaataatttatacctacgtgatagcgtgagaaagtctatttgcattttcaacattttcttaggaagaaccgaaatgcaattcccatttttatttttaataagcaaaagcataaatcttagaaaacctatgaaaaagaaatacttttatgttatccctaatcgtcccactaaatggaatgcctatgattagcttcattaagagttttatactgtgaagattttattagaagcaatatatgaaaattacttggattaatgtgttaatcttcctctttaaaatgctaatatccattttatgcacattaaagctcagtatgcattttctttgatgcatgcagtttctatcaattaaatataaagaatgaaacttagcaccaacttattcaatgactgcaagttttttgtctttctttcttaaaagttcattctatttgtattattttcatacatttgtaatggtgacccagggatgtatatataaaaaggagatagttatatagatagatgtgaaatttacacgttgaaaacttagtatatgacacagaaagaaattatgaaaagtataactcaaattctgatatgcttagttagacgtgaaaggagtatctttttatcattttttaaatttacatcaagccagtacagtgccagggtgtatctgggtaaccagatcctcgaaaagcagctctgaaagttaattttctagcttttacccaatctcactgaaggatttaattgatatttttaatggagctgtgaatcaatgctgcaaaggaattgtctctagaggtctaggatataatgcatttcattttttaatttacttttttatttgtcattttcttcaaaggatttttataggctgtgggttttcactgtttgcaaacaggctatgttccttcttaagcatatgtaaagtattcagggagataagtaatttattaaaatctacctaatttgccgtgatatattaaatctctgcttcagtgatcacagaccatttcatttagagaattaggcattccctctttgtgtgattaaagctctggaaaatgagttctttgctcctatttgtgaacattcaaagcctgctaatggcaagaagatggaatagattatgagacaattcattacagttcaatagaaaaaaaaagcagctataatgcaaaaatgcaagtatgaatatctgcatatagtttgaaccatctgtgctctaatggcttcaataatgactctcgtctttagaaggctttgaaatgacatccgtacaatattaatttgttgatgtacattgtgggaccagtagagtatgatctgaccacagaaatctataaattctgtctataccactgggcctccctgtcctggggcctgccatctccgagaagaatcttgctctcatccaactctgcaaatcttcataacaactcgttcctctggaaccttctggagaccacaaacatctgcagactaaacctctccagtcctagtaaacaaccacatgtttgttgtcacttcggctggctctgagctcatttttttggcccctttttctagctttctttggctttatgcagttacagtgtcattaaggcccataatattccctgcagtaatttaaaacagccagattataccctgggattaactgagtggtttttgagacatttattgtggtattctcccaggaggtttgtattattgttgtaaaatgttacatcccaaactaaataacccttctgcagggagaagaaccagattgcactgacttcttaggatcattaagtggaaaggaaaagtttttcttagaaaacttatgggacccagtcacctgtatggaatgtatatctcagacaagatgagagaaacagccatgtttctgtcacattgtttactgtcatattaaagatatctagtttta

SEQ ID NO: 6424 - DNA, 386 bp, Homo sapiens
ttctttaaaaaaaacaaaaaaacaaaaaaaactttttttaatcgttgtaataattgtataaaaaaaatcgctctgtatagttacaacttgtaagcatgtccgtgtataaatacctaaaagcaaaactaaacaaagaaagtaagaaaaagaaataaaaccagtcctcctcagccctccccaagtcgcttctgtggcaccccgcattcgctgtgaggtttgtttgtccggttgattttggggggtggagtttcagtgagaataaacgtgtctgcctttgtgtgtgtgtatatatacagagaaatgtacatatgtgtgaaccaaattgtacgagaaagtatctatttttggctaaataaatgagctgctgccactttgactataacccg

SEQ ID NO: 6425 - DNA, 195 bp, Homo sapiens
atgaagatccagccggccttgggagcctggaggagcaaagactggggtcttttgcgaaagggattgcaggttcagaaggcatcttaccatggctggggaattgtctggtggtggggggcaggggacagaggccatgaaggagcaagttttgtatttgtgacctcagctttgggaataaaggatcttttgaaggcc

SEQ ID NO: 6426 - DNA, 235 bp, Homo sapiens
gaagttatctttctgtgattttggtttcccttctcctcccataatttctcccgcaatcattagcttctttctgagctcagctgctttctatggggatccttgcaaaacaagctgctttcgctgatattttatggacttaggaatgatccttacagaattcttttcaacatcaaaaagtgcaatttgtcttggaaggcaacaagatttcttcaataaatttggaagagggctggcc

SEQ ID NO: 6427 - DNA, 1456 bp, Homo sapiens
cgctcccttgccttcctcagctgcctcctgcgccctgtgcccgactgactggaggaggcctgtcccaattctgcccgctccatggaaaagcgggcttgactgcattgccgctgtataaagcatgtggtcttatagtgtttggacagctgataaatttaatccttctttgtaatactttctatgtgacatttctcttccccttagaaacactgcaaattttaactgtaggtatgatctcttctggtgttgactggactgcttggggtgggggacgatcaggaggaagtgagcagtcgcctgcctgcagcaggcagcttctactcctgcctcatgcgtacgtcccacaaatgcaggtgtcctgagcaccacacccagtgggaagagtgtgggggaggcgcacagtgtgagcccgcccccacgtcgtggggtaacatctgttatcaaactgctgtcgttgttgtggaagcatgtagactgtgccagaggccagacccacgggctcatgcacccctgagccagcagggcatcttggaaaaggaactcttggttcgatacctggagcagaggaggggaaagtccagggctatagggtgtgatgaagtcacccctttctgtcccactacatctgggactgactttccgagcctccagtccaaagccggcttgatttccgtgaactctggtgctcctgcatctcatgagtgtgccccatgggtcccctcccctctcagcatttccttgtcccgtctggacctggggagtggttaggcagcaagctttggtttatggttttcattcattggtgaagtaaattaggcagtgctaaagcctgtgggtttggtccttgaacaagatgtgggccttgcaagatgggagagtaaaccttgaagggctttattaaagaaataaaaaagaacttttgtatcttttatcctgggagcactgcgttttcctagctgtgttattcctggtttaattcagcagagaaggtaaggtgtgaacctacctgccttggagagggcccaggtcccaaatctcttcaaattcttcacatgtttaactttaaggatttgaaccatgaagtcataggttacagacctcagttttatgccccattggattactttttttttttttttttttttttttttttttactctttgaaagctttgttttgtggtagtccttttgggaagaatccagtattatccacaattattggcaaagtttaaatgtattttacataacggaaagtttttagaatgttgaaaagtaattgaaaaaggtgataggtaaatttttaggcaaagataatttatttcaataaatctttcaaaagccttaccttgaaatgctgttagtaaatttctgtgatttttttttttaatttgttttgctgagagcatagctatttgtttttattgtaaaacaataataataataaaaagcaaactct

SEQ ID NO: 6428 - DNA, 3575 bp, Homo sapiens
attcctgcgcagtggagaagtaaaagaagccgcttgtctctgtgagcacagctatatacagtgtagaataaatgtggtagaaaagtttttttggttttatctcttttgcgatccctaaattgccacctttctattgtttgaatagtaaaattaatatgaagaactagatagtggtgtaaacaaatgtgataatgtttatttactttcggttctgctcatacttttttgtacaacattaaagaaaatggactttttttattttaatttctcattaaacttctaaaattcttataggtgaggatcatttttccccccaccttaggatggtgaatgttgcaacacaatgacaggtttaagtcagtcaagtttattggacccttgctttgataccattcttgggcacatactccaagattgtattagatttttgtgatgaagagcttccattacttctgaaaactatatttatctgagtgagtccaaggtgcaactcctaaatgaattgtgttgcagagaactcccagtataattcactgaccagtacattttataaccatccaggccttggtttgcaagcaacagaccttaaacatacaggaaactattaaaattggctcgatcagtagtcataggaattggtataagaagagactcatttagagctcagagttttcttcacataatgggggtattaattatttgtgctgttgcgaaattatgtgtcttattcttaaagccatggtaaaaatagggatctgtgaaggaaatttctaaaattggatgtattaggttttgaactctgagattgcacaaatattcaattaacttgaagttgtgtacatagagaagaaaatttggttttagcaaatgacagagccttcaaaaatatttttggaataatgtgaatcaaccgaaaactgggggcaaggcagaggacaggttttctcaggttaagagaaaaacgaaattttaaaaactttaaaaaatactgataaattcggatcaaatttgggggaataaaaaatattagagcaaaggagtttgctggttgtgtcattatttaatgatcaaagtatagcatgtatgccttattacagacttgttgactataggcttaatgtaaaaaggaatcttgccagatgtagctacttaaggaaaaaagggtttttaatagaaatgaacttttgattagtatggtgccagtcacagggctattttcctgaatattgggtgatgtcaaaggtatatgatacttgaggaaatcaggccaagtgtagctgagcaattaataaacactcaagtttttttagttggggtcatgtcaaaccctcacatggtggttaagtagtgactaactgtgcatgtccttcatggtaggtgagcaccagtctccatgatcaaaaatgccccagtttcctttgaaaaagccactagttctgtgaattgtccttttccctcctgcccctaacagtcctacccctctagcctacattagcatatttctcatgtaatgtattttgctggtaagctcatccattagctgcgtccttcagctattcctttagattggaggaagtggatatgaagatggattgattcagctcaccttccatgattgcttttgagggaaaagctacagtggccacatttcagatgttcacttttgcaatttgtggagggtggagagaggtagacttttgttgtgtgttttataaagtactctcagtaaggagtgtttgagttgaagagtcatctgattcgaggccactcatgttctttgtaacttaaactttgaccaagaaattcttcacttctcacttcttcacttcttcccaatatacagtaagtacgtgagccagtcatccatacactaaggcctagttgagaaaaacctttgattcaggatggctgggttactaaccttgaaatgtaagagatctggttttgaatgtaaaagttgcaacacacaaacggaagtcttaaaaactttttgctctggtcagttacaggtggatccccaataatctgtttttggttttctgatggaaataatagaattaggggaaatcaaatctggttggtaggtgtctacagtattagaagagggtataagggcactgtttaacactaagttctaatacttccagaaactgtgcattccagatctacatactaaatgctcttatcattttgaaatgggctcttgattaatagacccatattttttagtggcttctatgttgtatatttgtctaaaatgaaagctcttttgcgttctaaaactacaatatatgtcatcttattttccctgagtatccaagtatagtgcagattctatgtaaaactactaaatgacactggaatatgtttagtagattagggggaaaaactataaaggtttatacaattgtttgtagttacatttaggatggacttatccctttggagaagagtgaagtttgttttttcgccatgtgatgaagaccactgtgattttttaaaaaagtagataatacttaaaatggcgtaataattctgcacttgaatttgtactgttaacagcacatttggaagattttaaaactttttattgtcttataaatagcattcacttattattttggatatttaagggttccattaagttaacactgtatttggacaaagtgtgaccaaattagccagtctgttttcttccatgtttaattagaagtgagaggtagaagtacttcaaattcaacaggccagcaagcaatcggcttaaaattccctttcttaaatgttgtgctcttatgttctcggctttttaatgactttatttttacagtacttgttcagtcacttgagatgaaatgcttggggtagcttttccatcctcaaacttaatgtttttactagttcatagtgtttggaacagtatatgccaatcactgagactgcatcagagtttgcaattttgtatgtttcattgccaaagaaggcttagtggttgttgactgtagtataagtcagctttctgtagcataagatttgattttcccatacttacttcacttgttatacatcactgattatttgggttaaactggactcatttcaagcagtttgcttttgttcaaatcgtgatgagaaacctaatactgtaatttgatttgagccataaaacacattttaatattagcttgtattatagttattaagcttgtttttgtggaaaaaaacttactaaaacctaggtaactctagattaggccagttcaggtgtattttgtatcttagtaatggatcatatcgtaaaaatagagataagttgggaagatatattgattatgctgttctgttgagggaaaggtcatgtatttagaaatttaaacttttggttattgtgttcacatcatagtattcaagcatcatttatagtttggttttgagaacttttctggtattacgtttatggcaaatgtataaaagaaacaagttttggttatatttttatatttgtaaagtaagtttggttaaagtgatcactgttctttttttattttattgtcatttcaataaaaaatatttgaaag

SEQ ID NO: 6429 - DNA, 375 bp, Homo sapiens
gtgaggaaaatacaggtcatgaagttcctggcaaagattttctgttaaaaacctatgctggtttgctttggatcacaccctggtgaaccccgggtgctaagaatgaaaataaccttggtgagttgtacaaattaaagacaaagaactacatgtgaagatagacttgctttctatttttaaatcagtagtagtactgttgctgaataatactaggtttttatggaataggatgaatgcttttgaagtattagggcttcagagtccaattttgcttatttatggtatataaatacatatttttttcttgaaattgcaattgagtttgtacttttcaaatagattatctactttttcattaaaatgtaaagatgttaa

SEQ ID NO: 6430 - DNA, 138 bp, Homo sapiens
tgtcgggacagccctgctcccaagtacaaatagagtgacccgtaaaatccaggattttttgttttttgctacaatcttgacccctttgctacattcctttttttctgtgaaatatgtgaataataattaaacacttag

SEQ ID NO: 6431 - DNA, 1824 bp, Homo sapiens
tttctccgtccctacacagggagctcctccccaagggtagatcggaccgttcatgctgcctataggcattatgtccctcaaaaaaaaactcctttgcctgcatcctgtgtacaacatgacatttttaaccaatccaatctaaaaatgtgccagaatccacctgtggcccgaatcgtgtttggttcctctttctactccactgcagatgaccaaacctgtcccgctgccactttcctcactgatattgggaggagggcaaggcccagccgaagttccactaaaaatgccccaggagaataggcaccggctggcttgccaaagggtttgggttttattgctttctgttttttcttttcccgacagcacaaagaagtaagggcagttattggacaggtgttatttaaacattctattgtaaatgaatgtgttgtttggttctactgcattgtggagcatgcgggggaagagaactgacccaggtagtgaaatggagcccttccctggaactaaccagtccttgatgttgtgtgactaagtaaagatgataaaccccatctgctgggggtgtcacttcacactcggcatgcattgtgaaagctttccatacccttggccattccctctctcctctctctccaaccccatttatgcaggaagggactgctaacaagaacgcttccatctcaaaccttttctctgcctgggaaattattttatgtttgtttttgaaataaaggatttagtttaagattctaaattttagagaaacaaacgtaggccttgtttactaatagccagacatcagaactgcaggtaggtatgttaatgagatgacttatttctggcagctcctggaatcctaatattgtaaatgagtgggacacacttgcatattgtgaccattctattgaggcccttctctgtttaatgcatattatacttgtgcttttaactgtggaatctatttctaacctaaaggtgctgccctagtacttttctttgctgcctctgctgctctttttcctttccaaacagcaactctgaggccatgagcagccaaaaactagaggtactgctccacctcgtctcataaagggaaacgggctcatcccttggattctggaggagggagagggagatggtgtggaggcctcgaggacagagatagacatgagctttgacaacaatctgtaggctctcctgctttagaataagcatgtaccattctttatccattccccttattcctacatcaattgtttttactttcttgggtgtgagactgagtgagacacacacaaaatgtgttgacactgtgatgccggcaggcagagcagctactgactttgaacatgggcagagaggcccctggatctcatccagcccactccttttccccttccagtacagtgacactctggtgcccattggcagatggcgacttccctgcacccataactgatgctttgtgaattcttcctccttttcagaactactctgtgctaattgttctgccagtatgggcgcatcagctccatcctgacaaacaagacatttaggtaaaactttgtaggcaccttctgcttctctgcttcattgttcctgtgatagtcctgttgttattacagcatgtacccaaaacagcctcacattgttacaggaggcaggccaggacatcaaagtcatcatctttatgtggcatgactcttaagaggccattactgtatctcatggcctcttgatgtggaaagaagttgacagagggttgcagggtttaaaaacatccattaacatgaaagctaataaacctgtcagagaacaaga

SEQ ID NO: 6432 - DNA, 816 bp, Homo sapiens
accacctgtgccacggccccctctggggctgaagccgccgctgggtcacagagcagggtcaccctgcaagcctgaagctggggagccctgcgtggagtcagcccaacagggactgcatttgctcctctctgcccgtcagacataagctctcacagcgctaaggaagcaggcccaggctggcaggcatctcggcttgcaggaggccaactgctgagacctcttctccatcccccttattcagtggaagatgacgggggatctgaggctgtgtctctgccttgtctttagaggacttcagcgtccaagactggggcccacccttctcaccagcactaaatgcactaacaaggactccagacctgcagccccagacccgccgtagtataagcctaacaagcaacacgtagcaccttagtctttgttccaggagagctgagcaagctggtgaaaccactctccttcctttaaacaccgtttcaaccaacctctccctggagccaacctgtaaaaagtgggttgattgctgacagcatggtcttccctccctgcatttcagacataccagttactgaaagcaaatcagttttaagtgatttctcagtgctgaaaagcctgtccaggtttccttccctttcccaagcctctctctgtaatactccctttgggcgaagctaacatcggtgcctccccgaccttgctgactaggcacatgggacgcaaaggagggagggaagcaaggccttgcctggcgagttgtcatgtggttggtggtgactgttttattttttttaataaaaataaagatgagagaaatta

SEQ ID NO: 6433 - DNA, 995 bp, Homo sapiens
gaggttcctgacatgggacccatctgctcctccagccaactcctgtccctcacatcccaccatggtggctcctcccacctcctctggatttgttcactctgagatctgtttgcagagtgggtgcttagcagacagagtgaagctggctggggggcacagtggtgtgtagtgctgctgtgtatcaaaagaccaaggtattatgggacctggtttcagaatgggatgggtttcttcacctcatgttaagagaagggagtgtgtcctgaagaagcccttcttctgatgttaaaatgctgaccagaacgctcttgagcccaggcatcgttgagcattaacactctgtgacagagctgcagacccctgccttgagtctcatctcagcaatgctgccaccctcttgtctttcagagttgttagtttactccattctttgtgacacgagtcaagtggctcacaacctcctcagggcaccagaggactcactcactggttgctgtgatgatatccagtgtccctctgcccccttccatccccaaccacatttgactgtagcattgcatctgtgtcctgttgtcatttatgttaaccttcaggtattaaacttgctgcatatcttgacatatcttgagattctgcatgtcttgtaaagagaggggatgtgcatttgtgtgtgatgttggatagtcatccacgctcagtttggaccattggaggaacttagtgtcacgcacaaatggggctattcctacgcttagaatagggcttgtctgcccactttagaagagtccaggttggtgagcatttagagggaagcagggcagaactctgaacgacaatacgtctctctgagcagagacccctttgttcttgttatccacccatatggacttggaatcaatcttgccaaatatttggagagattgtgtggatttaagagacctggatttttatattttaccagtaaataaaagttttcattgatatctgtccttgaa

SEQ ID NO: 6434 - DNA, 1411 bp, Homo sapiens
ccacagtgctggcgagcaccgatgactgctgggggctgcctgctgcggggctggctgcagtgtaccgtggacagcctcagggggctgtcggccaagagcctggagaaagggagcaagctgccccctccttgcccccaaggatgaggctggactgaggcaaagggctggccacaccacctgagcatgtgtgaggggttggagctaccgtgggactatatactgttaatgattttaatatatatggcttatgacatactctgtatcaatgagatcccctcaccctcaccccatccttccccaccaatacacacaaattttttaatcccatgaccaggccacggtcaaggctgtttttgagtatgagtgcagtcgtgtccatcctccatggcacagccctcctgctgccaggacctgcttgaactaccagggccacaggagggggataatcagagcttgaggctggcactctgactgctggcttttcccagacagcccaagggccggaacagcaggtggcttctcagttcctctgggcctggagtgacacaggaaggatctgcacttcctctgtgctgcttgccagccttgcagttggagttttaagcagaggtgacatctggttgacgcctcaggtgaaaatctggttttaaaatgtaacttctgcacaggctccttcctgctttgtaggctgggaagatgcccctggggtaggggtgctgattacctcagccatgtggaggaaggctggagcttgttcctgccccaggaataggccaggagggaaggccgcagcaggactgccgtggggagcacccctgctgcccccctctcactgaccaggggtggacaatgcccaagcagagggagcccccttgccctgtttggccaccctctggccagccaaaagcactctgaaaccaagaccttcccatttcctcctccccacatggtgctgaggctccctgctgcaatgcaattaaagcaattgattttctagtgctggtatttgttgactaccatgcagaagggctatctttctattcacgtcaaacttttggttgtgtggggttttttgttgttttttgggttttgttttttaatactttagggtcctgatttgtgggaacagaccttcttgtaaataaccactatttgagttgtggcaggaggatgataaagcacgcggcccctcccaaaggagcccttgagctagggaggtggtgcagtcagcctcgctctcaacgtgacccggggaatgaccacccagagggatgagctagcctgtagaggggaactggggtccaaaggtctttggggagggaggcagagctggctggctcagctaagtggcacgatgacgcatgaaggagattatgttgtgctctttattgccaaaaataaacacttttaa

SEQ ID NO: 6435 - DNA, 561 bp, Homo sapiens
agcttcctgtggctgggcaggatgggccgccccatacctgcccagggtccaggctaaccagccactcaaactgatgcagtgcctaggctcactctgggaccagtccctgccacagccgactttcttctctcccagggatggcgtcaacagtcccacctaccaacgccctgtggaaaggaagcctatgttttatatatatatatacacacacgcgcgcgcgcgcgcgcacacccagaagtctttggacccatttggttttataaatacaggacagctccaaggcccagtccagatgacctcacccacccaggacttcatgcagggctgggcatgttgggggcagttgttggagccccaccctgggctgcctctctaggcttcgctgttcatcatacaatgcagtgaacccagttatttgtaataaatgaagttcaagttcttggggcatctgaaagtatggcagatgtgggcgggggttgtgggggacggcatcggcctgcacctgacgctgaaccagagctcaggaatgtcaagtaacttaataaatgagtgaatgtgaag

SEQ ID NO: 6436 - DNA, 665 bp, Homo sapiens
cggatgtgaccccgctgggcctgaagctgggccctcactggcctgtccctgctgcagcgccaggacccccggaggtagaggcgagagtggaggctcttcttctgccccgtctcccctcaaagatgagaaacatgttcagaaggaaacggtgtctctcggctgtggctctgagtgcaaattgcatgggcggaaaggcgggggtggctgctcttcctggcaggcctgggccatcagcgaactgggccccgtgaggagggcgggagtgtggaggagggtgggcctctcacccaggctttctcggcccctctcctcagcttgcagagctggccagccccctccttagggggtgggcgaggagcctctgggcagacccaagaaccatggggactggggtgggttggtggcaccaatggcagccctccccgcccctctccttcaaggagggttcccgcagctggggggtgtgcggaggcgcatggcctcccgccacggggccgtgctgtgtttatggctggcagaggcagccagcgggtgggggattctgctgctcgctcacctgcctggctcgctggtctctcgaattttcttccctctgaaatcctatttaagaacttttggaagcttagccatttttacttattaaaataaaagaagcctttttacac

SEQ ID NO: 6437 - DNA, 363 bp, Homo sapiens
ggtggggtgaggcggatcccgcgcgcagttccagcaggtgtgtccccagcgcccgctgcgcccctgcgccccagcgccccaccttcccccacggctcaagagaagatgcttttccgtagtcgtgacctcagtggctgcagctctgaccgtcccgccagcacgccagccccgactcagctcctcgcggggctgggcctgagctcgacaagttgcatcaagtgttcgagtccctgagctctcactatcatttgagagccctaccttttcctgactgttcctctttttaagaacaaaatgattttccacttttaaagttcatgggtgagggataaaatgaggctccaatacatgggaagctttgct

SEQ ID NO: 6438 - DNA, 1848 bp, Homo sapiens
ctctgcggctgtggcccctaccagcctgacctgagtcggcgccgtgggcccagcaggcctcgcgcagcctagctcctcacagctgccttgcaccaagggccccacccagctcggtgttctgagacctcgggagtgaggacgcaggggtatgaggcagggagagggtgtgccgctcgtactcctggcaccagcgggcagtgcgggcggccagattgctgtggcccatcctgattccacaaacctctttcccatgacaagattcactttcttgagagccatcagcaccccccttatttccggggcactggagccaggctggaagtcaagtggcttctccctgccctaaggagggtgtgatgccagcccaaccttcccatatctttcaagctagcagccacataggttaggaaagcggaggctcatggtggggctggggccccagaggtgggctaggtgtaaggcatcagttgccgtgtgggggagaaggccagctttaagacgtaggcctggggactgggagggcagagggtgagtcacagccctctccgtctgctctagccaggggcgacgtgtccccaggtttctggcaggggagatgtgcagggtgggtcttggggctgggtctgcctggagaccagtgggcccagggggaagggggaagctgagaagttcgtgtgacaccctcagccaagggacagtgccatccttggggacaggaggaaaagcagcctgtctctgctaagggcaaatcctccggttttggaagcgcccctcccacctttgtagtgcagttcctaggtgtggtggggaatgtgccgtgctctcagcagacagaactgctggtgtgaaaggcagggattgtcagcccacctgaggctgggaggaagcaggaccaggcctaggatctccccagcagatgcaaacaagtgtcctcccctgaattgtgtgaaccaaagcgtcaggggcttggggcacagccccagtcagctcaacccagtcctgcttcagagccaagactaggccagggtggggacccccccagtaccctccctacatcaatgtggctgctggcctggaccccaggggtctggtacagccaagatgttctggacaacatccagctacttcaaaggccagagtgtcctttgggtcctcctagagtccccctaggtctctggctgcccatgaggctcatgaagcagagggtatcccagtcatagggagcagaaagagcaagtgggttaaggaagcctgtgggggacctggtggatggagttgaccaacatcgctgggtggctacggccctccttaggaagcccagaaggacctttattattaaaataatcattttgaaccctgctctatcccctgccctcttccagccccacccctccctggtcttgaaagaagactaatcagtgggcacaccaagggccctgaggggcagggagatgccaccatgcttctctgtcaccgtaagaaggctgaccagccacgcccacctcctctgtctgactgagttccttcctgtggccacagggaggggctggtccttcccctcggtgctggctctctgtcacaatgcctcaaaagacatggaacccaggcctacaaccgtcccaactgctaattcttttcctttcattttgctttctgaaagcagtttgttatactattcataacattgtagagtttaatttcatgtcattttggatcttatataaaaatgtgaggatttggatttttaaaaagaatgactccattttaggtagccacttttgatgttaatatatagtgagtccaatgtatgctttagaagtaaagacattgaccgtcacagaccactgc

SEQ ID NO: 6439 - DNA, 432 bp, Homo sapiens
ctggaattgtgactcgagggatagacccctggatgtgactcttctttttaaaaggaaactatgtggaggacgatgcaaaaacatatttatcttagtttgctctgctgtagttctgttatttatacttggtgttgcttgtcatggacaccggtgaacatgccgtaactctgtgactgcattgtaagtgcagtgggggtaagcagtcctgtgagtggcgcatgaacgctggagcttattccgccgcctgccccagtgtggggggagatacctttaccatgaacttacagaattaaagatggcccataaggaattccagaccaatatttcttcctgcggtttattctatgttttatatattatctaaatatatgtatatgctgtgtcatactcataatctggaaatgaataaagtgatatattcctggtttgtaa

SEQ ID NO: 6440 - DNA, 442 bp, Homo sapiens
gtctgttgcggttctcccacttttccataagcagaacaagaaccaaatcaaacgtcttaacgcgtatagagagatcacgttccgtgagcagacacaaaacggtggcaggtttggcgagcacgaactagaccaagcgaagggcagcccaccaccgtatatcaaacctcacttccgaatgtaaaaggctcacttgcctttggcttcctgttgacttcttcccgacccagaaagcatggggaatgtgaagggtatgcagaatgttgttggttactgttgctccccgagcccctcgactcgtcccgtggccgcctgtttttccagcaaaccacgctaactagctgaccacagactccacagtggggggacgggcgcagtatgtggcatggcggcagttacatattattattttaaaagtatatattattgaataaaaggttttaaa

SEQ ID NO: 6441 - DNA, 1006 bp, Homo sapiens
acgaaactgcatctctgttgtacgtgtcagtctagaggtctcactgcaccgagttcataaactgactgaagaatcctttcagctcttcctgactttcccagccctttggtttgtgggtatctgccccaactactgttgggatcagcctcctgtcttatgtgggcacgttccaaagtttaaatgcatttttttgactcttggccaaaatttagaagatgctgtgaatatcattttgaacttgtgtaaatacatgaaagagaaaacctttgtctggaacttcttggctttgtgcaagctgtgtccaaggcaagtacataaactggtaccttgtaatgaagaggcagctgatgccatgcacttgtctgagggcatagctccatgtcttctgacattcctggtgtcccaaagaatagcaaaaagccagtttgaatattatgtaacttatttttttaatgtggacaggggaccttgaaaatcactaagttattaaaaatgtggatgtgctagaattggatatgtccaggaacatgggaagggctcactattggaatcccatgagtttccattttgtctctacccaaacgtattccaaagctgactgcatttgtaccatcttatttcttttggggattatacacctcagccgcctgagatgggggtcagctctttatataaagggaaaccagaccaggcctaaagcccacccctaccctcacccccccaatcctctcctgaaacttaaaaacagtgggaatataggaaagggaaccaaatctcattaattaattgttctcccccattaccccactgaatgaatggccatacaggctaagctgaataatgacaaagttgaaaggaccaatacagccccttttataaggattttgaatgttttgcaaatgtattggtccctgtgttgtattttgtagccttttcctgggcttcagctcccctacttcttgtatgtgtatgcatactgtagctaaccattaaagtcatgacacac

SEQ ID NO: 6442 - DNA, 48 bp, Homo sapiens
cagatagtagatacccaaatatttgttggtttaaataaattaagattt

SEQ ID NO: 6443 - DNA, 991 bp, Homo sapiens
ccactgcctcccagggaacacaaggcctttgccattggtcgcaggaacccatctcttagagctatggggccattcttagtccacgatcattccaactggtgggatgacatccggacatcctcttccagggactggggcaaactcaggccccacacctctggacagctcaaatccagtccccttcctgctccccagtcctggcagtgccgtggatggcggcaggaagtctcacatcatagaggacccctcctcctctcccagttctcaacttctccatgcctggaatccacgggtgaagagagtcggtagatctcataagaaagaatccagtctgacttccctctggagaatgactatggacagaaggccaccatcctccacagagcaccctgtcctgagtaggggttgtgctcattaccccaggccagtggtagcttcctcaggagcctggccacttccaacggtagcactgaagtcatgcaaatgcatagtcaggtagattcagaccttgtccacaccttcctgggcaacccccaccatgaacctgtcagcctctttcccatagctaatagacatttcccaggccttgaggggccccaccctgtctctttcatcaaacctgatggtccaggctgggcatccctctcctcctccatccccagacatcaccaggtctaatgtttacaaacggtgccagcccggctctgaagccaagggccgtcccgtgccacggtgctgtgagtattcctccgttagctttccccataaggttgggagtatctgcttttgtgtctgagatgggcccctcttttcagaggccgcagggtgggtgatggagaaggctgagaacctttcagaccctctgtgtgggctgggctggtcagaatcagggtgtacctccccgacaccttctttttcagtgatgttttctcttcttcctgcctttcctctgcctcctcccctgccagccctagcgtgactacccagagac

SEQ ID NO: 6444 - DNA, 1040 bp, Homo sapiens
tgtccctggtgcgaggaaacagagacaacctttctgtcttcagcctctgctattgagagcttcacacagacaatgagagagggtggatggtggtgagtggatcatttctttcagccacagtgtgtaacactcagcatttgaatgtttctcagaaaagaacatgtagtgacacagggcagaggcatccatggctggcgtctggaatattaaaccaaactctccccggtccttttttctccaacttttctcaaagagtttacatgtgcaagaaagtcatcgcaccaaaaaacctgtcaattatgccattgcaatatttcagaagctttaactgaagtgtcaggttcctcgtgagaaacagcacacgttagaggctttgagagaaggcctagttctgtcatgagtagtcggcctcgtgtctgtcctcccatcttggaacaaccttatcaacaggccgcactgcagaaatgatgttttatgaaaaccaatgaggctgctgccactccagcaagggaaataatgcagtttcctgtcttatttaagaaaaagagaaggctctcttttctcccttgtcattgccgttcttttccttacacgcaaagattttttaactattgcagattttcatcccattctactgcttgattgaccatcaactccatcctatcgagatttatttaagaatgaagaacataattttctgctgatgctgtaccctcacccttttcagcaaagaatagtggagagtaggaaactgtactttatctcggcatcctcttgaatgatagtgcaagtttctccagttgggatgttgtctctgcccggttggacctcctccctttgttgaatgtggtgtgcagcctctcatctcacactgtgagtccagcggcgcagggtggtaccaggaaagaggatattctaggctttgcgtgctgctagctgggttcaggcttcacccactggaaagaaccaccatctgctctaaccatgtagacttattgcggcctggtttctctgttacaataaaattactgtagacccaa

SEQ ID NO: 6445 - DNA, 277 bp, Homo sapiens
cagtggattataaataaatcactggaactgagcattctgtaatattctagggtcactccccttagatacaaccaatgtggctatttgttttagaggcaagtttagcaccagtcatctataaactcaaccacattttaatgttgaaccaaaaaaagataataaaataaaaaagtatatgttaggaggttataaatcttgtggagtgtgaattaagtatgtggagtgtctagaagtccttggatatttgatatttacctgaccaccacagacaaagatt

SEQ ID NO: 6446 - DNA, 821 bp, Homo sapiens
caataacgatacaaatttggccttaagaactgtgtctggcgttctcaagaatctagaagatgtgtaaacaggtatttttttaaatcaaggaaaggctcatttaaaacaggcaaagttttacagagaggatacatttaataaaactgcgaggacatcaaagtggtaaatactgtgaaataccttttctcacaaaaaggcaaatattgaagttgtttatcaacttcgctagaaaaaaaaaacacttggcatacaaaatatttaagtgaaggagaagtctaacgctgaactgacaatgaagggaaattgtttatgtgttatgaacatccaagtctttcttcttttttaagttgtcaaagaagcttccacaaaattagaaaggacaacagttctgagctgtaatttcgccttaaactctggacactctatatgtagtgcatttttaaacttgaaatatataatattcagccagcttaaacccatacaatgtatgtacaatacaatgtacaattatgtctcttgagcatcaatcttgttactgctgattcttgtaaatctttttgcttctactttcatcttaaactaatacgtgccagatataactgtcttgtttcagtgagagacgccctatttctatgtcatttttaatgtatctatttgtacaattttaaagttcttattttagtatacgtataaatatcagtattctgacatgtaagaaaatgttacggcatcacacttatattttatgaacattgtactgttgctttaatatgagcttcaatataagaagcaatctttgaaataaaaaaagattttttttt

SEQ ID NO: 6447 - DNA, 2519 bp, Homo sapiens
gaggcaaaaggtctatggctcatgtctgaaaaatgcctgctgctgccaagttagctattgggagcaatctggaaaaacttgctcccaggagggctttgtgtctggccagcttgattttcctaatggtctcatctcctttgctagtgtctttgtcatgcgtctctggccctcgtgggtaaatgacaaacgggaccaatgggtttgccaagccctttgctgttcgcagcctcacattcccccggtgcctctcccatggctttgtgctgctgagtcgctctcatgaagcccttagggagagcacctgttgtgtgcctgacaccacgctggagctgtgtaccaatcgtctcagccttcattaggaggccgaggtaggagtcttatatcccaggtgaggaatttgaagctcagaaaggttgaggggctccccagaggtcacacagcctgtgtgcagtggagctggcaccattcagactttcagccgactcagcaactttcccttgccctgggctgcctcctcctgagagctgttccccaccgccctgcctcttccggttggaggctctcatgtctctttggggagagctggcagtgtgcggagctgataacattttcccaatattgagcagttcccaaggacagtcagcatttctagacttccacaaaattatgctgcatttggctggagcccggtgttcagtggtttccctgcccgaggtcgctgcagccccatctaccacatcttcatgtggacattgagattcacatgctggctcctgaagggtgctcagtctccttggtgattaaggtcctgcttgaactgctgccaactccatgtcagggaagtcgcttttggtgcctggctggtttgcccagagccaagctggggcaaggggcagccagccctggcttccaaggctcccgtactgtctgtgtccttgtataaggagctttgctcttggaattactgaaagtctgtggcccaagagagagacacaagtggccttaagtctttttgaagtgttatttcatccagggaaatgcctcgagccatagagcctgaaatcatctttgttggctcagaaaataccttagcttcactcagctggactgcattgaaggcgaggctgccccttggatcaagcagaaaacaagagaaagaaagaacgttccctttggggatagtctggaaagttgggatttgcaaataaaggctctggaagcattgctggtcctgaagctttggaggtgggcagagagagcttcaagaagactagatgcaaaccctggaaaggattaaggctcaactctggagaaacaggccacagcctctcagagcagctgttggctgtaaatagaggtagcaaggccgctcccaggcccctgtgagtgtgggcacctgtgcatgcaatgctccgactctgcagaggtgccaagtgcccctgctgggccagtcccagagagttaggaagtcaaggcctgcaactcctggttcttcctgtttggaccagttcttgtgccattggcaggatgagaggcagcagccaggcgggagctgtgtctagcagcacctgtagcccacgtgctgctaattagctggaaaactggcgaaggcagaacctttgctaccaggaatcttgacatgtggggtctgtctttgagaatttgtaaatgaacagtccaatatttcctctcggctcattttgcacatccatttttggggaaatgtgatttctctctctttttttttttttttttttgcctaaggcacaatctcaagaggtcctgagaccacgtacccatgatttttttcttgctctgtgatacccaataactccttcacctaagccctgttgttgattttgaagtgcttcctaggccagtgattttagcttctgccagctgcttttgccagtagattaacgtgtttttatttttcaaactccgtgtttcctaacgtggagtgtatgggtctaagagagcctgctgtcctccctgccttccaccttggagaggaggctggacgcatcagcagtggccagggcaggtcgcaaaatctcccagcctagagaccacacctgaaacggctgaagccagcttgcacaagggctgctgtccctctgcggcaggcagagctggtgggggcaggggtcacagagcagtcatagacaccatggaccagggcaggagaagggcagatggcacatgggcacaacagggccttgtccttagagcactggggggtcatggctgggaggggcatggcaggggctggcatccctgtagagccagaggggccacccagggcagtgacattccagatatgttgggctcacctcatccttgctgtgagactggagttccatggggacatgaagtcagtacaccgcagagctgctcagctgctctacctctcgctgacttttttgttgcacatatacattttctttcaattagcatttatttcagcttttatttaagctttttgacagtacatgtaaaatatatgattataaccattt

SEQ ID NO: 6448 - DNA, 7307 bp, Homo sapiens
ggacctgcctggatcctcctccctcccgtcctcgtgcctgtctctcagtcaagttttctttcccttgtcctgtcagatttccatgtgattcagttgaattttgtcctctttggtaaaagttcattttgggaaagggtttcccgagtggcccagtgggcgggtccgcggtggagttgggaggcccacgttcctcagcgtttggggctgtggagcagccggcgtcactgcccaggtccacttgaggtcttacctgccctgaagcacaggcttcctttgactctgagccaccttgtcgtgtgtatttgtaacaagactttggattaaatggggctgctaagaggggggaaatatgaaggaatgaagggacagcattggaacggtcagtcggcagtggttctcaggcagccttaggcaccacctgctccaagtcagtgttgagtctgcgtgctgggatccagcccactcctcatcttccatgccagggcccccaggcagccagcaccagcccaaaggccacagggctggggaaagctgatgtcctgttaggatggctcccagggacctctgactcaaggaagggtgaccttttgtttcctactctgctgagaaatcacttgattcttcctcaaatgaatcaccttcctgaaccccagattcttctccaggaatatgggggccatcttgttatggggactatcttgttttccagtttcctgcctaccctaaatactttgaggctgaattgcagattttcagtcattttaccttctcaggtaaaagccatgaaagaaacaagcctactccaccagccaaagcacttgcccatttgctggcttcatgaaccgcaggtgggaggtgtttgtgttaaaaaacagcatgcacacgcgtgcgcgcacacatgcacacacacacccctctattttagggatgtgtgctaattttctaaatgcctgcaaagagttctaaaatgattctgagcagattcgtctaggatttgaaaatacttgaatttgcaccagaacacacccttccacccatgtttcagaaggcactaattgtcgctttgggcgcctcagtgtcataactgtagacatcattcttgggagttgttggggggaaaaatcctagctacttaaggtttctgattgattcttgataaagtgaagattattgtgtgtggtgaatgagttcagtgagtccccatgatgcagtagtttttttaaaaaattagagagtaattatatcttttatggaaaaaagttgttttagtttgtcaggttttccctctttgaactgtttttaatgtttacaaacctcactttagctctaacattttgtgtttagccctcaccaaaaagcacttactgtggcaggaagattttgcagtaacatggagaaatccccaagatcaagtgctgacaaatgttgacagctttagcagcgtactgtgtaataaataactccgagggggcggcggggggtctgtgcaagaaagcgtcaccttatggacatgtggcgtctcattccccagaaaaggacagcatctgagctcacagtgttgatcaggcaacactgctgggctgggggtcggagttggggttagcttcctgcaccaacaccttcagtacgatctgagttgggagcagtgtcccaggctatgtggctgagcaccacgtctgcctcaggggctgaccctgctagcctgttaacaactcgtctcccctctgctcccacagagagggcagccaggccagctcacagctgggtgtgctgcctgtcaggtctgttgagtgtgtttgcaaagtcaaaattgggcttatctctctttgagagttccttttaaaatagggccacaaaggctcagccttgcattaaatggggcccacttggaaggaccatcctgagctttatcagaaatctcctgctgggaatcatgttacttggcccccaaaaaaggccatctttgaagtgagattgaaaacaagaacaccattcaggtgggcttgttgcccaagttttcccagctcacttcagtaaaaccacttgatcatctggtgaaagaggggggcaggtggttggcctcctgaggatatgttgtcagctgcaagaaatagttctgaagtcactgaaactaaatgcagatgaatgaccaaaaaggatgacacgccagagagtgacttaggagttaatttgcatcttcgtgatagactcttcagaattatttatgtccctgtaactatttaatatcctttgtgccgtgaggctcctcggtggttttgtaaatgttctccttgtatttaattaactcccactagaaccggaagtggtgctatggacgctttctagttgatgtaatgtgtggttgcacatgtcatcatgtatagaccacgtggtgacgaaagttctggagggaatagggttatccaaggtgaatatgaagacgcctatatttttcttatattgcctctatatgcaaacagaagacaatcgatatctgggggccttaaaatgacctcttggcaaattgaaggaagcgtttttgcgtttaatagtttcaatagggaccaatatcagtttggtttggggcatttgaaggctgagcgaccttagtttttctcagtgttctggtgggacgatattggttttcacatttaaagcaaaacttgaagaaactgcagttgctgtgtgcatttgggttttttcctggacactgtacagctgaaaccctcaagcatttggtggaacctctggtggttttagatggatgcaaacactgatgtcctcagagaaagtttattttggcactgattgggtggatttggtattttttccctctgattctctttgatatccttctttcacactgctgaaggcatgggagggaaatatgttttccctgccttaaagagggattacagtcatgaaaggctggagatacttgttggccccacataaagctgggaagaacagatgcagtttcagattaaaatctcgtcagagaagtttgatttgaagtaaacagccatccgagggaggtgacttttgtctacagaaaaagcaagaatgtggcagcctgcacagccccaatacacatcttccttggcaatgtgagctgaagccagcatgggcaagtccggcccagctctgagcgcttggccctgggaagccagcggcacccccagcccttcgggccctgttactgtcccctggcaggaaggctcacgcctgtgggcagccagggaatgtgtctgacctccaccctatgtcgggtgcttctgggacagcttcgtgactcagttgaaaacattctgactctcttcaagtttgcagttacatctgtggttcttggaagctgtcctagtgagtcagccttgggttaagcctgaggagaccaagctccaacacctttgtgcactcatgtacgtgaattcttgcttgcagtgaatgagacctgaacaaccctagtgggtgccatgtcctgcgtgtggcccaggcgtaccttttcttgtagattcacatgagaaacccgtcacctatccatgtgctctgagaggtggactgaggtctaatccctttctgtgccagattttctgtgggttggtcttagcacctaggagatgaatagagcatggagacacctgaacaatttagtgattctgcaaggcagtgatgatttaagggttcctattgtctcatctgtgttcaaaacaaaacagtcatgaagtctttgtgccactgcctgactgtcatcttctccagatcttgtttacagagtaataatgacgttaaacaggtatcagaaaggggaaaaagtttctaggccaagagctgctggtggattctcttgagcagaataacaagttgcttcctgctccagggactgccattagcttgtgaagtctctaggtgccttgttatttcctagtgaagttgcagaatccagggttttttccaggtttgtcttattttatcagcacccacgtccaggcccaacagcttggtaggctggtgaggtccacacacggccaggtctgggagataagggaggaagcagtggcctggaacaccccacctgtctgctatcagcactagacagctcaggctgtcttggaaacgtgtactttgttaactgccttcctgtcctcttgtctttgaaagctgtctcgcgttccacagtcagcttgagggcaagagtgggatgctggggacaggtctttcccgtcctgtgggtgagctcctggcatctggctcaggaacatgtgggtccagcaggtgactctgaagctggcttggctgccatctcagacaggacgcaggcctgacaccctcagcttttagctttgtaaacttccctggcgctttgtagaatcttgtgtttcttctcttctcagcagatatcattcaagtcacaagaactgtctggttgagaaagtaatttaaaatatttgaccttttatgtttcttttatttagaaactgtgagagaaaataccgtcaatatctgttaggtctagaaaaattttcttccgaaagtgaatgttctgtttaattcttcttcatgcaagtgagtggcattttgtacactctttagcttgaagcggagtgggtcctattgtattttcccttcttttgtctggaatatattctttttccatttggatacagtttttcaacctttgggatttttttttcctttctagtttttcctactccacaaacgtaacagtaaggaaaaaatcacccacaaacctgctgagtttgaatcactggcaacttgcctagaaaagttcagatgatgggtccttgaactgtgtatctatttcatagggtaagtttgttgtctatgtttgtttttttatgctgaggctttaattcaggtgacttgctatctagacacctggggtggcgtgttttctttgggatgcataatacacaaaggccagggagcctttggcttggacccccagggagctattgaaacttttaaagtttgagtttaggagtaagaacatatctcagaccaccttagtcagctttgctgatgggatttagggccaggtcagagtttcttttcataactgcctgaaaagagagatggtgtgaaacaagattctgataatggtttgtgtgagatttgatcatagtctaaaactatcacgtctgagttgccttaggatgacagtgctgacacccagtaggaagtatcccatttttatcaggaaagtcagtcacgcgtagggatggtgaggagacgcgtagggatggtgaggaggggagaggagggagacctgctggtgcccttgcaccagggtgaggcctgactcacgctgcttccccccacaggccctgctttgcttgcctgctttttccagaatcgattttgcaagcttcaagattctgttcccctcttcgcagaagtgaggaaggcaaatactcagggtttgaagggagacctggccggcctgagggctggcagatgtgagggcaggacacctgggatggactcgtaggctgacccaggcccaaagggggctgcctgttcccaactctttcactctgtaacccattttaaaatgagtttttgaatcttgcctcaaattgacctacttggataaaatcagtgcttttcctaacttgattttgtttgacgtggttccctctaagagaatggtaggaattgaaactatttgtatatgttgaaatttgtaggggttcaggaacccatggcagaaacactaaactatttatttacaagtatgactatttttttttcaaagtaggcaattctttgtatattttaaggcaaataatcacttcacctctggtgccttccatgcgtcgcataagcactcttgtcaatcatggaattggaaaaaaagatgtacatttagttaaacaagataacactatttttgtagcatgattttagattgtgtccttttaatattgttttcaacaatggtagttttgaggttttggccattttctctttacacttcgtatgtattttaaagaagaaaaaaaacaaaaaaaattccctggctattcctctttcctctctgctgctgcttctcctgcatcttgttcctgcttatttaaatagtctgagagtaagagtatatttctgtgaaataattataagtcagtataattgcatttggcattttttaaccacttgctcagtttggagccactgctcacctcaaacagtacaaagaaagtggttccatattttacaaacagaagagtagcatcagagccctgacctcctgtctttgggtgtaaaatggtgagaggccggtgtccggctccttcccctgtggtttgggctggtgaactgagcccaagtgtattctctggcctgggccccttccagaatcagtgcgagcgtcctgcagaggcatggccttcctgccactgcagagtgggaagcttcctgggggacctcagccagctccggggctctcatcttccactcggatctcagattggttcgttgtggatgctctggctaggctcggcggccttttccaggcttcaggcctgaacaaaacaggctgtttgctgtgaggagctagatgacaccaagacacagacacgtactcttcaccggctccttttgcttctccttcctgcaggacgtgagttatgtctggtcccaaaacccttgagtaaactagctgagccattgcaaatgaaggtacagatggattgaaacataaaattgtagcttttggtgtccttctgaagggtcagaatatgtaattatttgataaccaaggaagtcaagtcagatggctaagtagtaactttccaatatgatttctccgtggtacttcacctggtggcacttttggggggcaatgttaacaactatcacattttactcatcaagtctctttcatttcggcagtttaaagacacaactgtgggctttctgaggcgatgcccgttgggcaaacttaggtttatgtgtttggtttttcagctgacgtggaagccctgggtgggcgtcccctggctggcctggcttttgggttcaagtctgtatgtatggagtgggttggggccccaaagctttgctgctattgatttgtccccgacagcaggcaaagcctcacattgccctcaattttccccctttcatttgaaggaccagtttttcatggtacttgtcttgatctttttcatagtgttcaaatctgtatttttgtatgtagagggaaataattttctcaacactaatcgttaataactattgtattaaattgtcatgaaggaacttgtttaataaatggacgtgtaagg

SEQ ID NO: 6449 - DNA, 2826 bp, Homo sapiens
acctccttaaaaagtgcatatgtcgaatgaccaaataactatgtatattgatctgctaagaccaggatttttctgatatggcacatgctatcagttttttggggcaggggagatgaactttaaaaaaaaaaaaaaaacttcattggcttgtccgagtgtgaaatgcacatttaggaaggttacatgtcagaccctttgttaaggataacccttggactctggggcatgtggctcttttgtgggaggcaagcacatctgggcttcttgtggaggggaaggtagagtgaaagaaagagggcccactttctaacagggtggagcaaatgagaccaagaaatcattggtaagatgatggttagtctgaccagtttcatgttagtaaattcacttgttcttgggaagcagattaagtagcagaaagtccaggaaagaaagaccagaaggagtaatgagacaagtgatggtggggaagctgaatgttgagggaggtggaggaaggaggagatgagcagtgtcagtaaatactgtgcattcagtagaagttgaagaatcattgttagaagcatttccaaacaaaacactaagcaaaatgggaattaggcttattttgaatgcatctttaacttacgaaagatgtactaattgtgggggtgcctgagtcaggcggagctgacccaggggtgggaacgatggcagctgcccaggacccatgtgcttggcccaggctatgtcctcgtgagaggtactggggtccacggatatgtgttgtggggcagacagtcactgtgggatgtcttcaaagtcagcagttacagaattagtttactttgaattttgttgtctaaatagctcctgctttattttttaaattaaattttttgtttttactatcacaggctggcctaactaatacaaaataggtgatgaacctctggttttaccataatgcaatgtgccacggaaagtttgggggaggtttttaatgtaattgcactctggttaattggctcgtaccaagccctgccttatgacttgtggaaagcttcaaggagttccactgatgcaaaagggtcttttcctagcttcctggtctgatcagtgctatgagatggacagataagtgtgaatgttttatacagaaaatggaaatgatacatttctcttgttaggtgttttcataaaatgtagcattttttttcttatggaaataagagtttcaggtgtctccccacctagggcaaattcatgcacattgtcatgttataccaccattctggaaatgatttctgtggatttgaaattgcacttttaattttatatatgacagcatttaaatgcaaacactaccatgaatttaatgtataaaatgttgtcaaaccaagggaaaaaaccacagttcaccatgtggagtttactttttttatatgaatgtttgttgtactgtgtctaagcataacttccctaatgtcattacttttacataccagatttgactgaccactaatgtagtactggggataacttaatatcctatgttgtgtcaagactctttgaagactttcttgaattgctttcgtaaaggtctgaacactgttaaggagaaagctgagtatcaacttgcctttctgatagaaatgtttcttgtgccagttttattgttgagatatactatttttttccttttttaattcagttttttaaaaaaacaaatgtattgtggcttccagttaccaggttgtctaggtaatgacagtaaactgactgtagaatgataattgtggtatagtgaccaatagatgccaaacagcttgtggcctcactaaaggtggggtcgcttagtccccgggagtaaaatgagtgacctcagaaacaagaattcctggaaaggcacatgccgaagaggaatatggtataattttaaattttaatgcaaaattttaatttgtctttattttttatcatttgaactgataagcactttttgtgtcaatataaaatatactaaaactgatgaaatgctaagacatgtcttgtgaaggaaggtttcttggagaccacttttatttactcatgagaagtggaagctcctagtatcagaagaagctgatacatagtgtcatgtgctcagtggttgccaaagtctaccaactttggggagctgcagggttctttttgggaggtgggaggaagggagatgagttttgttattttggggttttcaagcattggaaccaaaggccaaataataaacagcctttagtttttaaagtaaaattcattttatttgcagagtacacttgtatggtagactgttaaagacaattttatgactatttatgcacattataatggttacatctgctttttgtctttaaaataaaaaaaaaaatcagagaaaagcccacctttgaatacgtggctgaagataacagccaagaattggtctttcctaaaaatgcaacagataatgctgctagattgttattttgtttgcacttttttttgattggcattttaaaatcggtatttaaactgaagacattgtcatgttttattaatttaacaaagttgaaagtgactgctctgtacatcatgaccttaacaatgttaatgctgtaagtgaaagttcactgtcgtctgtatactaaatttattggtgtttctaacttaaaagtaagactgcagattatcccccaccagccttagtccaggggtgtggctctgtccgggtgcagtatgcagtcatgtggaaccttgctttctagtcctgggaaaaaaagatgtctctaattactggcttcaataaacacgaatccagactgctta

SEQ ID NO: 6450 - DNA, 130 bp, Homo sapiens
agtaagcaagcaccttaagtagtgtgttaatgattgaaactgtaattgccttcgggttgtgctttagtctgtaaaattctaaaggagagctgctaaattgttttcttaataaacatttttctcatttgta

SEQ ID NO: 6451 - DNA, 269 bp, Homo sapiens
atggcccaggcagctctagctgggagcttggcctctggctccatctgagtcccctgggagagagcccagcacccaagatccagcaggggacaggacagagtagaagcccctccatctgccctggggtggaggcaccatcaccatcaccaggcatgtctgcagagcctggacaccaactttatggactgcccatgggagtgctccaaatgtcagggtgtttgcccaataataaagccccagagaactgggctgggccctatgggattggt

SEQ ID NO: 6452 - DNA, 390 bp, Homo sapiens
gtcccacccgctcccactatggtgggagacgaacggaagggttggtgggctggcccagccaactgccccgggtgcctcagagcaggctcagactctgggtccctcggagctgccagccgggcacccccaacctcatggtcatggacagatagacagtgctgccctgcgaagtggctctcaggggccagtgagggctgggcccacagagatgcatgcgcaggctcatatgcgtcccaagcagccgcagcgcagccgccgggcaggcctgcgtgccgggagaggactctgccttttttcacagcccgggtgtgcctgccctggagggaggctcttcagtgcggtagctatttgtttacatgcagatttttgtaataaaggctatttcctgat

SEQ ID NO: 6453 - DNA, 140 bp, Homo sapiens
gcctggcctttgacccctcagcctgcatactggtatcctggtcccagctcctgccagggctgttaccgttgttttcttgaatcactcacaatgagaaactaacattttgctttttgtaataaagttaatttatattcagt

SEQ ID NO: 6454 - DNA, 1174 bp, Homo sapiens
ctccccactacagccccaagctcctaactcagacccagaatggagccggtttcccagattattgccgtgtatgtggttcttccctgatcaccaggtgcctgtctccacaggatcccaggggatgggggttaagcttggctcctggcggtccaccctgctggaaccagttgaaacccgtgtaatggtgaccctttgagcgagccaaggctgggtggtagatgaccatctcttgtccaacaggtcccagagcagtggatatgtctggtcctcctagtagcacagaggtgtgttctggtgtggtggcagggacttagggaatcctaccactctgctggatttggaaccccctaggctgacgcggacgtatgcagaggctctcaaggccaggccccacagggaggtggaggggctccggccgccacagcctgaattcatgaacctggcaggcactttgccatagctcatctgaaaacagatattatgcttcccacaacctctcctgggcccaggtgtggctgagcaccagggatggagccacacataagggacaaatgagtgcacggtcctacctagtctttcctcacctcctgaactcacacaacaatgccagtctcccactggaggctgtatcccctcagaggagccaaggaatgtcttcccctgagatgccaccactattaatttccccatatgcttcaaccacccccttgctcaaaaaaccaatacccacacttaccttaatacaaacatcccagcaacagcacatggcaggccattgctgagggcacaggtgctttattggagaggggatgtgggcaggggataaggaaggttcccccattccaggaggatgggaacagtcctggctgcccctgacagtggggatatgcaaggggctctggccaggccacagtccaaatgggaagacaccagtcagtcacaaaagtcgggagcgccacacaaacctggctataaggcccaggaaccatataggagcctgagacaggtcccctgcacattcatcattaaactatacaggatgaggctgtacatgagttaattacaaaagagtcatatttacaaaaatctgtacacacatttgaaaaactcacaaaattgtcatctatgtatcacaagttgctagaccaaaatattaaaaatgggataaaattat

SEQ ID NO: 6455 - DNA, 463 bp, Homo sapiens
accaggggtgcagccagcttttggagaacctggatggccttagggttccttctgcggctattgctgaacccctgtccatccacgggaccctgaaactccacttggcctatctgctggacctgctggggcagagttgattgccttccccaggagccagaccactgggggtgcatcattggggattctgcctcaggtactttgatagagtgtggggtgggggggacctgctttggagatcagcctcaccttctcccatcccagaagcggggcttacagccagcccttacagtttcactcatgaagcaccttgatctttggtgtcctggacttcatcctgggtgctgcagatactgcagtgaagtaaaacaggaatcaatcttgcctgcccccagctcacactcagcgtgggaccccgaatgttaagcaatgataataaagtataacacggattttgatgtgagaa

SEQ ID NO: 6456 - DNA, 14 bp, Homo sapiens
accacggctgccgg

SEQ ID NO: 6457 - DNA, 465 bp, Homo sapiens
ggccaggtcagtaaccagccctgcagcacagcctccttgactcccccagtctccaaccctggccttgacccgggttgctttttgcctccctctactgcagaccctctaggactgggggtggggccaatccagggcagcccagagggaacatcctgccacaccgcctggcagtagcctctttccagctacacgtcgctgccacaggcccctggaaatgctacctacgtgttgccgccacaggctcctgctctctggccaagccctgggtgggaggccaggcccccagcgggcagggtctggtgctgggaggagcagagcctctgcctcttgcctgccctcctctcagacctaaggccgggctccacctactcctgtgggactctcccagcaccctgtgtgcactgagcttcagcagctgagcctaggtctgtgctgtaaatcctaagattaaacattccagatagt

SEQ ID NO: 6458 - DNA, 245 bp, Homo sapiens
aggtgctgtatcccggaaatctatctggaccctggactgcagtgcaggagatgacagagtgaggagggcccagagcagaattctggccccagaactctgtgcccaggagccatgccttgagcagtattagccgtgtgtgtatgcatgtgagtgtgtgtgtatgtgtgtgtgtgcatgcatatgcatgtgcatgtgtgtgagctccttgaacgcacggagcaaaataaaattttcttagctaatcc

SEQ ID NO: 6459 - DNA, 363 bp, Homo sapiens
ggcttgggaagaccgccctgccaagtgcggctgcccctgccagaggctcaggcctgggtctaaggggcacgtggagcaagagatcctggtcccctccctgctggacctgccacccagagcttcctgcctagtcccactgggctggcccaccaggcctctgacccaggctgctctgcggccccttcctcctcctcttcctgctccaacttctgtccacctggggacagtctgtgcctgtagcctcatgaccccaacccagccccaggcatggctaacccctgactgcttgcctcatatttaagctgctgctctggccaagtgcctaattttaacccagacctcaataaagacaccttttgtacc

SEQ ID NO: 6460 - DNA, 241 bp, Homo sapiens
gcccgagcagcggcgagcccagggcgccgggcggccgggaggctggtctggcttagctgggccgagaggccggagggccgagttagagcggccggcctgactctctatgcaacaccccatccttgccgcaccgagtgcactttaggggcccctacggccggcgggatcggcctccctcccccacgactcagcaatacccgccccaccggctgtgatgctccaataaacttttttatgcttt

SEQ ID NO: 6461 - DNA, 514 bp, Homo sapiens
cgtcctggcccaaggctctcaattgcactctttgtgtgtgtgtgtgtgtgtgtgcgcgtgtgtgtgcgtgtgtgtgtatgtggtctgtgacaagcctgtggctcacctgcctgtccggggtgtagtacgctgtcctagcggctgcccagttctcctgaccctcttagagactgttcttaggcctgaaaaggggctgggcacccccccccaccaaggatggacgaagaccccctccagagcaaggaggccccctcagccctgtggttacagccgctgatgtatctaagaagcatgtcactttcatgttcctccctaactccctgacctgagaaccctggggcctgggggcagtttgagcctcctctcccttctgtgggtcgctcccagagccatggcccatgggaaggacagagtgtgtgtgtccttggggcctggggggatgttgctcctcagctccctccctcagccctgcccctctgagacaataaaactgccctctctaaggccaactgtc

SEQ ID NO: 6462 - DNA, 65 bp, Homo sapiens
ctggccaacgtcagggtcggggctagggtaggggcaaggaaactcgaataaaggatgggaccaac

SEQ ID NO: 6463 - DNA, 94 bp, Homo sapiens
gacgtcacgcaggacagataccgctccacactctgcttcctttgagttttttaataaaataatctcatgcggcaggagaggagaggatcaggga

SEQ ID NO: 6464 - DNA, 214 bp, Homo sapiens
gcccctttgggggacagtggcaaggagctccatgctgaggatcgccacatggctgcaaaggacagggttggacccaatcccagagcagaggtctgaagacaggagcaggggggtggccagtgtccctagagcactcttcccagtcaccagtggctgcagaagggccaccctagccttttaactgctttgtcaaaattaaacattttgtacacag

SEQ ID NO: 6465 - DNA, 614 bp, Homo sapiens
gcctgcacctgggctccttgccacagggcagagggaccagggaggggaacaggagccagacatgacagggacttggccctagcagagacagtgtctttcatttaatgagtctgggtgaagccagaggtggctctgggacttcgccccctccagtggctcatctgctcctcagacttgcagggtggcaaatgttcctgttgccaggttaccacggtgtgcacagggcagagctgccgccaggcctcctcatggtgatgccagtgagtcggaccaggaaaggctcaccctggggagcccttcagcctgatccgcagtcctaacagggtgagaaagcacaagaggggccagctcggctgaggcctgaggagaaatgatgagaagttttgtttcgttcttgggctggggcatctcaggaacagtgagggcaacaagctgtccctcagggaccctcacctgccctcccatgtgaccaggcccttcccaggtggggactggggcttgctttattaagtgagctcttgggcttttgaagtaggacagagggccctggtttggcagagaggaggcaagggagggctttagaacatctgagaaatgttaataaataattcaga

SEQ ID NO: 6466 - DNA, 3325 bp, Homo sapiens
ctgactgtgctggctggctctggctggccctccactggccccagggctggagctgccctgccctccataggcaactggtgcagggactgggaaaccatagacagagtccactcctcctgcctggcctttccccctctccctttccttccttccttcctttctctgcccaccaccccgctcagtctctctctctctccccttcacgtgcagcggcctgtaacacagtattggctggttactctcatgtagcgccttctattttgaaaggggggttttgttttgaggaggggttggggtttttaaatttttttctcctgactgagccaccagtatttatctctggagagtttgtgctgagctggtttctgctaatttagtgatgaagcctatccaagttggtgatagcttattattttcataagtaaaaaacaaatgagattatatatatatatataaaaatatatatattaaaaaaaaagacagtatttatcgtagcattagtggtccagcacctcttgggtgaggctgtccaggcaccatgttttctttgagtccaactcattaaaaaagaagaatctctgtcacctcagccaagtgatttattttttgctcccccttttttgagtcacaggccgagctgcagcctaggaaacccaaatagggtttggtgggccacttagtgggcatggttacattggtttatagcatcccaagaactgtagatccctaggcccctgagagctggacagagcagagaactacagggccaagggtccagagaagtgataacttggcccagggccacacagcagaggtagagggtccttggccagcacactatctaccactctaccccacctcccactgcctgccttgctcccctttcctcccttttcaataccctatcttcccttgttgttaagatggccaaataatacatttactctaaattgattgcctggaaactacctgccttcgtcctgagagcttctgtgtgtcaggctgctggaaagaagactccattcccaggacagaggcccttgagtacaggggctgctttcttcctgcctagatcttcaccatctctgcacagctctgagagaatggatgctttctgttgagaaaccagtaccttgtggaggcaggttcttgggctgctactccagggagtggatggaatccttggtcccctaggccagacttcactgccactgtgccagacagctccctgcagctgggccctagccactcttaggaaagactattgggagtatttgctggccagagaatgggactctatcagctttacacatgtcccaccagctgtttcagatagatccttacagctggcagagtaaaagtggtcccgctaccattggggaatcaggaaaggaaagactgagatggttgccaggacttggggtggcccacctgtggagaggactggctgccctggaggaggaaagggaggaagtctacacagaggagcaccaggacggctggaatttccatatgtgcttcacattgtgaggggagtgcacaagccgcccatgcaaagagtagggtcagccatggcaaggccggaagttgaactttcagtccctgcctgaatctgggctttgcaagctcctgctccatattggtggacatgggaatggttggtgtggcctgagatacccattgctcaccaggcctcactgggcccacagctgggcaacaagaaaaatgtttgaattggaccaactgctggtgatggggccagggccctgggccctgtgctgtcagaattctgccttgggaaatgatcctatagctgctgctttttcttggtccttggggctggcagacccatagaccatggcctgttaggaggcgtcctgtctgtaaaggaaattcatctcttgtgacagcctggggctacctagctcccaaacccagaagttggagacatcaggctgtttaaatgatcatagcctagcaggattggattaaaaccacaggcttttgcagctggaatggggttcagtgaacatctcccccattcctctcttgctacaaataaggaaacaggcccaggagattaagtgacttggctaaagtcacatagcaaattagtagcagagccgggactatcccttatccctgtgggttgggcaacactatttagtcctgaaaccgaatggcagataaaccccatgaggggtcaggctgatgtgccctccagcagtatctgagaagctgctaccttcaggggtgtgtcagggatgaggacgggtgcctgagcttaggttgtggagtggctgagagggcccaggagggctcgggacagctgtgtgctgcatggggttgggtgtctgcctggctcgcacttggtacccatggccacctccccattttctgtgccttatctcactgtttcagctgagtccaagttgtttactctgttcctctccagaggggctctctgtcccagttgggcagctcacctttgggacataagcctttgccccacaagctgtggagagggccaaaaccaagctgcttgagcccactctcttgctgagagtccaggcctgcctgcctgccagccagaggtgccccttatgcacatccagtcctaccagcctgcttccaggagcctagagtgggaaaggcacctgggggagccctggtgaagggctggacctgacccatggaggcaggaggaagacctggctttcttggtttgtccggccctggggagcagccttccctactcactttccccttgcggcaccaaatggtcactccttccagagcaaaaactggcactcatagcaagccagaacccccatccccatcctcatgggtctgtggctgggtgcaggccatcaaaatggacaccacgagacagaagtggggactgcctggccacctagcgccttcccactccttaagcaagcacaaagaagatgaggcagagaattgtcagagctgaaagttcctttggttgctcacaactcaggtatgcacccatgtggcagccaggcagcggagccctactagactgccagtctcatgcacccagacctgtggccagattgtggcctctggctgcctcaggcattttcctctttgcattgggttttcctgcattagtaactacagctgcaacagacatcctccacattgtgcacactggttttgcctttgtcctcaagagttgatacttggcattagcatgaaacttgtgggtgtgggaggatggagagagaactctaacacaaaacatcttattaaaattgtacttgagagacaaaaaaaaaactctgttgtattttgacag

SEQ ID NO: 6467 - DNA, 110 bp, Homo sapiens
tggccaggcttcaacactttccctgtccccacctggggactcttgcccccacatatttctccaggtctcctccccacccccccagcatcaataaagtgtcataaacagaa

SEQ ID NO: 6468 - DNA, 363 bp, Homo sapiens
gctcaccacaggccctccccagctcaacccattaaagacccaggccctgtcccatcatgcattcatgtctgtcttcctggctcaggagaaagaagaggctgttgagggtccgactccctacttggacttctggcacagaaggggctgagtgactccttgagtagcagtggctcttcctagagtagccatgccgaggccggggcccccacccctcctccagggcaaccccttggtcctacagcaagaagccagaactgttggaatgaatggcagccctccctggagaggcagcctgtttactgaatacagaggatacgtttacaaactgaatacgcataataaataactgcacattctccatcc

SEQ ID NO: 6469 - DNA, 56 bp, Homo sapiens
gctgaggcttagagcttggaacaagggggaataaacccagaaaatacagttaaaca

SEQ ID NO: 6470 - DNA, 20 bp, Homo sapiens
agaccttcctttgctaccgt

SEQ ID NO: 6471 - DNA, 513 bp, Homo sapiens
gcccagtgtcatcttgtggcctggagtcgaggtcttggccaggacataacaagctgtggtctggggtaacagcctcttcccagcacccacctgccagccctgcttgcctggccctgtcctggacccagctttgctaggtctccttggaaaccaggcctgggcctcaaaatggagatggatcccaggtcttgtgggaccctgggatgtttggggactttactatctagcaccccagtaggcctgtcctggccagagaagactggtaggggccgagtggggtttgaaggcagccggcccggcccagcccaggagcgctatttattgcatatttattgtttggatgtcaccatcagagacgaagggaagggtagccagggagggagtccagcccagctgcctgcaggaagatctggctcagtctactatgggcagggccccccaccaagctgagccgaatggagacagctgagctgaggcctgactttttcaataaaacattgtgtagttctgggc

SEQ ID NO: 6472 - DNA, 101 bp, Homo sapiens
cacagtcggtccccgcagaggtcactgtggcaaagcctcacaaagccccctctcctagttcattcacaagcatatgctgagaataaacatgttacacatgg

SEQ ID NO: 6473 - DNA, 109 bp, Homo sapiens
tgacccagttagtcctgccagatgtcactgtagcaagccacagacaccccacaaagttcccctgttgtgcaggcacaaatatttcctgaaataaatgttttggacatag

SEQ ID NO: 6474 - DNA, 309 bp, Homo sapiens
ttttgacaaatctgattaaaatgtgatgctagaacagggatctttcccagtatcttgagtgggtgaccacacttgtcagtgggaggctctgggctgccctgtcggctccttgagggcgggatgaactgctttgtgacttggaaaggtacgctgctggccagcattggagaagaagctgctgagcatggctttctgtagtctttagcaagacacaagtggattttgactttgtatcatgtcatgatttctaacaataaatgatgtttttatgtgcctcccctaagaataattagcaccggggcggaattc

SEQ ID NO: 6475 - DNA, 1679 bp, Homo sapiens
gagagaaagccaggaggtaagagccagctgatatcctcggcgaacatgtctctcctgagtccagaagaccagcaccctcaacctggtagcttctttctggcttgtcaaagctctcagaaggtacctagaggagcccaagccccagctccatcctccacttattctgcctgtttcccccaaagacaatggctggaccctgcatgcagggctgggggtggaatggggctaaccagctcctgatggcctgagccaggcatcttgactggcacctggagagcccttaagtctgtcctggctgtggcccatgccgacagatatcgtggggctgacaggtccacggcaggcttgctttcttttataaaatggaagctctggtaccttcaatgtatgactcctgggagaatcaagggtccatctgagcctctgagtaaagatcccaatgttctacctctccctgtccctcttgtaggggatagggaggcagagagagccagcccctaccctcagagtatctggacctcagagaccatgttgtgccaggggtggtcccacctaaagatgctagcccctctccaggtgggcataaggagtaacagatggcaaaaccacaaactattttgatggactgtgctgcagtatcaccagaagacattagggggcagtaggcccccacacaaaaccttcaggcttgaattttaaaggggaggactttctgccaacttttcttgtatgccttgggaaagccagttgccctgaacccagcagacaccatggaatgtcctttgcacgcattaaatggtacagaactgaagcctcggaagcaatttggaactcgatcttctcttccttaaatgaaaagttattgaccaaatggactttttaaaagacacaggacccttaactttgccccaaagtgaggggctccacaccaaccccaggcggaggaacactcagacagattaaggatactgttgacctgtcactgtttattatttcagcactaaaactgaggagcctcaactgctggctcttcttccctttgtatttgtgtaaggagcactgcactcccataaaaggttttaaaatacaaaatgtacaagaacacacaattccaagtgctgtaaacataactgagaaccagttcctttactaaacatccattttataaaacacaaggtttcaatttgagcccatctgagccttaaagatccattctgaataccaaaaacagggcttcacagccaggcccagaagaggtctggtgataatggctggccctgggtggggatagtttacacccgggcagcagcaccacacatgaacccaaagacatgttctttttaaagctgttttcagccatgtttctctgtgcatctccagtaagcagaaggctacccattccattcctcaacccaagagctagcacagttagagtaggagggggtgcgtactagcacgtgcccagttgctcagtgctgctagtagaaattgatttgcatagtccaatggatgtgtgctttaacaccactatgttgcacaaaaatttaagtctttatctacaaagccaaaaaatattgactcttaacaccaaagcttttacaaagctgatataaaactgcttacatagtatacaaagctctattttaaaatttaatgtttattttaaataggaaagcatt

SEQ ID NO: 6476 - DNA, 658 bp, Homo sapiens
tggtcttgtgatgtccatgaggttctgccacatgcccttgagggctctgagtccagagttaactgccctgctgacatcctgttaggtttcctagcttaacatgtggaaggaaaagcatatcaagcatatcgggcggcaccatcccaccacagtgaaaacttatgttaggggagtgagtcttttccacttacagtaggacccctttgcctcaatcaaaagtgaccctacagtttgaaagaaaaaaaaacgttgaaaaaaggaaggtttctttagctttagcttcttggcccaggaatttttcctggcattcaggttctgtgctgaaaccacaagggagggggaggttcccatttcattagcagtaagcttctgctgtgccataccaccaggctgcctgcctctaggaaaaccctgttccttttgatagaatctaaaaggggtaccagtgggtcccttgtagcaatacagactggatagtaatggccattagggcagaaagtagtctgagcagtgggagattttagttaacagctatttctgcttccaaactctgataacggttgtgaaattactgactgacttcctttggcagtggggccaagaaacaatatatatgaatgtgatacatgtgtttagtaaaatctagctttgaacatgg

SEQ ID NO: 6477 - DNA, 2877 bp, Homo sapiens
accgtccggagcagcggggcctctgccagcccttgcagctgcagcccatccctgggccatgtcccctccatcgagtgcccggtgcttgggggaggagggcagggacagggagggagccacagtcagtgcccgggaacctggaagctgcgctgctctgcgcctctgggcctcactgtggacagaggagtcaggcccgccccaggagcctccagctgcctaaccagtgccattctttcacaacacgattttctacaaatctacagcacaaccgagtttgtaacccgtgggttagtatgaggaccgggttcgtgtactctctgtatctcctcttaagcttcgtccagggttctttatttttgtctgctgccaatgtcgtctcgcatgcctgcaccctcgcatgcacgctgcccgcatgccacgtgccacgctgtagccacagaccccttgctcgggcctcacccaaggccaaactccaaacacaatcagaaccagccaaagaagcacttcctgggcacggccaccagctctcccgcctccagtgtgggccggctcctgcagggtccgagggctgcatctctaccagccagcccagggctcttcccagggtctcgcattcaagggcaattacattttaaaaagaaaaacagaaaaaggttaatcacaaaaccaaccctcacttcacagggtctgtaagtcactcatagaactttgctcttcccgagacagggtcccttccccagctcaggcacaacagagtctggcaggctctggcaccctgggcctcctccgggagcctcccatctgggcagtggagccataaacggggatccgagaagagagtatccacttttttttttacaggaagaagggactcacagcataaacgggggtgggggggatcctgattttgaaaataatctatttgtagcttctcttctatcaaaaccaacacatcctcttctttctgccaatcctctcccccacgggacacctctctggttcgggaccaatccctccctggggacgtgccccacctgcgtgccggctgagctcaggaacccctgcctgccccccgggtggggctgcggctctggcctcccaggcccatcctcaacagctaccccagccaacaccaaggccacaaggggaccccggcctaggaggcaggaagccaaggtgcagagagcagcctggccctcaccagtgcgcaagctggggcagcaaggctgacagttgctgcatgcccagggcagggtgtggtactggcacccaagttcagcatggcagagctggccaacagcttgtggtccccgatctgcctccagccccaagatgcctacagcccccaggccccttcggcagcactgcctctgcccacctgcctttaagagactccagggctgctcctgtcatgcagcgaaggttttgtctgtttcaaagttcgagactcaacttgagggactgtttttgacaatccccgctgacctccgctcctcgtggcgccctggccctacacccagcctggcccagggccggctttgcctggtgaggctggagggagcaccaggacctgctgtctgctgtcagcccctcctggtgctggtgccctgatgctgtgccttgtcacccattgagctgcaagagggaccaagagggggccacgcagccagccagatgcctggccctgtgctggggcagacaacgctgcagagcccagggagcctggcgctaggacgtgcgtccttgtgacactggcctgtctgaactcacctggcctgggaagcaccgtctgcccgggcccaagccctgcccctccagagtccagagccaggaaggggctgctgagggcgagcatcctgctgggctctctgcccggcccacccctccaaggggctggcctgtgagccttgactgggattcatgatgtggaggcccccaacttccagaagcagctggtactctgctcacacaagcgactgggccggccggccctggacccctagaccccgagccgcctgccgactgcctgcacagggagagcagttgaggcccgggcagggcccccacaccagaccccaacatagcttccccacccaggcaccccctcccggggcagcaggcgtgggagtcagggctgcatgctcctcccctcccacctcacaggcggccttaggcaagtcattttctgtcatcacaaggtcgcctctgcctagtcaggtcctggggtccagagtaaggatgtgcggcccccaggcccccgcacacctccctcagcaccaagaccgggacccccccacccacgtgtctcattgtggctgcctatggactcccgggccttgtgtgcaggccaggcccttccactgattttttaaagtgaaccattgctggatctcagattctgtggcatctaaggcctagcaggggtgggcacacgggtcacccgaggcccataccaagactctgttcctgccctaggcccagtctcaaaggaagccacaaggcgcgggggccactgaggaaggaaatgttcattttcatttgtccaaaaccaccttaagttttaagtatattaatcttgatgctttttaactattgctttttaacttgctgagatttagaaatactgttataaaaacttttttaatttctgtatttttttctgtattgtatcttcatgggacattaggggttttctatggtaagcacacctatggttttggtaaaaacattatcaaatatatatccagacggttcttccctagaagaaaaacaagtctttacacctgataaaatattttgcgaagagaggtgttctttttccttactggtgctgaaaggaaggatggataacgaggagaaaataaaactgtgaggctc

SEQ ID NO: 6478 - DNA, 559 bp, Homo sapiens
ggctggaccccaatggagaacaggtggtgtggcaggcgagcgggtgggcagcccgcatcatccagcacgagatggaccacctgcagggctgcctgtttattgacaaaatggacagcaggacgttcacaaacgtctattggatgaaggtgaatgactaaagctttgctactggggctgaggattccggataccaagacgcaaacactttcactttgagctgggcaaatcttacttggcatcaacttggatggctcgcatatgacaggaaactggattgccaaggcatggcagactgagctggaggaagatgtcagaaatgtttgccctgaaatcagttacggacaaaatgttggctacaacttgaggagaaaaatcacccccaaaggagtggacatttcctaacaattctgtatggaggaaggtggggtaattgcattcgtctgcagtagacacgagttcctcggacctgtataatctcccaaagccaaggtttggtaataatgtagtccccaaatacctgaaagctgtctttaaaaatgcaggtaagcatgtgactggc

SEQ ID NO: 6479 - DNA, 150 bp, Homo sapiens
gctaaggtgactatagcaccctggctgttttcttctggggcttagtcgaatcagctttgtaatgttatgggacaaaaatcaattatctcattaatgttttagtctgctgcacacatctaaaaaagcaaaatggcaataaaatcataacag

SEQ ID NO: 6480 - DNA, 1266 bp, Homo sapiens
aacaggctttcatttccacagaattcacaggagcatggttcctaataatagcccctgatagtctgctctttctttctttttcttttttttttttttttgagacagagtctcgctctgtcacccaggctggagtgcagtggcgtgatctcggctcactgcgacctccgtctcccgggctcacgccattctcctgcctcagcctcccgagtagctgggactacaggcgcccgccatcacgcccggctaatgttttgtatttttagtagagacggggtttcaccgtgttagccaggatggtctcgatctcctgacctcgtgatccacccaactcggcctcccaaagtgctgggattacaggcatgagccaccgcgcctggcatctgctgtttctttcagaagctgggctgggatgagaattttgggcaacctccttcgacgtgggggaggtcccatttccacttcatcactgttggagatcatggagctaagaagcagagccaagtccacccatgtccttggcagagatgacaggcacacagcttgtgcagtgccagaatatcattagcgtttcccttctttagtggtttgcttaaatttaaatccctggtaatctgtagaaccttctcctaggaaatggtgaagtctattaggagccacttgtgactccatgacctgttaaaaccagcaatgtgagtattatttggagtaaatttgttccacgtcaagttctggccttctgatgcaaatgcaaaggaacttagtctgttatgaacccaggttgatgacagaccagtccttgtggaataagattccctttaaaaactctttagccagtcgtgacatcaaccctagacctgtctgccttggcatttgctgtcaacatctgctgggctatgtaggcaggttaatcctccacttctcatgtggttgaaccagtgtgttttttggtaaaatggtgattgtagataagattagttccctgatcccctgccccctgtcccctgcctcttttcccaattcccttccttatgctggacttttaaagcttaaaaaaaatccgattgaatataaatgcctaatttcattctttgtgaaatggttgcttcctcctgattccctaattgtgctgtgttcgtgtcttgcactggaattcaacattcccttctccttttgtactgtgttgtgcttgctgtctctcccggacacccttaaagactgtctttttagcaaaaaatttcagtaaagtgttttctgtaatcttttttt

SEQ ID NO: 6481 - DNA, 1574 bp, Homo sapiens
gattccttagcctggatttccttctaacatgttatcaaatctgggtatctttccaggcttccctgacttgctttagtttttaagatttgtgtttttctttttccacaaggaataaatgagagggaatcgactgtattcgtgcatttttggatcatttttaactgattcttatgattactatcatggcatataaccaaaatccgactgggctcaagaggccacttagggaaagatgtagaaagatgctagaaaaatgttctttaaaggcatctacacaatttaattcctctttttagggctaaagttttagggtacagtttggctaggtatcattcaactctccaatgttctattaatcacctctctgtagtttatggcagaagggaattgctcagagaaggaaaagactgaatctacctgccctaagggacttaacttgtttggtagttagccatctaatgcttgtttatgatatttcttgctttcaattacaaagcagttactaatatgcctagcacaagtaccactcttggtcagcttttgttgtttatatacagtacacagataccttgaaaggaagagctaataaatctcttctttgctgcagtcatctactttttttttaattaaaaaaaatttttttttgaagcagtcttgctctgttacccaggctggagtgcagtggtgtgatctcggctcactgcaacctctgcctcccaggttccagcaattctcctgcctcagcctccctagtagctgggatgacaggcgcctgccatcatgcctgactaatttttgtatttttagtagagacggcgtttcaccatgttggccaggctggtctcaaactcctgacctcaggtgatccgcctacctcagcctcccaaagtgctgggattacaggcgtgatccaccacacctggcccttgcaatcttctactttaaggtttgcagagataaaccaataaatccacaccgtacatctgcaatatgaattcaagaaaggaaatagtaccttcaatacttaaaaatagtcttccacaaaaaatactttatttctgatctatacaaattttcagaaggttattttctttatcattgctaaactgatgacttactatgggatggggtccagtcccatgaccttggggtacaattgtaaacctagagttttatcaactttggtgaacagttttggcataatagtcaatttctacttctggaagtcatctcattccactgttggtattatataattcaaggagaatatgataaaacactgccctcttgtggtgcattgaaagaagagatgagaaatgatgaaaaggttgcctgaaaaatgggagacagcctcttacttgccaagaaaatgaagggattggaccgagctggaaaacctcctttaccagatgctgactggcactggtggtttttgctctcgacagtatccacaatagctgacggctgggtgtttcagtttgaaaatattttgttgccttcatcttcactgcaattttgtgtaaatttctcaaagatctgaattaaataaataaaattcatttctacagacccac

SEQ ID NO: 6482 - DNA, 460 bp, Homo sapiens
agagcgagttcccgcaggcaaattggatgggcgtctggccgccgtggagttccggtgacccatttccccagccgtgtcgtctccaggaccacccgatggaaataacaggcgggcttcacggtgcggctctgtccgcccatgccccgctgggtctgcagggaactggactgtcccatggcctgtgagcaccggagcgcctggctgcctgccaaggaagtgcaattgcataaaaacagaaagaacaacgccctggagccaatcttcaagaaaggaatttccaaaggataatatttttctaataaatgcggctgcaacctcctgtgcatttaattaaataggccaaatttttgctgcttaggtcatctcaaggctgatacttgagctgtgtgcccagagatcatgcatttagatttatatttttgccagaaaatacaaggttataataaaactaagaactacc

SEQ ID NO: 6483 - DNA, 851 bp, Homo sapiens
accagaagcctgagcaactacggacgcaagccgaggaccgtgctgccgccgtccacgaaaagacccgcgccatcggcctccagtttgcgtcgagaattcctggaagggccctgatatgactgtggttggactgacctgactgccagatggtgggacttggtctggagcagggactacttggaatgataaaggcaaaactcaacagcccctggagctgcgcttgtggtggagctggaccctgaaattacctggaccttttttttagagacagggtttctttctgcagtctcaaactcctagccttgattgatcctcctgccttggcctcccaaagtgctgggactacaggtgcatgcaaccacacctggctaattttcttttcttctttctttcttttttttttttttttttttttgatggagtcttgttctgttgcccaggctggagtgcaatggtgcaatcttggctcactgcaacctctgcctcctgggttcaatccattctcctgcctcagcctcccaagtagctgggattacaggcacatgcctccataccgggctaatttttgtatttttagtagagatggggtttcgccatgtgggccaggctgttctcgaatgcctgacctcaggtgatccacccgccttggcctcccaaagtgctggaattacaggtgtgagccactgtgcccagctgagtaaatttcttgattgcacagaatgtacggtgatattggcggacttaaggacatcgaattgtttatcaggaataaagtattatgtgtgttttctgcggccctggataatgctgtagcattcagggtcgattgagtaaaaaaaatgtagagatgg

SEQ ID NO: 6484 - DNA, 327 bp, Homo sapiens
gtggggaaggaggaggctcccactggatccatccgtccagccaagagctcttcatctgctacaagaacatttgaatcttgggacctttaaagagcccctcctaacccagcagtaactggaacacacttgggagcagtcctatgtctcagtgccccttaaatttctgccctgagccctccacgtcagtgccatcggtctagaaccactaaccccgcattgctgttgatcgtcacgctcgcatctatagataacggctctccagacctgagctttccgcgtcagcaagtaggaatcgtttttgctgcagagaataaaaggaccacgtgc

SEQ ID NO: 6485 - DNA, 2254 bp, Homo sapiens
gccgggcctcgccgcgacccttccggcccatctatcgggcaccggggctccggcccgggacccaggaccagcaacccgcgaccaatcatgctgcagcccaggggcgtctgctgtgccccgccaatcacgagactgggggaccggccgggcctggcaccaatctgcgctgcggtcgggcggagcttctgtttctcccagccaatcatgtgactcaaggaaaacttccggcgctgtgtccagtctcctccaatcaatggccttcgggggcgggccagcggccgctcaatccccactccctcatgctttgggttagggttttctttcacgctttctgaggaggagagcatggcgcgggcctcggcgaagcacttccgtcagcctcgggcggaggatcgtcttagtagctggccagacctggaggagagcgggcggtctttgcgggcctcaggagataggtggccgcccggcccctttccccgcctgcccggataggtgcgtgcagacccaccaaagaaaagcggtcgctgcgggacccccagtcccacctcggccgcgctgtgggatggctgcgcccccagggcttcctgcgtctccaggaagccgggagtggcgccctctgcggggtggggtgctcccgggccgaactccggacaggtggaggggacagggcagagctcgaggaagccctgtccccttcagtgcaaggtgctgtcactcacgtgtgccctcgaccctcccgttcacccgcagccttctcagcgcctctccctgggccggaggcctcctcaccagcctacctgttgctctggaaaaaaatcccgtcccccgactccgtccctacccccagtcttcggccggctctggcccctggggagggggctgcacggcggaaggaggctggctatgggcccggctgcccgctgcatgtacctcctcctccacccatcgcctcttgcctgggggtaactttgcctggggctcattctttggttaagctgaagctgccgtgggtggccaaaccgcagattctttgcaaattctgagctggcagagctcgcagccgggagccggccggggaagaggagacttgcgcgccgcaagccgcctgcctccaccctgctctccatctcccgctctagaagggctgggaagctcgcggccggggttccacctggaagctgcttgcatggctgaacccagcttaggtccctgacggggctgctggtggaattctcccccttcgaagctggggaggtttaggagggggaaggcttctgtgaagctctcaaaccactaatagagccccctccccaacagtgacggcgcagatgctcccccttttcttagttgacaccaccaggcagcttcctggccgttggtaggttcctgcagctggctgagggaacagggaccggcaggggactttgttaggggagggttgggatgggcagtgggcccctgaaagttaatatattggaacctagctcgagtgtcgttctttccaattccgaaagtagaaagagtaaaaataggggtgattggggtggggttagtagaatgcctctctcagggcgctcccccctcccccaccgttttagagagctaggcctcagccagtcttgccactcccatctcagtgcttcctgaagaggctgttttgagtgttgatgaaaagcaatgcaattatgccaaacagtattgagcagaataatttatttcttttttttcttttgctttaaatcatgaatcccgccaggtacggtggctcacacctgtcatcccagcactttgggaggccaaggcgggcggattacttaatacttaaggtcaggagttcgagaccagcctggccaatatggtgaaacctcgtctctaccaaaaaaaaaaaaaaatacaaaaattagccaggcgcagtggtgcgcacctgtaatcccagctacttggaaggctgaggcaggagaatcccttgaaccgaggaggcgaaggttgcagtgagccgagattgtgccactgcactccagcctgggcgacagagcaagaccctgtctcaaaaaaattaaatcatgaatccccatcctggaagaggtaggtcccagcatccagccagattttctgcaatagtaatttaaacacacttttttatttccttccctttctgaattaaaaggaacaaaaaactgtctagtccttcattgttctgaaatgggcatgatggaagaaggcgggtctggtaggatagctgtgactgataatg

SEQ ID NO: 6486 - DNA, 440 bp, Homo sapiens
ctgcctggatgagcacacctggctcatcacacttgcaggcctgttccctaaggggccccagccaaggagctgagcgaggctgtctggcttgggggagatctgacagcccagacctttctacggctggcagcagagaaacaaagtctggacccactccatgctctgccctcagacctggccaggtgatgctctgggggcagcatctccccaccgagagaagcgggctcctaatgaggtgggaaagccacggcaggcagcgagcagcccaggccagctttctgcatggatggtcagtctcttgccctcaaacactacagcaaacaagctacccctgccagtcctagacaacttgggtacatctggggacctagcagttaggcttgactttgaggagaggctgtgatgtttatgatccctgaataaagctactccttggagag

SEQ ID NO: 6487 - DNA, 2472 bp, Homo sapiens
tggcgccaccctccccatcctctcaggccccagtgcgagcaggtggcctggtctgtgagccgcaggcactcagagcaaaggcccagccaggagagaggacagagccagggcagaggccatgccactttatggaaagacacctcacttggattccagcatttaaacaggaagtgacttcttagcaagcctggccaggacggagcctgcaggcctgggcctggttcggggtctgttttatgctcttcggtccctcctcttcctcctctggggccctgcctcttccctacccataagcaccagagccagggccgctgcccatgacagaggggccaggctggcctccctttcaccatcccggcctctcccagggctggtcctgcctcagctcctcctggaatgctggcccccctctcccctgcctgagccccctcctcccctcttgccttctctctgcctctcccaggcccctctccctccaggaggcggggcggctgtggaggggccaggtgcacgctgggctggatgtctgctgggggctgggggccagggcggcaggttggagttgggcggccaggccccccgtgtgggaagggagttccagggcccacgccaagtctcagggaggaaaccaggggctgcttgggggggggggtcttgggggccctgtggtggctcccacccctcgcctcccccaccccgtgaggctggctggagggggccagagcagctctttggaaactagggcagcagggttaggaggccggaggccctggggtcaccggccagccacacaggcaccgttttcagatgtccacttctcattgggtacatcaatcttttaactttgggggtcacagttttagccacctttcggggggtgactggagcagtaggaggtgtggggtcattttatgaatataataaaatggagctgactgtggacgaggactaagtgtgggggagaggggacgatacagggtgtgtgtctgggagtgcctgggggacagggaccccccggtggtcctatggcaggatgagaagggagggacttggctcccccagagcccggtggaagctactgttctctccagtgtctcgagcgtagccaaaataaggttgggaggctcccggcctgtctgctgtggtctgagctggctgcaagcccaggtgggggagcgagtctgggaagattggctttgactctctgttgccggaggagatgccatcccagcacggcccccactgtagtccaggctcgtggtggcagcgggggcaaggggaggggcaaggctgcccccaccccacgcaccaagtcacgccaagtctcagcaggtaaaagcacgtgagcctagggcgagcggagggagtcctggtggccccgcaggtcaggagggaaagcagggctcagagggcatcgtggccccagggcagggtcctacctgggggtcaggagcaccttggtcttgatgattgattgattgattgatagaatggagctgggtctgagcctcccaggcttgagctcctgggagttcttgtgcggtgagctgggcagctcctgggtaggtccgggcaccaagcaggccctgatgtggacagagtcccatcagagggagctgatgaagaatggtccctgtaagtaagtcactaggttcaacaactgcctggccgagcactcagcccgtggagctcaggccaacaccagagccccggttttaggggccaggagagcaggtgaccaattatttggggagtcttgggtagaatttccgccacacattctccccagggctgcaggggtcttccgaggcagggcggtggagcaggattcaggatgtggtgggaatagagtgaggggcagtgggtgggcagacctgggcgtcagaggtcctgatgggaaaggaggcaggggctacccagagaggggggctcgtgtggcacagcccccaccgactccgccgtccccctcccctgtgagccccgggggctgtacatactctactccatccccttgtccatccctgagaccacccccgccgcccttgcgtcgacttagcaaccacctcataggcccacccacctcgggatccgagccaaccatcccacatcacaaactttggtttgggggactttacgttcgtttaatttctcattttgtacggagaaatattcttttcaaaagcgtcttttgactgaagtaactttcctggtgctgttgttaactcgttcctttttttaatttattcccccaccccaggcagccctcctggttcctactcaccctccccccctcccccaccctccgtcccatctgaaccatttgtttcttttctttccgtcagattttggaaaaattctcctctcctccccgccccctccacaccatcctccccgatttaaatatagtcactgctacaagtaacagatgcactgtgaagattccagtattaataaaggtgtactgtaattaac

SEQ ID NO: 6488 - DNA, 487 bp, Homo sapiens
caggcctggcacggaggagggcccaccgagtggtcccatgaaacactaagggtcgtcacgccctcccgaggagctcaaggacctgcctgtcaggaccagggctgggcctgccaacccagggcagtgttggggccggaggctgctgtgtctgcccaagctcctctcagagtccagtccccaggcctccagcgctgtcagctgcaccctggcattctcacagagctggctgcccacccagtggggggctatagcctcagagaccactcatcctctggaatcaacctctttctaataccctcttggaaaaagagcttgcccctcctccagcacactagagctctggccttgtgtgtatatgtatacatacgtgaacacatgcctgtgtgtgtgtgtgtgtgtgtgtacttgtatgcacgtaggcaccagcacaaagatctgaatgatgcaccccacccccaccccaataaagaaataacagaaaaccctc

SEQ ID NO: 6489 - DNA, 480 bp, Homo sapiens
cacatttggaagctattgttttttcctaaataaatctctactgtatctatttcttaggaaagtcccttgacatttatctgaggaaggatatggtttctcaaggattgtgtacaatcctgagttaccatagtagcatccgttgctttcggggtgcagctctgctcagtcttcaatttgtttctgtagctactgtgaacccaatcttaaaggaggttctcatgcccagggtccacagtgaccagccagcaagtctctggtagaaaaacacccagtttttagccaaagcaaattctcctattaacacttagcaggatgaatttaatattcattcaaaaagggtgtttatatcgacactctgggctgcctctcctattcaggtattgggacatccctgttcctttctttccagcctgactgcaactcacatttcaaaacatcttctttttatgcattaataaaagagccacatttatcttcagc

SEQ ID NO: 6490 - DNA, 1308 bp, Homo sapiens
acatatgctttctgagattcaactttatgatttcttataatttgcccagtatttgcatcctgttgctctattaatttaaaaaccttttattttggggaaaggccaacatttgcatcattcaaagtctcattaattctggaaaaccatccattctgatctctagggtatatacacccacaggcatagagctcttccacgtggtggaatctatgcaatgatagatattcacactctaaatatgaggtgtgtgtatgtgtatgggtggccacagccatgcttacctatgccatttagttggtcttacttaatctgcttaagatttgcatctgtgtacctttgttcagattagttttttttttccagccgatttcctcttagtggctaatgctgttagtgaattttccaactaatttcctctcattggttaatgttgttaatgaattgagagaggtaattgaggaaaggaaatgagtaaatcactgttcagcaacactgatttccgttaacacatcagttatgaatttcagggaattcatctcgccagattcttgataacatgccattcattgcccttaggtgattgaccctattttcttacatggctcaaataaaactagtatgctgttgtatgaatcttttactgaccacaccatccaactataaaaatataacgggacagctttaaaccaaagatcatgtttagaacaatgaaaaattatttgttgtatctaatacacgcctgtattgtgaaaagcttcatttagcaatgatgtaataatttttaacttccaggaaataatctgtgaatggaaagattttttaagattttgagatagtgtttagtctcatgttgggaacacatgaatgtgatgaacatagtgaatactaaagaaaacgcttcagactttcagaatgatggttcagaatttaaaatttttaatcttttctaatttctttttttcagtgtgaaaatagcactttaccaaaagattagccatgaaatggttattttgccagttacatttgatttcttttgtatctgcaatgtaatgagttattttatttcttctgtatttgcagtgtaatgagtttttgtggcaaagtgtattaagcaatttttcattatcttgaagttccacaaagtggagaatatttatattctcacatgcattttaggcacttttgatatgtgaaaatagatgtattttctgatgcatttggttaataaatattaatctgaacattttcatgttctttgctattttgaattccattatagattcatgaataaagtcattactagagaga

SEQ ID NO: 6491 - DNA, 483 bp, Homo sapiens
taatgagaaagatatagaaaactcttaaggttaatgccaaaatggatcaagtatcatcagattcatccattgaaaaacctccaagagggcatgaatatggcagagtcttcatatggaaacagtttttattctattcagtttaaatcaggaaaggatgaccagttaaagagaaacatccaaaaatagctttgttttgtaccaacaggaattagaaaatataatgaaaagatttcgttcccagcagcatcaagaaaagtagattttctagaaataaacagttatggaggacttgtatggagaaatttaagtcttcactgagggccactttacaaaggaaatttgaataaatggagagagagagaagccttgttgttggataggaaaacccgtactaaagatactctacctacattaatttatttgtttaatttttgacaacaagcatgtattacttttgaaaagatgaaaaataaagatttattt

SEQ ID NO: 6492 - DNA, 1097 bp, Homo sapiens
tagtacactccagtgaaatgtactgagtggattccgtcttctactcaggaatggaatgtgtgacacaggcctgactcagcctctgatccatccctcaagccacagttaatgattcagatgtcagtagatgaccaaagatggttcaattagagtcccaggattgcaagagctaataggaacaaatactctccccccgcccacccccattggttttaatgctgagaagaagaactagactcttacagaggtgagaatgaagtccacacagcaaaaatgcatctgagaattggagagcagtaaaagactgaagataatgtttgaacagccacatacaccatgcctgaagctaaaaatatatacgggtttttgaattgcagcagccaataaattccatttttgtttggttggttttggctttggcacacctgagttaggttttcttgccttggaacagaattttgacttaaacagtgttgtcattgtagcagttgtttgaagttttcagggataacatacctgatggagaaatgttttgtgtgtatgatatatgggaaagtctttagttatagtcatggcagctcctcaaccccatgattgtgatgagattgggaagcccactgtaacactggagagcccaggttatatcagacaccactagtagatagaagttctaacaacttgagctctgtaacaaaaatctcattgtactacaaaattatgtctgcaccagtgaatccattctcaagaaaagtcttaactaggaaactaaaagctttcactcttaaagctttcattttctgtttattcagttttttatttggaatggatgctactctaggccttaaactgagaaatgccaggctattgtagctattatatcttggtatttgccattttaattcctaggacagcacgcccgctttgcccttgacctggctagggagccaaggaaatgccatggttcttggtcataagacacactgcagagatctctcagtaggaaaacagggctggcccttttctttggtgatgaacacaaactgcaccctttttttctcccacgtgtccttccgctgccagccagtgttggaatctcc

SEQ ID NO: 6493 - DNA, 1293 bp, Homo sapiens
gcctgcatccattctcctgaggatgtgtcccatctagggaaggctggactaggccttgcggctcctcagggactcaggtggccctactgggagaggggcctcaaatgcaccatgtcaagggttcaagattgttcctgcttttccccaagtacaaccacacccacactcagatcctcctcattcacatcgcagattctcccttgctctgcgctgctagagtgactcactaattcattaatctgcctccctctcgtaagatttccttctttttttcttgaaagtaccaggtgaacaaagtttaccagaaagcagttgagacaagaaaataagagctcaggatgagggaaaagaaaaagattgagagaatttgtgcccccaaccatttcctcagactctaagaaagaacacgctctctccaggcaggtctgaagctcaactctcttattgcctcacttcaggtatacctcactttacacaatagaattataactggaaagaagttggggacacatgtatttggtgattacattttaaacacattaggaaaagttgctatttgaactttttattgatttttggggggagtaaagaattattttgtgatgcaaataaatatcctttaattgatcgacttgccaaatttagatttgtgtgcatcaggctttcttttttttctttttttagagaagttcaatataagcttttcttttctttgtttctttctttctttattttgagatggagtcttgctctgtcgcccatgctggagtgcagtggcgcgatctcggctcactgcaacctccacctcctgggttcaagcgattctcttgcctcaacctcccaagcagttgggactacaggcgtgagccaccatgcccggctaatttttgtatttttagtagagacagggtttcaccatgttagccaggctggtctcaaactcctgacctcaggcaatctgcccgcctgggtctcctaaagtactgggattacaggcgtgagccacctcgcccagcggcatcaggctttcttaaagtgagagcacgcctgtactagagcaagcaggaatcagagaccttccagaaatactactgtgtaagggccagaaatatcttcacttgtcattgttatataatcattattacttttgctgtaatgttaatattgatttattaatatatattatcttttcatacattttctaagaaacatttatattgataagatcttttattttgccaagggcataaattattgtttttctttttttttttttaataaatttcaccaagt

SEQ ID NO: 6494 - DNA, 3939 bp, Homo sapiens
ctgccccactgggcacagtgtgggaggaggctgtgcagggttggggtagggacttgctagaggcattctgcctctacatttctttttgtttgttcgttttttttttgtttgtttgttttgagacggagtcttgctcagtcgctcaggctggagtgcaatggtggggtctcgggtcactgcagcctctgtccctgggttcaagccattctcctgtctcagcctcccgagtagctgggattacaggcacctgccattatgcccggctaagttttattttttttttttagagacggggtttcaccatgttggccaggctggtgttgaactcttgacctcaggtgatccaccctcctctgcctcccaaagtgctgtgattacaggcctcagccaccatgcccagccctgcgtctacatttctaaaccatagctgtgtggggttgaactcggagccaaaaagtgtgagagccatcaggggctggctctggataaactggtagccactatcagtgttaagtttcacatttaacctgcattggaattcccaggggtactgggaagaaagcagctgttctgtatcagtcctaccacctgccattaaccctttctctcctaggatcattttgagaatttgcctgcctgggcaggaaagggactatttctgtggaggaaaaaagtgaagattgattctctttactagttgctgctgatggatctctgtgacagagaaatcaccttatctcagactaatggggtgtgatgtgactagtcacatggcttttcattcttctctacgagaatacagcctatcaaaatgatgtctgttggaaatgtagaaccaatcaaacagataatttatgtatgtaatgtaatgagagcacttttcattgactgtgaactttttatttttgaatctgcactcgagccaatcttcttagaggcagcccggcaccttcatccataggcagagagagaactgggtgttggagacttattcgagggtataggaagggccctgtgaagttgatttaacttttggatgtcagactgtgaaagctcctgagaaacttggggtaataggatcttcttttggggatgaaaatggggaaggcgtgaggacctagactacttctccctagatcagaaaaagagaattaccccttgacaaatatgatacctgctaggtatttcccagggaaatttagggattggcgtctttccctagcatgtggaggaattggcagacagcttcctaagggcggggagcgggggcccaaggctgacactgcttgcatccacgtgaccttaagttatggcagatgactctgaaacggactgaggccaatgagaacagatggatggagcactcaggttagacttgttccttctcctatgctggaggagagggatggttctctagaatgttggaggtgagttgagagctcgcctcttgaatgttgaacagtgtactcttctgaaaactgcatattcactttatgtggtttcagaatactgggctcaatactaacataagaaagacacttcattgagaaattcttaagcttacagaaaacctatactctttgcacattccacataaccctagcaaaatgcagtttcttcatacttctgtcactttttccattggaagatttgcttaggaaaattaattcctatttattcccacaaaatgttggcattgcttgattttacccaatggggaatgtgctttgaatttttggaacacttttacaattaaaaataaagtagggccatttttaatttgtttcatcagaaactatgttaaagagagggttaaatataaatatattttcgtgtgtatttttgggaagatttttgttcaaagcaatagtcaaaatcagatgacctgtccataataattatgtgtcttcatcttctcagaggccccatgctcatatgcacgtgtcattgggatacactcttgggggatttggtacactctaatggatgtctaatgttcaacccctcgagaatctgaacttgagtccccagattgtcaaactactggtcagctattgagaattttagaactcaggtctttgatttgaagtagggaacatagtggctcacacagagtttaggtgctgttagaaagatgggaacaagagtgttttgccaccttatttttatatgggaaattttttttaatgaagaaaaaatgaaaatgaaataacaggatgatagtgatgagtgatgtaaaacatcttacttagatggcagaaccttcgggttgtagaatagtgatgtctaaaaattaaagttattttgggaatacaccactttaatagtatagtcttataaaaattattcattatggtgaacccttcttgtctgctattcgtttcccaacctacttattggaaccacctcaaaacccagttctgaaatgaccttaccaaaagtaaatgtatttattttttagtcagcagaactctgtaattccaaatgttgttctgtgtggtagaattttttttcaggaaccattaggttgtattgaaaatctttgttataggcgataccaaaactgattattcttttttgcagtctgctttaattcatgtccttctgcagttgctctgtattaaaacagggtaaaaaggccatagcccattatgaaaaatataatacaaaactctttgacctatgaggtaacttacagacattgtgttttctaaacaggctgtcagtgaaagcccgtatctgtctccaggtgaatgtaatttacttccgagtactttacccagaggatgtgttccccaggtgggcagagtacagttgatctctagcacagacagagattctggcctctgcatattctcaggtctctgtgtgtacctcccattgagtagagaagcttaagataatttctgagagaagaacactgctgattgtgggagcagtttaggagtccatggaagaaagaaaaatacatgtgtcttggcagccatggtgtatttttgtccaaatggattggaaggatatttgaatatttgaatgttggtatgacataaagctgcagtgcactatagagtcaagtcattgaattaccactcctgatacagggctttattgtactactgtgaagtgtatgtgtgcaatacattggtgagttcatttactggtgtacggaagagccagcaggagcagcgtggtcattgctgggtgctattacagttgcttgtagtgagtgctgttttccaggagatggagccagttgggtgtggcagatctactgaatatcaaatgatgctcttcttcccatgtagaccttcagcaaaagccggtacttggaagccacaggctcaccttctctatctatccaataattattaatgaagagacctccataagggagcagctggctgttatcgataaatgtaccaattattaaataattagtctccaagccattcagtgatgtcttcagcatcactataggactgtctagtgtcactttttacttccttctgggtggaggctttccgactcccaatcatgaaggcaagttaatctttccagttagtgacttttgccccatagttggggtaagcacttcctagattgagaaaaagcagctacagtcaatcctgctctgtttgcctcatttggtgatcagtcagtcacacataagttccttgtattctaaatttcatgcacttctcccagatgctatagggttttctctcactgttgccagtggatgtcatccagacagtgggctcatatcttacggttttgtgcaatcattgtcgtattgtagtcttaagactcattatagtgtatttttgatatttttgaaatgtgttaaattttttaattcaataatatgagccagagcatgttgcagcaaatctattgtttgtaaaaataacaataacaataataaataaaataaagtgg

SEQ ID NO: 6495 - DNA, 4054 bp, Homo sapiens
gggtttggcaccattctcattctttatcccactcaatcaaaggaactctgggaaggaggttgtgattgctggcaagtcccccccaactgtaccacgggcatgaggagctgaagagaactgctgaggaggattttcctaaagttactgctgaccttgaagcattgttaaagactaatgtcctctcctccactgttgaggctggctgcttctggaggctactttgcactcttcctcttctcctttttccgcacttctccacccctcccacatttacagccagaatcaacattccctgggcccctgaggaaataagcagctggtctggaggagaggactgcaatccatggcgaaaaaacactcactttgtctctgcagcaaagagttgccccttctttctactgttgtttctctgtggactgggcaaggtggggtatttattcctcactagctgggttaccatcttcaggcacttttaacatctggcattcggaatggaaatgtaataatggacattagggagccctgcctttttctactggttcccccaatgtttgaaagaggcattaggctcctggtagccttttctgtgcattgctgtatacacacagacacacacatgtatgtttgttaccaagaactggtcagaccttgcgagtttatttgtaaacactggacagatggagttaaaaagagcttttgttgagatttggcatgaaggatatggtgctctatttgtaatagaaacttccaaggctcttccagctcccctttctcgccattctttagctgtagtcatgaatagtctccatgattttcaaaattgattccctttaaagtgcaaaatggtcaccttctaaaagatatattcatagttattaatgaccctattcccaccacaaattttaaagtgctcctaagcccataacttgcctgtttgaactatggtaatgggtggaagaggagttcaccagtttcaaagatcagactctgtatcaaaagtacctttgcccttaggaagagtgagtattggagtcatcttatctattactccaaacctccctttttatttcttgagcctggcttggaccttggcattccgtttgaattccttctaactggaacatttgtgttgtatctgtaacactggcactgaaataaagaccacacggttaaagaaatctttccatattgtactttatggtgttggagtgaagccttgtagcttccatacccctatgtcagaggaggtcttacggacaccatagggtaggaatagcctttcctcagtctgagaaattggtctcttttaaaagacgaatctcatgaatattcacatcaaagacttgagctttttaaactagtgagagtgccaagtgctttttagaaaggacccatatgttatcaaactttgaaattgagttgctggaatgaagtagaggtgactctctctgtggtacacattgaatgtactatgtatgttcaagtattcaggcgccatgtcttatatactgaagaaagaaaaagtgaggcccaccttgctcttacaatgtttgcaattgttactgtattgaatacagtataatgactactatggcttcaatcttaaacctggaaacaaatatccctttttttccccttcatttcaccaagcctttacttaaaatcttcagtgtcttgtcaaatctagctctgtatcagatgctggaatattcctaacatttgacaaactggagttgaactaaaggctccacgggaaagtttctggtcttactagtgtgtatgagcaagatctgctaaaacttactccactgggtaaatggttgactgagtcaagaacaggataatatctcctgcatagttttcagtaatgtaagtgtggactagtgcatatttcagacaactgctctgcctgtgcaatgaaaaatagcctttaagggtttctttgcagactgatttcattggatggatacttaatgctgtgaaacatgataggattaacataatgttggtggatttcttgaatagaatttgtcttaacattcctctttgtgtagaggctttattttctctcttatatttgtagctaaccagctcaggtttttttatttgaactgggttgaatctctgaagaaatctgttcaagaccatgctataagacactgtcagctaatggagctgggaagggtctactctgctgacagagcatttccttgggtgatcatagtttcgaggtagagtttatgatcattcatagctttgtctagaaggagtaaaatatcatggccttaacacaaagggtgctgcgtagaatatgaattgattttggaatcagaacacaagcaccatactgaaggactagcagccaaataactgcctaggatactgatggttgtgaagactgtttcaaatgattggatctttgaaagcttcagcgtgccttagtttctaggatcagaattagttttcctctcacttggccttgcagctaaatggagaaatgtttcaatttctttgaatacttgcacatttcaataattcctttcccgagtataaccactcaagggggagcaaatttggatggatttacgacttcacaggcattgtgaggaaagagcattttccaaggctgttttgataaccctggggtgataagcagtgagccctcacacacttactttgacaatttcacatgcacttgtacttcattatttccctcttcaagagtcgtttctattctagtttctgccccatcccggggaatcctaaaggagaattaattcatctaagtaatctcaaaaaactgtaggaagggtgctctccctgagaagcttctcccacagtgctttggtgctgttaccttgaggtggtttggacagtcacggaagttttaggctgtgcatagtgatcatctgttaattttaaggtctttatcatttaaagaaacattcctcagtgtaacatttgggaggggattctttcctcttgctagtttaaaggtgtgatttgtactccttgtttgtcccattcatatatgaaaatagacttttaaaactgtccaacactaatggtttatataacatgcttcccattttttttatgtcgtagaaattggaagttagggagtactgctttcaaggttcaacttcattatcttctgcattggaaaatatttgggccatgagaactaggggaaaggagtttgaatgtgtctatttttttctagtgaatgtattttaaccacagtgtcctaaactgagaaaactagagaggaaaaagtgggtgttcatgaactttgtagttgggagagtggttttacatgtctgtgtattcatgactttgggagtgggtaggatcattggagagagaattgcacagaaagtcctgaagtttaaaacacttttgaccagctttggctcgggagagtggggctgcttgtagaactggaagtgaataactttttcaagcaatatcagtgagtgggtcccatcgacagggttccaggacctggaacactttaacagaaggaaatgccgaagcagcttgcacagttgctttacagacttccaagaggctgattctggcttcaagatggagccttggagttggtttttttttttttttttttcttccctcaaagaacctgcggttgcgctttgtgtgttttgtttttgttttccatttgggggccccatgggaaagagcttctgaactctttcctttatgaactcccactgtgttcctataaaggcccttttctttcttagtgttgtaagttacattttcattatgccccatcacatcttctttactgtaaaaatattaaaaagctgtttccaagtgggacagctaatgaagctctaattattgcagacatatttttgagatgtaaaaaaaaaaatttaaagttaaatgataagtcttagaggcgagtgaggaataaaatggatgtaaacatttacatgggatgcattagaattctgctgtgtgtactgtcttttggttgaaacaaattatgaacagtgactaataataaaaagtcaatacccaatgattt

SEQ ID NO: 6496 - DNA, 332 bp, Homo sapiens
accacaccctcctgcctgccctccttcccacctacctacccacccacccacacccacagccacgaggaccagtgctgctgccacccacgaggccctgtccttgctgccagaggcaggcctgggtttattgcaggtggacctgagcagcccttgcatatgggaacaggatgatggggtcaggagggacctggctcaaggcagctctggacaagggagcaggcagtccagagaactggcctccccagcccactgccacaggctgtgcttctaggactgtggggcccctgtgtggcccatgaagttgtgaagtcaaataaattaattttatcttt

SEQ ID NO: 6497 - DNA, 1778 bp, Homo sapiens
tacattaattgctgtcaaagatgaagaagaaggcacatcttgacacagtacctgaatccagctgtgctgtgtttctggagtcctttggaaacatgtgtcccagaggagaagaggtttgacttgcgtgtagaaaacccggcccctgaggaaaagaccccactggttctctgatgacctgggatgcctaactgtctactccctgcaagcctcagagcagccaagtcattggtgttcattttccccacagtgatttttgtaacttctctttctaatgtttttctttatccctttaatacagaaccctcccaaacattggctagtacaacttgatttcatcatgttcatttgatacacaagtgaactggaaagtcacttcccatagaagcaaaagtacttattttctaccctagctgggtgcatgtgtgtgcacacacacacacacacacacccccacacccctttgccggttcctcgactcatacatccctcgtgctttcccatctccagtctgtattactgtaggttctcttcaaataattaattgagcagacaagtttgttttattttggagcctttttggctctggcttttaaacattgtcctggttggctcatttaatttttttttttttttttgagaccgagtcactcttgtcacccaggctggagtgcagtggcgcgatctcggctcactgcaagctccacctcctgggttcatgccattttcctgcttcagcctcctgagtagctgggactacaggcgcccgccaccatgcccagctaattttttgtatttttatagaggcgcagtttcaccgtgttagccaagatggtctcgatctcctgacctcgtgatctgccctcctcagcctcccaggtgctgggattataggcgtgagccaccgcgcgcaccccatttaattattttttatgttataaaatttaatatggaaagtgagaatttgaaccttcaccatccaccactctattcaggtaaaacaatgaatgagccaccttagcaggagcagatttttcccagaagctgctgcctcttcctgaggcagaaaattggattactaaggctcaaaactaaaagagatgtcagcattgttggatagaaatgtcacctatatgggatttgcctgttttaataactttgtaaggaattcttgctcttctaggggtgcctggcgcaaccgtgggcaagttactgctcctctttaaacctcgtggtggttattgaaacagatttattagaaggagagggtaggtgcagagctggagagccatgggtgaggcagcttgtgacctgcctagcagccgctgaccacctctccaacagaagcctagtcctgttcagagcagcactgtcactgcaagtccagccccctttgccaggggctccattccacccctttcctgcagggaggggtgccatgagtcttgcttttggctcatacaggagagagggaaggctgccaggcactgcttgtatccctgctgataagaggagggagtcactccaggaataagacaaaaggagaggaggaggccatcacctctggcctcttccatcgtacacttcctgtctctggtttaatcatgatgcatggagctacaacagccatcttaggtccccgaggtgcccagcatcacgtaaaacatcgatatgctaagaagaacaaaaagagcccaatctctgatgttattgagctcctgcatgaactctggacctgcctgcctcagacttctgtgaaagaataaaatttctttttgcct

SEQ ID NO: 6498 - DNA, 238 bp, Homo sapiens
aatccacatctagccctgagcagcatttccacgggtgtttcttcagaggacagtgagttcccagccctccctctctcttgacctggatcagctcttacaggagtatatcacggtcccagcctattttgcaagacactaacttttgttgagttttgtccacttcctgccatggagtgagctttagaaccatactaccatctccaggcccaaactctgaaataaagacatgagcatgagc

SEQ ID NO: 6499 - DNA, 4275 bp, Homo sapiens
gctttgaagatgaacaatacaaacaaatgaatttaaatacaaaaattaataacaaaccaatttcaaaaatagactaactgcaattccaaagcttctaaccaaaaaacaaaaaaaaaaaaaaaaagaaaaaaaagaaaaagcgtgggttgttttcccatatacctatctatgccggtgattttacattcttgtctttttcttttcttttaatattaaaaaaaaaaaaaaagccctaaccctgttacattgtgtccttttgaaggtactattggtctgggaaacagaagtccgcagggcctccctaatgtctttggagcttaaaccccttgtatatttgccccttttcaataaacgccccacgctgatagcacagaggagcccggcatgcactgtatgggaaagcagtccaccttgttacagttttaaatttcttgctatcttagcattcagataccaatggcttgctaaaagaaaaaaagaaatgtaatgtctttttattctcaggtcaatcgctcacactttgttttcagaatcattgttttatatattattgttttttcagtttttttttttttttttgttccagaaaagattttttgttttgttaacttaaaaatgggcagaaagtattcaagaaaaacaatgtgaactgctttagctttctggggatttttaaggatagcttttctgctgaagccaatttcaaggggaaaagttaagcactcccactttcaaaaaaaaaaaaaaataataacccacacacacaaagagtgttgaggacttgtagcttaaaaaaaataagttttaaaaactgactttctgtatttatgatagatatgaccatttttggtgttgagtagattgttgcattggaaatgaactgaagcagtatggtagatttaaaaggaaaaaaaaaaaaaaaccttttgtgtacatttagctttttgtatggtccagctgacagctcctcatttgatgttgtcttgttcattcctagcagatgatagattgcaatccgttgattcgcctaagcttttctccccttgtcccttaattccactttctctttcttgtcccttaattccactttctctttccttctcccacctcccgtcctataatctcccacttaaggtagctgccttcatttcttagagggagctgcagaattattttataaaactaaagaaagaatttcaagggattctaggggtcattaggatcctcacagattatttttggttggggagttgaaactttttaaaggcatataattctagttacctgtgtctgttagctttgtgcatttattttttatttatccttcttttggcttttttttctttgtaccccttcttttcctccttgtttggtaggagcttcaaatattctttttttttctatactaaaggatttgtttccatttgtgtaattggctgtgtacttttcttttctaaaaaaagtttttggttagggatttggtttttggttttgtgtttgttttttctttcctctctcagaaaaaaaaatttcatgctttaaataaaatccaaagacacaccctttcactgctgatgcagaaaaaagggaaagggttcttgttacttgagaatttgtttctgatttaaacaaacaagacttagtttaataaaagaaagagaaaaacaaaagattcccaggttgttatgtgcttcttctgcaagcagagaggcaaatgttaatgacaattccatataccaaaagacacattttttacttcaaagttttgtccttgtgttaggcagtctgagcagcgagtgatccagagcgcagccaacaaagcagcagatagcagtgtacagaaagcaaaaaaggaactgtatgtgaggcacttgtttctgttaatatccatattcctgttaacacacaccctttctcatgtaaaaagaaaaataaataaatggtctgaactttgaaaactttgtgctgctaaaacatagattttggagacaaataaatagatgctttgctgtttcactttcatagctaaacatcaacagaaaccatctccccttgcccccaaagtgtgaaatccttcttcccttcgttttcttccttatgtttcaaaagggaactttgaagactgtgaatacaggttccattggtcacctttcgggcttctttccccagtgctgaagccactcatcgactttgcaaaagactggagcattccaagatctgaaaatggattttttttctttttttcttttttagccgggactattttatttttatgaatttgtttttagtttaatgaaatagtagatcctgaaatgttgtacatatttctaactaggctgatgcacagtgcaaattccttttttaattgttttttttaagtagaaatactaaagaaagaataccatctaactattcataccagtatccagttgtagcataaggtgtcaaaagcaagtacgcaaaacatttactgttttaacaagctatttccttttaacaagaaatcttgtatttcttcctgtgtttgagatgaacatttttaaattttaaagttgtacagttttttgttttccattattttatcttgtttgtaactctatgaaatatatatatatatattttttgccatttaactgttgtatgttactctgtgtctgtaccatatagaaaaaaaattgtttttgtttttggttctctatgtgatatcagttaacaatgtaacactagctttacctgtcaaattctgctaggtcttctctgaaaacgttgtttttaaaaatgatattgcttggtaatagtgcaatttctatccttttccctcccccctcaacttttaagttcttttctttataattttgctgccccctccctgatggtttgggtttttgtttttgtttttgtttttttttttcatggagctactatgccatcctccctctgtgaggcagagtgactgtcagtgttttgttatgccatgccttgagctgtgggtgtttggcgacaataaggtggttgaatagattggctgagcacacttccacccacctagtgttctcagaggggttatgtgattgtttcaacctggagtgggttgcacccttaatgctttcctctgcaactaaaccgcccacatatatgttcattgaaaaaagtaagaataattctcagcactaacccagaagtagcaaagcagtcagtgatggtgaacattagaggtcaaacatgagttagatgtttgtgggctgacagccatcgtggctatgaccagtactatttacaaagcatgaattcactacaatgctcaactgtttgtttagctttatctcacttggggaatttattcctgtctgctgcattgtaggtagctgggtaggatatatttccacttgctttttaaattagttcttcacctccattgacactcgttttttggttttctccctatagtgtgggttggtgctagacaccagtctgacccacagaatgggagttatttcatccatctttcctccatccttccaaaaaccacatatctacacaaggaaaaatttaatacatctaggaattttttttttaattacaagctatttaaagagatgaatgtggccaaagttttacacaattgaaaataaagtaaaacagacggcatgtgtttaaacctgagtttatcaggcatggcaggaagttgcaggagagagaggcagtgacccaagccagtgcacttgatgttcatggacatatattttttttaaataataaattaaaacattttaaatagaagcataaattgagttgtttgttggcgctgagatactgcccactgtgaaacaaagctttgactagttttttgtttgtttactttcttcaggggggaggggggcaagtttgggtaggaaagaaagcataaatgaacgtgaccctgaggtgaagaggtatatgaacagcctttgcaatgtacaaaaagaaaaaaaaacaaaaaacaacaaaaaaaatagagcaagtgaaaccaaaaatgatgttcttggtgtttttctataatgtagtcttgttagcttttttgttactgtaacaatgctgatctcgaactgtaccaaaatacatggagactaacaaacagaaccacatggaactttcaaactgaaaaaaaaatttgtcacaaaaactttgttgtcatagttaagttgattgtagatggtaattgaatatactcctttgaaaatatttcatcaagtatgtttcctgctcattgtgatacattaaaaaaaaaatatgagc

SEQ ID NO: 6500 - DNA, 373 bp, Homo sapiens
ggcctgaccacatggctccctcgcctgccctgggagcaccggctctgcttacctgtctgcccacctgtctggaacaagggccaggttaagaccacatgcctcatgtccaaagaggtctcagaccttgcacaatgccagaagttgggcagagagaggcagggaggccagtgagggccagggagtgagtgttagaagaagctggggcccttcgcctgcttttgattgggaagatgggcttcaattagatggcgaaggagaggacaccgccagtggtccaaaaaggctgctctcttccacctggcccagaccctgtggggcagcggagcttccctgtggcatgaaccccacggggtattaaattatgaatcagctg

SEQ ID NO: 6501 - DNA, 98 bp, Homo sapiens
cctttctgcacactccagacaaacttcccagacaagctcctttgtgcctctacgtggagagggtgtggaaagttatcacattaaaagatggaggattt

SEQ ID NO: 6502 - DNA, 2528 bp, Homo sapiens
ctgtggtctcgaaaccttgaaggcatgctgctggttagatgttgtttgctagcgcctagcagccccaagcaagatccctgtttattgtctgcagtctagaacattgggaatcatggtttgtttgcattagtatgattctaggaccctaggtcactgagacactacagattgtgtatctgttatgtccactaaaagagtaattgatgggtactttatctacattatccatttcttgggtttaaagccttcattaaccattattgtatgttggaaattcttattttctttattttctgtgtgactttctggaccttagagagtgtcctctcatcatctaggatgtgagtgggcatcaagcattttctggggaatatgacatcccatctgagttgtcctgtcacttaagtatccttgaagggactaaccatcgtcttggtactgatttgatgcaacgtagatgtaaaagagtattattcagttgaacacaagagggcactgtagaaccttgtgtccggtttatttctgaccttgaaggctgacaatcttttagtaacttgtctcatctccacacaagtgtgtgatagcacacctgggtgtgctttgtggcaataacacttgtgttccaggtgtgaagtgctgggacattggcaggcccagtgatggaagcagctagtgaacgattccctttgctaatgcctagtgcattaagttcattgctttgcgaaaggtaaggaaagaggccagttgtttgagcggtggggaagattttgttttttctagccagcttaggatctcaggattggttttatccaagctagtgctttgaagaacactatctcttgccaggaaaagatgagtgataggtcaaagcttttacttgagtctcccctagtgtcagagatcaggagaaaagacataagagaatttacaaaagctattcagactgctattgaaaacatgagaagaacttgtctcccattttgagagttcctatctaaataaagccaattcctcagactgaggggctgttcttaagtgttctttatacattccagttatccagttaaagccttccccatgtgaagctgatgtttgattccagtttcctttgatttgcctccctaaccttttctagggctcagtttgtatttctttgccttgcctcagactactttgccaacccacttccacaacagaatatgcttcaagatgtgggcaggtcagtgtcctgttcatgggagaaaatggcttaacagtctgattttctcaaatgattattgaagagttgttatcgtttttattataaaacacttctgacctgtcaattcaagagctgtttctaggatctttctctccggcaaggggttgttgcactagatttccccagagttccaagttctagttgtgccttttaatgaccctttaatattttaggacataattttttccttttttaaatttttttgtagaaatagatgtttcactacgttgtccaggctggtcttggactcctggcctcaagcaatcctcccacctcagcctcctaaagtgccaaaattataggcgtgagccactgcacccggcccctatttgaagacgtcttttgtaaaagctagcttctagaacctgagaaaagctcttttctcagaggagatactccttttgatatgttaatgattaagagtggttgcccaggcctagtttcagtggcagaataggattggaattaaaaagcagaactcatctggcttcagcagattgccaccaagaggatacaggtggtcaggtcctggctggctttgtctttgggcctgggcaggcttaggatttgactttctttgaagtacctgatgctgattgattccactaatagtaggaagcaagagacttaactatgagggacgttatgtgaatcttaagtcttaccagtccttgcattagtacattaaatttggatgttttggaagcaaattcatacgatcgtgagtgatttctccaaagaaaaaaagccttgtccagcctgaccaacatggtgaaaccccatctctactaaaaatacaaaaattaactgggtgcagtggtgcgcatgcctgtagtcccagctacttgggaggctgaggcaggagaattgcttgaaccctgggaggcagaggttgcagtgagtcgagatcgcgccactgcactccagcctcggtgacagagcaagactccatctcaaaaaaaacaaacaaacaaaaaaaaaccctgatgccattcccagtccccgttgtaggacatcacatttataaatccaggctttagtcttctgggctccaccagtctctgccccaccatattcctttgtcactacctctaagtttttttccccacttgaggatttggagttaaacgaactcaaaatgtcttgtcattgtatgtattcttgcccctgctttgaaaacagggccatgggaactctgtttatgccctgttttaatgtttctgttttatgttttactgttaatatgaaaataaagaatttgctatgt

SEQ ID NO: 6503 - DNA, 641 bp, Homo sapiens
tgtatcaaaatctaaaccaaggagtctctggacaagaagctgggagaggcacaaactggacatctctctctctcatatccttcggcattgggttatctatgggtgcaaggagtgggcacgcttctctgttacaaatagaaaacgattccagtcatacaggacacatcccactccaaatgatatttccaaaaacatacctctgacagtaactttgatagatggtttgtcaaatgtatctttctgggtatccacacctcttggcaatgaaatttgcagctcctcccttccataaatgaagtctctttccccaccatttgaatctgggctggcactgtgacttgatttgatcaatagaatgtggaagaagtgactgtatgccagttccaagcctaggtttcaagaggccttataaatgtctgttggaaccttacccagccatgaacatgttgagtgagcatgctggagaatgagagaccacatgaagcagaaacatgctttcctagctgaagtcatactagcccaaccaacatggcagctaacacatgaatgaggccaatcaagaccagaagaaccactcaagcagatcccagcccaaattgcccattcacacaatcaggagctaaataaattactgttgtctt

SEQ ID NO: 6504 - DNA, 1230 bp, Homo sapiens
caactcccaccccctccgtcctgccctcagcccggccctggccccttcccgacccccacccgccattcagaccccattaagaaggttggcttggccaggcaggatgggctgtgtccggccctgcagcctagtggaaggtgctgagggggccctgaggcaggaccgccctcctgacccctggtaggagggtcacatccacttggtggccaggtggcccttggtgacccacttcttcctggagcgtccctgcctagagctcagcccacaggactgcttcaggccgtggccacaggtagcagccgcaaggggaaatgaagaaaactgagccctcgtggccacctgtgtcacccttgtgccttagcctcatgggctgcctaggagctgcctgcacggcacagctcgctttcacagtcagaagtgggtctgtgggatctgtggtccctgtcctccctgctgtcccttctggggaggctttggtggctctgaggtggacaaagagctctcgcaagaagagacagcgtgatgcctcccacagtccaccccagaccctggggcagcccctctggccctgccagctgcctgcgtcgttgggcccagggtggctggcaggagtcccagctgcttgctttaggacctggcagcttttcttgccgtccctcccctgcctccagaatcacagcccttctccccaagggaggctgaggaggcttctccaccagtggcagccccaccccgtccctggccattcttggcctccaccccgctcaggcccctactcgggcgctcccagaaggagccacctctcagtgcctcacctccccctgcctcccagcctccgcagatgaggttcctgccccttcctcctcgtaaccaaaaccctcactgctcccaggacggtcttatttataaaccagatacatgttcttagtctggtcccagaccaaggagctggtcagacggccctttctaatcctacatgttgagcttatgtaaaaaatgttgtttcctcctgtttttggttcctttcttacccacaaaccattactacttgaaacttaaaaaactcgccaagtgtaaaggctaaagagaagcagtttgacggaccttgtgatttgtactgtttgctgcggagctatttaaagattttggaataaatatacaaaactacggttgtgaaataaaaacttaaattgtatattttgaaaaataaaacactgaaaagaaaccaac

SEQ ID NO: 6505 - DNA, 636 bp, Homo sapiens
acctacagaagttgggtattgtctgaaatcccagaggacccataagtgccggtgacaagctgtctgtcaggggagaggctccagaacctgggttcgtccccagtgagaccggaggatgatcccccaaggactgcgcagcatcagctcttggtgggcctctgccttctcttctgtttggccacctggtgtggatgtcactgtgtgaagataaggacagaagtgcagagctgcgctttgtgtgttgtctatgtcggctgagctaccaaggtggaagttttcatggagaaaagcacctggctccagggccagtgttacagtgttaccctgtaaggtgttagccttaaaccaccgagcagcgttctcttgatgccagtgcagagaccagagtcagatgcccgaggacagtgggtaggaatttcatcaacaaatggacctatggcatcatggctttagaagctggtacatttactgagctgatggacagtggccttctaaaatatgacacttaaattgtaaatatgcactgtacttaaggattcttaagatgtatttttttgttatttctcctccagctgctatcccttggctaataaaattctagtaatttgaaaaaaaaaaaaaagagagaaagttaaa

SEQ ID NO: 6506 - DNA, 495 bp, Homo sapiens
agggggtctgagcacttagcccacaagttccctgactacggagccggttctggaacttttcttcatgccacggcccctgcaaggaaatagatgctgaggcagtcttcctgccagcgagcccactgtatctgggcccaaggccagagggcccagagagaagcctgagcaccgtgttacctccctggccctctggctggccccaggagcctttggttcagtaaacgacccagggtggttcccagcaaagctgcttcctctctgctcctacgcatcctgtcctggcgggaagagagcgtctgggtccattcaagactctgatgacacccctccccgaggcctcccactgccggggtcccaggacccttcccccttcacctggtgacaggaacactcctttcctggtatggaacgtgagctcccgtgacatgatgataggtcttctccttggggcctcccccaataaatctgtaataaacctgaaacccacctacagct

SEQ ID NO: 6507 - DNA, 480 bp, Homo sapiens
gggtggtgaccccaggagggaggcaggggaggggtgcggcggtcccagctccctggctcccatgtcaagagtcgctgtgccacaggcttagggacaggaccccagctctgcgtcggtcctggtgccctggatgcccaggaatctgtatatatttatggccgggcagggtgtggggccatgcctcctcaggagccgaagcccaggggccggccagtggccttccccagcatgcaccacgggcccgggttgggtcaccagacggggctggagtgtgagggtcctgcagcctgcaggacctcgtgccaccccgagggctgagcctggtcccacgagggtgccgtgtcccctgacagggccagtgcagtttggtgtgtcctccgccttaccaggagaagaacctgaagaactatttttcgttattggttttccaatcatttgactaagagtctccatttaaataaagtttttaaaaggaagagc

SEQ ID NO: 6508 - DNA, 241 bp, Homo sapiens
tgttacgggctaaatcaagagcagcttaatcctgtttacaatgtgagctttttgtgcgtctgtgaaatgttttacagtgtttctcatcatctgtttcccagcaaggtcttttttttttctacattgaagttctgtctatgtatcttaatcacaaatggtttcattcactttacttttaaaaatttgtccttaaatgaataaataaaataaaagttggtcctgtgagaggataatgaagatg

SEQ ID NO: 6509 - DNA, 533 bp, Homo sapiens
catacatccttatgctgagatgttgaacttaaactttatggaatcctccaaaagaatacattatggagtgtagtgttttcttagttcttcaaagggaagcaacttggatgaacaggaacatgaaggacaacacatctcagccttttcttcattttgaagctcctagaattgaagacttatgtggactcctattgttctcaaccaaaacaagtcttttggctttcttttttgtagatatttgatttaagcagttttcatgtgtacctttacccaagccaagtcaacagtgtctctggggtggcatcctttgcactgaaatttacagtattctgtgagatgtcgcatattttgaagaaaccgtggaagatactggtttatttcaaatgagcagagtatgttgtattaaaatcttatctaatcttgattaaaatttggcaaactcttttctttgctacatcttagtgacaataaatgccaaataggttttggttgagtatagttttgaaaacaaatttggtgaaataaagcaggaa

SEQ ID NO: 6510 - DNA, 5516 bp, Homo sapiens
tggaggccacagttgtagcaggcgctaggcccgggaggagagtgcatggtgcagagggggctggggcgcacggagaagcaggtccctatattgaccaaggagtttgtggtacgacccctccccctccccaagtaggcaaggactgcacgtttctttctctcttgattcttggttttcctttgagtcctctggagctgccttctcatcaggtgcactcttcatggaaagcaactcttgcccctcctcctctgggcacagggtgtgcgttcagatgacttggctcctactcaagggctttcttcccctttaactctctccttctggtgacacatcctgcagcagctgagggggtgccctggcactggctgggagtggagaggcactgtggtgaaatggctccagaggtctgtacatcacatacatatgcacacaggcacacatggcaaaactcggaagtgaaaggacttgtctgaaatcacatggtgagaaggaggatgaagggaggagagagcttttgctctgggtctccagtggataggagaggacctgcctcctgggtgagaagggtcagattttcctattttaattgctttagggaagagcaagcagagtcatgaccagggacacagctgagagatagaggaggctgtgaatgctgagaccagagtttatcatgctggacaagcctggaaggaggcaataagtgggaaaggtaggaggagagaaggctggggagggctgggcagcaagccaggcacagtgagtggcagagcaagagggggaaagcaggatcagtgcctggaaggcaggtgtgcccgtcagcggggagtggaactcatcaggcttgccaagaggttggaagggaaatggctctgggctggaactgtcttcccttggtccttctggtccaggccttggaggaaagcagaggatgatccctgcctgtgagccacacctcctagctctgggggcaaaggggcttagtaaaggaatgctggatgtgtagagggtttagtcccgagctcaggaaatgagagcctataagtgcccagtacatgtttaaaagaagagctcatggaacctctggaaaggacagggaagttgagttagccacataaatgaacccaagtcacattggaacacagagctggtctgggaactgtgttggctgccaacagaacttctgaccctgttacctgtgaaatgaggcagtttccctcacgttgccatcagctaccaggagcgatgctggtggtcactagcttctgatcctcatcctgggtgtggccacagattgggggaacctggattgtggagtcacatcctccctgcaaagcaagcagggcaagggagatctggcattttctgctttacgtggagggagaacaggcacattagccttgaagctgaagctcattttaggttccttccaggtttagaagcttcaaccaaatgaaacttgaatctgtccctcgtgacaattataggaggaaggtatttaaaaccccagatttatgaatgtgtactacatggcttagagaatgtctttgttcttgttcaggtggttataacaaaataccttaagagtgggtaacttggctggatgcagtggctcatgcctgtaatcccagcactgtgggaggccgagggggatgaatcacctgaggtcaggcattcaagaacagcctggccaacatggcgaagcccctcctctactaaaaatacaaaattagcgaggcatggtcgcacatacctgtaatcccagctcctcgggaagctgaggcaggagaatcgcttgaacccaggaggcggaggttgcagtgagccaagatcacgccattgcactccagcctgggtgacagagcaagactccatctcaaaaaaaaaaaaaagactgggtaacttataaacaaatgttcttctcacaagtctggagactgggaagtccaagatcaagccaccagtgctgtctgatgagggcccactttttcaaagacagtgccttctagctgtgtcctcttatcgtagaagatgggagacagctctccagggccatttttttttttttttttttttttttgagatggagtctggctctgtcgcccaggctggagtgcagtggcacaatctcggctcactgcaacctctgcctctctctgcctcctgagttcaagcaattctcctgcctcagcctcctgaggagctgggactacagggatgcaccaccatgcccagctaatttttgtatttttgtagacactgggtttcaccatattggccaggttggtctcaaactcctgacctcaagtgatctgcccacctcagcctcccaaagtgctgagattacaggcatgagccactgtacccagtctccagggccttttaaagaatgtcactaatcccattcttgaggtctccaccttcattatctaatcacctcccaaaggctccacatcccaacaccatcatattgtgggttaagatttcaaccacaagccaggcgtggtggctcatgcctgtaatcccagcattttggaaggctgaggcaggtggatcacttgaggtcaggagtttgagaccagcctggccaacatggtgaaaccccatctctactaaaaataaaaaaaattagccgggtgtggtggtgcacacctgtaattccagctactcaggaggctgaggcaggagaatcccttgaatccaggaggcggacagtgcagtgagccgagataatgccactgcactccagcctggatgacagagcaagactccatctcatgcccagccagcatgcccaacaagcttcatttgcccctgtttaggtcacaaattttattgatggctgcaattaatggcctcttggtatccaagtcctttgttgtatgacccatccattctcccctgactcccaaggtgtcaggacatgcttgactggctcctgaatttgctctctgcgcatgggcagtacagtcaagcctcacagtgaacccaggtcagctttcaggacaaagaaagtggcctggctgactaggcacagtaaagccagggctgggtaggtacatacttgtgctgatcacgtatgtcttatatctctgtgagagtgcagtcccaacaggaaggtttaatcactggggactgcccaatgctgtgacagggcacagagctctgggttgctgtgggggtgactgcattgaccactgttagtggtttgctgtgttgacactctgtgctgtgtgaccatggctcctgccatcaagaagtagagtctgtttctccacctctgaatccaggctggtcctgtgacttgctttgtcctgtagacaagtgtagtgcaacttcctgtgagccagtttgaagcataggccttggaagcaaaactttacctccacctgtcttaggttttcagctggggctctgctgtgatttgattgtgtctcccaaagttggaaccttgatccccagtgttgtgaggtgaggcttgatggaaagtaaattacgccgtgcgggttatgcccttgtgaatgggtagagaacattatttctgggcgcaggcatggtagctcatgtctgtaatcccagcattttgggaggttgaggtgtgcggattacttgaggtcaggagtttgagaccagcctggccaacaaggtaaaacaccatttctagttaaaatacaaaaattagccaggtgtggtggcacatgcctgtaaggccagctacttgggaggctgagacaggagaatcgcttgaacccaggaggcagagattgcagtgagctgagatcgcaccactgtactccagcctgggcaacaaagcgagagtctgtcttaaaaaaaaccaccattatttcaggagtgagttggttatcctgagagtggtgccttttaaatgaaggagttcattctttgtctttctctcgccctcactttgcccttctgccatatgatgccttccatcatgctaggacacagcaagaaggctctcgctagatgctggctccttgatcttgggcttcccagcctccagaactgtaagccaatacacttctatttattatatatgacccttgctgggttcagtggctcacgcctgtaatcccaatactttgcaaggctgaggcaggaggatcacttgagaccaggcactcaagaccagcctgggcaacatagtgagaccccatctctacaaagttaaaaaaaaattagcagggcatggtgtcgtgcacctgtagtcctagctacttgggaggctgagttgggaggactgcttgaccctgggaggttgaggctacattgaaccatgatcatgccagtgcactccagcctgagtgacagagcaagacacctatctctaaataaatgaccccatctgtggtattgttatagcaaaacaaaacagattaagagagactttttaatgaaaagacagattcacaaagaaaaacaatgtttttgtttctgtttttttgaggcagagtcttgctcttgtcccccaggctggagtgcagtggcgccatcttggctcactgcaacctccgcctcccagtttcaagcgattctcctgcctcagcctcccgagtagctgggattacagatgtacaccaccacgcccggctaattttttttgtatttttagtagagatggggtttcaccatgtcgatcaggctgggctggaactcctgacctcaggtgatccacctgccttggcctcccaatgtgctaggattacaggcatgagccactgtacctggcgaaaaacagtttgttaacacaggcagccaacatcactcaggataagcctcaatgaaaagtaacaaagtgatggcttggaacactgtcttacacagcatttttaaaaaatacaataaatttgtagagataggatgaccaaggacaacagttttaggcttccaaaggtggtaaactatgggatggtaaatatccgagaggaagctgatgcaacaggatttgtctgcagcagcctctggtaccacctctgagtcaagggttgtgtccagtgatggagagtttatatcgtgcctttaggcagaaaaggggagggaaacctgaacttttcctgcactttctgcttcttaattgccttcagctgaaaatcattttttatgtgaaaaaggcatagtctgagctgacgcctctgctttcctccacctgaagagaacctgcgtgctgctcctttgcttcggacctccgcctctgcccgggagaaagcccaggccagcctgctggacaagcagagaccatgagaaggagagttcaggggtcccaaaccaggccatcctagaccagccagctccagctgatccgcacgcagccacttcggctaccttctactggccaaagggagtcccagggctcacccagattcagaggtggggaaactgagtccaccacttgagaagagtagctataaagacatatgagcgaggccagctgagcccagcactgcggccaagtcgaagactttaggagcaataaaagtgcttattgtgtttcagtc

SEQ ID NO: 6511 - DNA, 617 bp, Homo sapiens
gaactctgggccttagagcaggccccgaactgtggtcgccaggcccaggaggcgactgcatggtggagagggagctggggcgcatggggaagcaggtccctactatcaaccgggagtttggggtcctcccctgaagtaggcaaggactgcacgtttctttctctcctgattctcggttttcctttgagtcttctggagctgccttctcatcaggtgcactcttcatggaaagcaactcttgcccctacctcttctgggcgcagggagtaagttactgctaaattaaattaaatgtgtgccaggccgggtgcggtggctcatgcctgtaatcccagcattttgagaggctgaggcgggtggatcacctgaggtcaggagttcgaaaccagcctggccaacatagtgaaaccccctctctactaaaaatgcaaaaattagtccggcgtggtggcacactcctgtaatcccagctacttaggaggctgaggtgggagaatcacttggactccagaggtggaggttgcagtaagctgagatcatgccactgcaccctagcttgggtggcagagcaagactctatcaaaaaaataagtaataaatttgttcaaaagtcctgc

SEQ ID NO: 6512 - DNA, 1116 bp, Homo sapiens
gaaggaaatgtttgctctggtagcaggacccttcatcctgaactgccttcctccacgcaggacaagtcttagcttttttggtagttaaatcagggaacattctttctgagctttgcatctctgttgtgtaatacagatggaatctggaacttagagcaagctatacttgattgaagtagctctctgctaaaatggcatctcactaatgacctcactatctgacttccattgtgttttattgcttctctaaaatatgaaatcagagtttggaacatgatgctttgaaagtactctgcagcagctctgttttatgggttcctacattgattcagcaaatatttattgagctgaaatgatgtttgacgctctgcaagttttacagctttgcctagcatagcgaatatatattttgtattcccagcctttctttcttcagggagccattcttttcccattcttcagtgatcctgctctgtgcctcagacttggctgaagctaaccttactccctggctctaggaatagcctgtgagccagccctggactgccctggacttgttctcagaggtatcaggaaaggctttctgttttgatctggagctgtaagggtcacataatcatgggactgccggtggccatcttttcctactacctagagaaagccagcaaagaatgaaggcaacaaaggaaacagccaagagaatcaaagatctagtaacactgtttagatgtctcaattatgtgagacagattcctgttgttattttgattaagcctgtttgtgttggttttctgacttacaattgaaagagttctgtccaaaaagccaaaaggtggccaggcttggtggctcaggcctgtaatcccagcactttgggaagcccaggcaggcagatcacttgaggtcaggagttcaagaccagcctggccaacctggtgaaaccctgtctctactaaaaatgcaaaaactagccgggcatggtggcgcacacctgtaatcctagctactcgggaggctgaggcaggagaattgcttgaacccaggaggcggaggtagtggtgagcaaagatcgtaccgctgcactccagcctgggtgatagagcaagaccctatctc

SEQ ID NO: 6513 - DNA, 162 bp, Homo sapiens
aaaataataattgcaagttgtataactcaggcgtctttgcatttctgcgaaagatcaaggtctgcaagggaattcttgtgtgctgctttccatttgacaccgcagttctgttcagccatcagaagagagacaaggaattaaaaatttctttttaatcctgtt

SEQ ID NO: 6514 - DNA, 1828 bp, Homo sapiens
tcttggtgtcctccccagcaccttagggccaggggcttacctttcaacctctagagagaccagctgcctttgagaccaggagctgagcaccgagaaccatctgtgagctgccgctgtgatgaaggagcctgctctgaggaacagacaggttgccagtaggcttctagctcaattccctgaagcacgtggtactctgaagcacttgaaaatgggaagcgatgacaaatctgactttaaaaaaaatctttgatttgcactgttatatgcaagaagtggtgaatcacactgagatacgtcgatttggggagagacccccttttgaacttcaaagggttcaagggcaaagacatctgttttaaaaaggtcctttatgacttcaggtcaaagactgagactcagaactttcaaatctggatggaataccttgcctaactgttgcgtggagttcacagttcgactaaccctgtgaacacccaagccaggagttctatgagaagccaaatggtgctcgcaattgtgcttgctgctggactggcaagcttcatgttatgtttatttggtgtgcgtgtgtctttattattttgtgtaaactatattctgcttatagagagtctctgagactaaaattgacaacttgaaaagtattccaaggaatattatgaaaatagggcaacatggactgtttaagatctccatgtaattgaaattcatgcaaggaaacaactcatagaaaagataaatatggatgcccttcacatgttatcaacctcgtaacttttggtgcttgctgaatcagtccatgaaaagctacagcccgctctttgggaatgctacatacccatttctggtatttaaaaaatatctaggaggagctaaatgacaaaacacagcagtgttttgagggagaaaggaccatcatttataatgctctgtacatactaccagagctgcttggaaaattaaaggccacttgtggctttttcctaccaactgatacgtttaaatttgccctaggattgagctaacagcaaaaaaaaaaaaaaaaaaaagagagaaagaaaggagtaaacagtggtaataaaaaaatccatctgtcttcttgctatgttaatattaataaatcataatatgacaagaccctcactgaataagagtattttcagtcatcagaagccagctgttggtaggcattaatgagtttaaaattgttctcaattgaaaaaacatcacactattttgccaaaaccaaagtaattataatactgtgtcctcctgtaattttttgagaagtggttataaagggcatatttacataaattctactttattcctcaacttctttgatgaatgtaacccaattttacttctttaaaaagtctcaattcaagctggattagccagctcagcataatcaactagacagtggtttgttaaatttagcagcatacttcgttcccattctaattaaagtcatgagttcttgaatcccagagaaataatgcttaggaacttctctcaatctgcttggcttggcctagagaagtggccattttatcaacaggaaaaaaaaaaattttctctactacaaccccgttgccttctgaaaaacagcaagttatttctttatataattatcattttattattttatggaaaattaatttattaattaatagcctattatgtgttctcacttgcttctctaagtaatattttgagataaaatgttgaataaaaccatggattatagagaaaagtcaaaatatatgtgtaatatttaattattttataagttttataataaagtattccatttctttatctttga

SEQ ID NO: 6515 - DNA, 4447 bp, Homo sapiens
gtctgacacgcgattccagctagccaccctgataagtgctccgcgggggtccggctcgggtgtgggcttgctagttctagagccatgctcgccaccacctcaccacccccacccccaccgagtttggcccccttggccccctacacacacacaaacccgcacgcacacaccacacacacacacacacacacacacacaccccacaccctgctcgagtttgtggtggtggtggctgttttaaactggggagggaatgggtgtctggctcatggattgccaatctgaaattctccataacttgctagcttgttttttttttttttttacacccccccgccccacccccggacttgcacaatgttcaatgatctcagcagagttcttcatgtgaaacgttgatcacctttgaagcctgcatcattcacatattttttcttcttcttccccttcagttcatgaactggtgttcattttctgtgtgtgtgtgtgttttattttgtttggatttttttttttaattttacttttagagcttgctgtgttgcccaccttttttccaacctccaccctcactccttctcaacccatctcttccgagatgaaagaaaaaaaaaagcaaagtttttttttcttctcctgagttcttcatgtgagattgagcttgcaaaggaaaaaaaaatgtgaaatgttatagacttgcagcgtgccgagttccatcgggttttttttttagcattgttatgctaaaatagagaaaaaaatcctcatgaaccttccacaatcaagcctgcatcaaccttctgggtgtgacttgtgagttttggccttgtgatgccaaatctgagagtttagtctgccattaaaaaaactcattctcatctcatgcattattatgcttgctactttgtcttagcaacaatgaactataactgtttcaaagactttatggaaaagagacattatattaataaaaaaaaaaagcctgcatgctggacatgtatggtataattattttttcctttttttttccttttggcttggaaatggacgttcgaagacttatagcatggcattcatacttttgttttattgcctcatgacttttttgagtttagaacaaaacagtgcaaccgtagagccttcttcccatgaaattttgcatctgctccaaaactgctttgagttactcagaacttcaacctcccaatgcactgaaggcattccttgtcaaagataccagaatgggttacacatttaacctggcaaacattgaagaactcttaatgttttctttttaataagaatgacgccccactttggggactaaaattgtgctattgccgagaagcagtctaaaatttattttttaaaaagagaaactgccccattatttttggtttgttttatttttattttatattttttggcttttggtcattgtcaaatgtggaatgctctgggtttctagtatataatttaattctagtttttataatctgttagcccagttaaaatgtatgctacagataaaggaatgttatagataaatttgaaagagttaggtctgtttagctgtagattttttaaacgattgatgcactaaattgtttactattgtgatgttaaggggggtagagtttgcaaggggactgtttaaaaaaagtagcttatacagcatgtgcttgcaacttaaatataagttgggtatgtgtagtctttgctataccactgactgtattgaaaaccaaagtattaagaggggaaacgcccctgtttatatctgtaggggtattttacattcaaaaatgtatgtttttttttcttttcaaaattaaagtatttgggactgaattgcactaagatataacctgcaagcatataatacaaaaaaaaattgcaaaactgtttagaacgctaataaaatttatgcagttataaaaatggcattactgcacagttttaagatgatgcagatttttttacagttgtattgtggtgcagaactggattttctgtaacttaaaaaaaaatccacagttttaaaggcaataatcagtaaatgttattttcagggactgacatcctgtctttaaaaagaaatgaaaagtaaatcttaccacaataaatataaaaaaatcttgtcagttacttttcttttacatattttgctgtgcaaaattgttttatatcttgagttactaactaaccacgcgtgttgttcctatgtgcttttctttcattttcaattctggttatatcaagaaaagaataatctacaataataaacggcatttttttttgattctgtactcagtttcttagtgtacagtttaactgggcccaacaacctcgttaaaagtgtaaaatgcatccttttctccagtggaaggattcctggaggaatagggagacagtaattcagggtgaaattataggctgttttttgaagtgaggaggctggccccatatactgattagcaatatttaatatagatgtaaattatgacctcatttttttctccccaaagttttcagttttcaaatgagttgagccataattgcccttggtaggaaaaacaaaacaaaacagtggaactaggcttcctgagcatggccctacacttctgatcaggagcaaagccatccatagacagaggagccggacaaatatggcgcatcagaggtggcttgcgcacatatgcattgaacggtaaagagaaacagcgcttgccttttcactaaagttgactatttttccttcttctcttacacaccgagattttcttgttagcaaggcctgacaagatttaacataaacatgacaaatcatagttgtttgttttgttttgcttttctctttaacactgaagatcatttgtcttaaataggaaaaagaaaatccactccttacttccatatttccaagtacatatctggtttaaactatgttatcaaatcatatttcaccgtgaatattcagtggagaacttctctacctggatgagctagtaatgatttcagatcatgctatccccagaaataaaagcaaaaaataatacctgtgtggaatataggctgtgctttgatttactggtatttaccccaaaataggctgtgtatgggggctgacttaaagatcccttggaaagactcaaaactaccttcactagtaggactcctaagcgctgacctatttttaaatgacacaaattcatgaaactaatgttacaaattcatgcagtttgcactcttagtcatcttcccctagcacaccaatagaatgttagacaaagccagcactgttttgaaaatacagccaaacacgatgacttttgttttgttttctgccgttcttaaaagaaaaaaagataatattgcaactctgactgaaagacttatttttaagaaaacaggttgtgtttggtgctgctaagttctggccagtttatcatctggccttcctgcctattttttacaaaacacgaagacagtgtgtaacctcgacattttgaccttcctttatgtgctagtttagacaggctcctgaatccacacttaattttgcttaacaaaagtcttaatagtaaacctcccctcatgagcttgaagtcaagtgttcttgacttcagatatttctttcctttttttttttttttcctcatcacaactaagagatacacaaactctgaagaagcagaaatggagagaatgcttttaacaaaaaagcatctgatgaaagattttaggcaaacattctcaaaataagagtgatattctggatgtagttattgcagttatctcatgacaaatgaggcctggattggaaggaaaatatagttgtgtagaattaagcattttgataggaatctacaaggtagttgaatataataagcaggtttgggcccccaaactttagaaaatcaaatgcaaaggtgctggcaaaaatgaggtttgagtggctggctgtaagagaaggttaactcctagtaaaaggcatttttagaaataacaattactgaaaactttgaagtatagtgggagtagcaaacaaatacatgttttttttttcttacaaagaactcctaaatcctgagtaagtgccattcattacaataagtctctaaatttaaaaaaaaaaaaatcatatgaggaaatctagctttcccctttacgctgcgtttgatctttgtctaaatagtgttaaaattcctttcattccaattacagaactgagcccactcgcaagttggagccatcagtgggatacgccacattttggaagccccagcatcgtgtacttaccagtgtgttcacaaaatgaaatttgtgtgagagctgtacattaaaaaaaatcatcattattattattatttgcagtcatggagaaccacctacccctgacttctgtttagtctcctttttaaataaaaattactgtgttagagaa

SEQ ID NO: 6516 - DNA, 607 bp, Homo sapiens
ggggccccagctcacgggcccccaacttccagctctgccctgtgtttcggaaaccagagcacagtgtctgccccggccaaggagtttgtcaaggtgtctctttatacgtagggttgtgtccatttcctcgtgtcctttggttgctcctccttggtttgattttgtgtaatggatggaaaacgcagcatacttggcctcccccacctccctgcccttcctggccagagagctgtccaaggctgtatcttcccagggctccgccaagcaccgctgtcctttccccacttgctgaaatgcaccatgacggtccaggaaggggaagaccactttcacattcttctgactcaggctgtgtctacacagtgcctctgacttggagacttggccatcatggctctctctggttgtatttagatcgggtgtcagaggacgaccaatcttagggaatttccagaccaatgagcaaaatgattgtgcacacctggcctcagtctcctttccgacgcaaatctgtgtgactattagggcttggtcttaaaacccaattgagtgatttgcaaacccagatattgtacatttagaaatgttttgttaaatatatattttt

SEQ ID NO: 6517 - DNA, 289 bp, Homo sapiens
attgtattttcactcgatgccttggctgagagaagacctaaagactctgggttgatacctgaaagaatcctgtcttatttggtctccataatcctttgaatggaaagtgacctgtgagagattgaaccatggagaaatatgaaaaccctggattctgagtatttgttgggcagggcgtttagtactgtctcccctttaccagcaaacctgacttcaccatgtttattccctttgcctacaaccagttaatatctgagtaacttatctccttcaataaaataatttaaat

SEQ ID NO: 6518 - DNA, 181 bp, Homo sapiens
gcggttgcggtagaacccctgggaataagcaccgtttgagatgcagccatcctttctctttcttctctctcatttcccacccaccccccactctctctttctctcctccccgtcagtctgtctttactcttcttttcctccattttttttttgtagtacaactgaagaaaactgaacctca

SEQ ID NO: 6519 - DNA, 540 bp, Homo sapiens
aaatggaactcctaaataaactagtatgaaataacgcaagccagcagagttgtcttaaattagtggtggatagaagacttagaatagaaacttttagtattaccgatggggaaaaaaaaactactgttaacactgctaatgaaagaaaatgccctttaactttctaatgattatagataaatataatatgcgtctttttcacaatatcctatgatttttagactaggctctagtgttcagaattcatgaaattatccatggtaaaaactagttataaaaattacataattcaaagataacattgttattcttaagccttatataatattgtaacttgcatgtatccatacctggatttgggatgaaatacttaatgatctttccattggaaataactggaagtgaagaggttttgttgcttgtacagtgtcagatgaggaacaccactatcttaattttgcgatacactgcatttgctggtgctatttttatacagtgaagcaacagctttgcagcaaaataataaaatacttcttcgtt

SEQ ID NO: 6520 - DNA, 244 bp, Homo sapiens
gctgttcgtccacacgccaccatctaccagtggggacgcccagggcctcgggcgtacgcttaccagcgactctatagtctctctaggtcatagctttcatgtccattgaagaattaccaagcccagcaagtaaaaaaaattacaataacagagatatatgtaaaattgccaatactatgagagcttctttgttcaaatgtatttcctcttattataaataaaacaaatattacatggagtttgg

SEQ ID NO: 6521 - DNA, 1464 bp, Homo sapiens
aggaggggccagaaataaggtgatcacagttggctgagatggttctcaagaaacatgggttttaaaatgtgtacagtgatatctggtgccaaacattggctcttcaaattgctacttaagaataggttcttggattgaatctttatgtcttatttccttgcactaatccagatgggaatgaaaaagcagaagcagagattagtttgaaatttgatttgttatgtgcttctgttttaggtgggtacaatagaagtcagtttggagccatagaagtaggcttagttgagttggagatgcccatcttgaatttctgagagggcaagatatacttatttccattttatgcagtctgcatctacctaaaacctctgactgatgtgggaatggcgaaacactatcaggcttgaatgcgtgtgaaaaacaccaaattggcccagatccctaacagagcaatcctcgaggggatggtggctattgctggagaggcattagctattcacagggtacgttttaggtgttaacttttgccctttatgatatcagggcattatgcctatgtgaacacatggtaatgtttgatgtttaggcctttattctacctcataggattcttttgaggattaaattcaagcatacaaagcgctcctcaacacacatagccattctttttatcagaattgtcatggtacattccttatgagggctttcttcctcagtgttctctttagagggctattgctactggactttctgcaatgtctttgggtgtgccctcagagcctgcaacaagtgtatttggatatactctatttgtaaagtttaggcctctaagaaggccacaatgaagcaactaaaaatctgatgattaagggagtcaatcaagctgatgccatttttagtttaaaaatgaagcagagctctaaactcatagatgggttttcttactgggaagaagattggctctctgaagacagcttccaatgaggaatgtattgaacaatggcagcactgtctggccacccacaaactgttacagatgatccagttacactgttgcataggaacccaagtggaaagaagacagagtccatgtctgtccatggctccagctacagaaaggatagtatgggaacattacaagggggatacattactgtggaaagttctgctagagttagtcttgagagtatctgtaaaatacaaatagatgagcaatccctgtggaatgctgcctggatattttcagaaaagctctgaacttgatgtcataataccaacaccgtgaatatcgtgtgtggccttaaccaaggaacagaagccctttagaacttagcttcctcacttgggagctgggactgactgcatttgccctttgtataaacccacccaccccatagggttcactgggagcataaagcaagatgtggtgaaagtacttctaatataaattgcaacatcagtatg

SEQ ID NO: 6522 - DNA, 568 bp, Homo sapiens
gatggatgccttaagcgatggcccaggggtgcttggtggaagtcagcagggcatctggagctcatcccaatggtgtctctatagttattaatactgtaacgtttacttgtaaagagattatcattttagaaacatgctgtttttgaaacagatgtgtgatggatgttgtacatcctttgcttcttggtattcattcagagtggatttttagcccctgatctacaaatgtacattgttacagggctgcttcctaaagattttttttacctcaggtttctcttaatatagttctccagtcactgaccttgaattgacttacataaactactgccaatgtttaaattgcccttatgtttatatttattatgtcaagccaattcgtacatacaatttggaatcaaatgtcataagaatttattatataaatttatcaagaataaaaatgcctctccagccttaagtatttacatgctcccaggtcattgtcagtttatggtattatgttgttttatttaaagcattgaattgatagaaaaatttgctctgtaataaaaatctactttcacat

SEQ ID NO: 6523 - DNA, 683 bp, Homo sapiens
ccggcagcctggctgaccgtgagggccagagagagccttcacggacggcgctggtgggtgagccgagctgtggtggcggctggtttaaaagggatccagtttccagctgcaggtttgttagagtctgttctacatgggcctgccctcctgtgatgggcagaggctcctggtacatcgagaagattcctgtggatcccgtcaggagggacttagtggctctgccgccagtgagacttcccgccggcagctgtgcgcaccaaagactcgggagaactggaaaggctgtctggggtcttctgactgcaggggaaggatgtactttccaaacaaatgatacaaccctgaccaagctaaaagacgcttgttaaaggctattttctatatttattgttgggaaaagtcactttaaagacttgtgctatttggaagcaaagctattttttttgtcagtggaatgcagtttttttactattccatcatgaggaacaacatagattccatgatctttttaatgacagtacagactgagatttgaaggaaacatgcacaaatctgtaaaacatagaccttcgctttatttttgtaagtatcacctgccaccatgttttgtaatttgaggtcttgatttcaccattgtcggtgaagaaaattttcaataaatatgtattacccgtctgaagctt

SEQ ID NO: 6524 - DNA, 2347 bp, Homo sapiens
gtctggatggccacttgagaagttttgccaactcctgggaacctcgatattctgacatttggaaaaacacatttaatttatctcctgtgtttcattgctgattattcagcatactgttgattcgtcatttgcaaaacacacataataccgtcagagtgctgtgaaaaaccttaagggtgtgtggatggcacaggatcaataatgcctgaggctgattgacgacatctacatttcagtgctttttccctaagctgtttgaaagttacgcttttctgttgttctagagccacagcagtctaatattgaaatataatatgatttgtcaggtcttataatttcagatgttgttttttaagggaaattgaccatttcactagaggagttgtgctggtttttaaatgtgcatcaagaaagactactgaaaagtattattttgtaactaagattgctggtactattaggaaaaatctgtgtgtattgtatagctctagctgtttgactatctgtaatgaaaatgctgcacttcaactggtatttcattagagaaccgtgtgtgtgcgtgtgtgtggtgcctttgagcaactttatttatggttaccatatttttaaaaagattttttgtcagggtgacttaacatggactcttatagggtattaaaacaatctagattattccttttcatcctaaataagcctaccaaatttcatgctgttggtttgccatgaatgatattacttcctacattatatttgtgttttttcaaatctgctatggaatgaacttattcctagatttggatatgtaagagaaacctgcagtcatcttttgatttataaggcaattcttgtggataaatagtgatttctcagcctctgacccattttataactgaaatttagccctttagagcttgttatatctggttttcctacgtttttctatgtaatattattccattccagtagcattattgatagaaatagtaagtatttatggaatagtaaaatatggacaaattacgtgtgtgacatatctgtcaatataagttagaagcttattcttggtttgtgtaatgaatttatgtattgtagtgaatacctttactggtgtgaagataattatgcacaaaccctcacaatacgcgttaacattgaaacctgtgaaatgtccttagtttgggtcatataaagccaaccatttttgaggaccatgtacctagtgctttgaaaactctaagtcactatatgaatatgacaatatgtgcacatttaaaattcagagctcggcattgtgatactgatgcagaagctagtagattggttaaaagtctggacttctgtggcatttttttcgtgacgtgataatctatcataagcagacctaagcacagttttatgaacacaattttgcccatgacattgcctacaggatttccagatgtgacttgcactcagaagatcagtggtcaacttcagaagctcttccacgcttagatcatgtcttcagaacttagatgtgaaaatctacacactgggagatgctgtgagccccaaggttttgatggagtttgcttggaatcctcttgacttcatgccacattgacgtgaactttgatgtataataagcagcagcaacttcatgtgaaaatatggtcaggtagttatatgtaaggttacgtggtccagtaatgtcttagattgataaattaggtatggaatccatcagtgttacgtgatgagaataggtgaacacaccttgtcagtgatgatgtaaacttctctccttggcaggacatgggcaaacatgctgattggtgcaaatgtggtgccgagctgtccatagctgcagtgaaagatgaagagcaagaccttctctaggttttctagctttcattaaatgtatttttttccccagagctaatttgaaagttgattggaccactgtggatggggtgtcattaagaatgtgggaaataggggccgagtgcggtggctcacacctgtaatcccagcagtttggaaggccagggcaggtggatcgcttgatcccaggaggtcgagaccagcctggggaacacatcctgtctctacaaaaaatacaaaaattagccaggcagggtggtgcatgcctgtagtcccagctacttgggaggctgaggcaggagaattttttgagcccaggatgcagaggttgaagtgagccaagatcgtgccactgcactccagccttgagacagagcgagaccctgtctcaaaaaaaaaaaaagaacgtgggaaatatgaacctttgaaagttaatctgtgaattgaaagtttaacaataaaagtagttgtttgtttcctttgg

SEQ ID NO: 6525 - DNA, 1085 bp, Homo sapiens
ggacacaaggtgggctgccctcaagccccagagagcccctcatccttcctctgggaccagatgtgccttccacagttgaaacttgagaagcagagctcgccaccttctggaggccactgtgatgatgagccaagcaatttggagccaagttgaagggacagggcaacaaaatacagtagtagtttcttttgtattttgtatattcgcctgaagatcatcccgcaaggcaggctggaggtgccggtgggcctgtgttgctgggattttagtctgtgctgggaggcagggctccgctgcgcctcagctgtgggggcctcaggcaggtccctcagttctcacgccttcctgtccagtggaatgggggccaggagtgctggctcctcgtgtttggtgagggtggagtgaggcccctgcagagctgctgatgaggtgggcacagcggccgttggcagctgctgttgtgggttgctttgtcaatctctgccccggtctgatgtttcctacagggagatgccttggatccaggttcagggactaaatacacttggcagctgaagatgaattggaatggtcacgttttttaggctggacagcgtcccgccacagctactacctgacactgagctcatgcagagagatgatggctgatgttccttctcccttgggacatgggtctggcacctgtgggctgtcgatagtgccctctgagcagagggtcacggtcatgtcagtttgggggaattctctgttgtgcctcacagactcccccctttctttcctccctccccttctcattttgatgtctaaagcatcaagtccctcttcctcggagtttctctagctgcagtggaagattctgttttcctgtggggaaaatgctcacttgagattttgcagggacccgggtctgtctggtttctgatgacatagtaagagaaaggtcttttttcaggttggctggtgaaaggaattgcatgtgactcacacaaacaggagctagcccaatcatacactgactcgcgtgggtgttaaaatgtttatcatgcctaagggagacatttatgattaaaccatttatgctacat

SEQ ID NO: 6526 - DNA, 1307 bp, Homo sapiens
tggcattcacggctccatcccgcagggtgcctgggcggagatgtcttttaggggcccaagaaaatgtcttcagatcttaaaataagaagaaaaaaatgaatattatccaacatgggttatattcattattaggccatcagtcataaaagataattttccatcttttttttttttattggagtcctgcaaaggcaaaagtgcctaaggctcaccgtgaaaatcattacgtggccctcagccatgcgtggactcagtgggccacacagacacagtgtcacctctcccagctctcccgagtctgtgactacaggcaaatcacgccacctcctctctgagcctgtctcccactccgtgaaatgggtaacatcacctcgaaggtttactcacccagtgaactcaacatgtgtttactgaacaccactctgtgctaagccctagagcaggtcaaaaacataaaatccctgccttcttgagctaacattctcctgggcatccccactccattttcagatgaggaaactgaggcatgggccatttattttcctcggagctccacagtaaggatgccaatgatgcaaaggtccccggcctcagtttccctgcagtgctcagtgtctgggccagtctcactggatgggaaactcacagatgagctgatctgtaagtcactctgccccaggaggccagagtaaaaagtgctgcttgcccacaccttcgtcccctttgcagggagttacaggagaccccgagacaccctccctccactcgggagccagatggtctgagaagtgaaataagaacctagcatttggttgagagggttattggaaagcttcaaacagagaattagattgtttcctgatttaaaaaatcactcctctccagcaccgagctcccccagggctgcccatcatcttaatgtttggagcttgccttgtaatcaacagagagagaaactaaacacatacgtaagatggtgcttgctctatttggctcctaacagttgccagcccacctaagttctcttcgcttaaagatatgtcccagggcaagacaacaggatcagagaacttgccagatagaaaagacttaaatggagaaccagcccatgcctcacagacagtaggatcccagtaaatatgggttgaataaaatgtgtcttgtccaacctacaaaagtttggccctaaaaaaacccacaaaatatttggacctttaaacagcttgttttcccatggagaagatgacaatgccaatcataggcattttttcattctacagcataaaaacatgagatttaagagcctg

SEQ ID NO: 6527 - DNA, 2408 bp, Homo sapiens
ggagccgcctgagccttcctggagccaggacctggattcctctgggtagagggcaacgcctgcagcccctcttccctcccacatggtttaactgtaatagcgtaccgcacgggtcacagcctggtagtcccacatgtgccaagaagacgccctctgaagccatgtcctgactcatgggtggatctcccagaaatagatgttttttaagttttctttttttccctacagggtcaccctcaggatctctccaagaaatcttgtgtcaaattagtaactcagtcttatactttgttcttttttaccaacgaaatcctaagcagctgagacctttcagacccccgctggcattagggaattccgctggcattagggaattccgctggcattagggaattccgctggcattagggaattccgctggcattagggaattccgctggcattagggaattccgctggcattagggaattccgctggcattagggaattccgctggcattagggaattccgctggcattagcattgctgggatctcaacttctctattgaggagggggttcctcccgctggggttcatatggcctcactcaggccatccctgttagaaggtggtacctgatggtctgttctgacgggtgagggacagaggcatctggatgaaaatctcgacgctttctgggaacagcttccaatggcatgggagttctgtatttaaaagcatgaactgtgtataaaatggggaaatggaggcaggagactttgaggtaacatggtctggtggtggcatgagtcctcagaaggtatttgtaataaggttccacacccagctctctcagctgtttttaaatgaatgtgtgtgaggaacagatgggaaagttgggagatctgtctacagagaagcaaagttgtggttctcttgctaacttcaaggtgagggacattgggcaccctaagtttgggaacttggttgataaatacgtatatggtccattccataaatcagtggtgagtgactggcctgggttctagacctctgggaaccagcacctgagtcacagctgtctaggcctcggtgctggcctgggttctagatctctgggaaccagtgcctgagtcacagctgtcagtgcagccatttgcccagggctgctcccgagggggatgatgggaaattcagcagtgtagactgactttaaacaagctccggtgatcctgaaatgctgaagatcgtgtaggtgggttgtggggtcagcagagctgccatctgcccacgtctggaaaacaacacacggtgagtcaccggttggccatgagatctccccacttaaaggtgctgtgagcttgtctctaagatatatacctcttccttttgtcttttgctgtaagctttgaccttttgcagatctgatgaaaatacaacctcttattgtatagtttgccttgattataagccatagtaaatcgagctgttcgcatttttgcaggccttgcattttctactgggaggttcatcaaaccttccacttagcaatagccctgactcaggcagaatgcctcataaattagccttcgaaagaaaagtgcacgctcagacagtgtgtggaggggcaggagcgtgatgcagacaaggacttagtcatgactgattttccttagccagtttgtaatggcttatggggaacattgtgagcttcctacctgacatgttggcagaagtagaatattaggatcctcaagcatctctaccgtaagtccaaagaatttaggtccctattgtcactttgttttgcaatgttttttataaaaatgcaattaaatacctcactattaaactgccatgatgcctcagttaaaaaaaaaattaaatgtccgtcagtgtctgtgccttggtgaccattgattgctgcttctgcccaggccgctgcaaaggttaggactttgtccactcacatgctttccaccctgagcttgttctaaggagagtgcagatcacgaatgcacctgcttccaggcagtgcacttagagaaaggtcactggcccgggcttgggagcctgggggatgcagctctctctgtgggcttctcttggtgcacggttctgcctctggacactcaaacctttttagggcgtgtgcagggctggggccagtggacctgacagtaccttacctggctctgagaaactcgcaatcctagtttgcacaaatgaatagtttgttcttttgtgaaaccagaatgagaattcaggttctaaggactagaggtctccctacaaatgaagacttatcagggccctagaaagtgctaggaggaaggggttaaaaaaaaaatttgtccgcgttgcaaactattataaatgattgccacattgcaagctattattttctcccaccatattttttaatt

SEQ ID NO: 6528 - DNA, 1245 bp, Homo sapiens
ccccagcccccgccacaccaccccttgccaaagtcatctgcctgctccccgggggagaggaccgccggcctcagctactagcccaccagcccaccagggagaaaagaagccatgagaggcagcgcccgccaccctgtgtccacagcccccaccttcccgcttcccttagaaccctgccgtgtcctatctcatgacgctcatggaacctctttctttgatcttctttttcttttctccccctcttttttgttctaaagaaaagtcattttgatgcaaggtcctgcctgccatcagatccgaggtgcctcctgcagtgaccccttttcctggcatttctcttccacgcgacgaggtctgcctagtgagatctgcatgacctcacgttgctttccagagcccgggcctattttgccatctcagttttcctggaccctgcttcctgtgtaccactgaggggcagctgggccaggagctgtgcccggtgcctgcagccttcataagcacacacgtccattccctactaaggcccagacctcctggtatctgccccgggctccctcatcccacctccatccggagttgcctaagatgcatgtccagcataggcaggattgctcggtggtgagaaggttaggtccggctcagactgaataagaagagataaaatttgccttaaaacttacctggcagtggctttgctgcacggtctgaaaccacctgttcccaccctcttgaccgaaatttccttgtgacacagagaagggcaaaggtctgagcccagagttgacggagggagtatttcagggttcacttcaggggctcccaaagcgacaagatcgttagggagagaggcccagggtggggactgggaatttaaggagagctgggaacggatcccttaggttcaggaagcttctgtgtaagctgcgaggatggcttgggccgaagggttgctctgcccgccgcgctagctgtgagctgagcaaagccctgggctcacagcaccccaaaagcctgtggcttcagtcctgcgtctgcaccacacattcaaaaggatcgttttgttttgtttttaaagaaaggtgagattggcttggttcttcatgagcacatttgatatagctctttttctgtttttccttgctcatttcgttttggggaagaaatctgtactgtattgggattgtaaagaacatctctgcactcagacagtttacagaaataaatgttttttttgtttttcag

SEQ ID NO: 6529 - DNA, 1877 bp, Homo sapiens
ggcgtggctcatcagactgaaacttgctcacagacttccagttatttatttggggtctgaaggatatcaacagctcatctgtgaccaacagggcaactggaacctacacaaaccaattgcttgcagcaagcagagttttatatatttatagtcacagatggcagaggaagaggctctcagtccccacctgtacaacaacggaaaggtgtgtggccacacgaagaagccaaacgccgtggcctcctgcagagctggggcttctgtggagaatacttcgggttattacatgggttattcaaatcctgggtcctgagctgctgtttccaatcatgaagaaaaacagtgaatccagtgaacagggattctccaagcagtcatttcagggggctcctgctgaccccgccactcagcagtgcactccccggatcacagcagggcgtttacatagaaagacgttttggtctcgattagctccgatgctttgcactgaagttgcaaaagatctgtgcactgaacagtgaaggtggcttccggcacactccccgctgccccggaagagacatcctttgaccctctcagcaagtctgtgtgtgtgcgtgtctgtgcgtgtgcgcgcgtgtgtgcatgtgtgtcaaaattgccagtgttgtttaggcaatgtaacatttaccggctgtgtacagcaaacaagctattttttagaaaccgacgtttcagggaagaggggagagagccgcggggtcctgcccgtggttactatgaatgtattgctgttggaggacatctcgatccaaagaacagccgttcctgtgcggcccttcgttgccctcctgctttcattttttaaagaaatcttgagtgcttgagggccttggaactgattttttttttttgttccagccaaattagcagtgtataaatggcacctaggtaagagcagagctgcggctcggtgacttgatacttggggcagcccgatgctgtgtgtggggcaggggaggcatccttactggagaggcagggcccagccattgggcacctctgggaaggggaggggaccatgaggcagccagcccctggcaggggcgactgtgccaccgcaggcagcgctccagtcgggaatggccaggatggcgccctcttgttggagtttttggttagcttttacgttttcttctccacccacggcacaggtgataaaataggatccttggtgcggagcttaaaattatgccagaaagccaacagctcccctcgtggggccttgccttaaacttgcctggtttgtacattttttgccggacgcatcaagaagcaatctgtgacaaagtctgagggtcttcctttatgcttgccctccacactaagagaagttggcgtctccctcctgggaattgttttgcctttctgttcatctgtgaactgttttttgtttttaattactctgtaccccatccgaatcagggcttctaccactgctgatgcaaaaccacaaagggacctacctgagccaccgtcctagccaagcgagcaaacctgcagggggtttggaagtggacttggtcaccgcagaagcgtgtgcgccgttgggggaagagctgcgtcacagccagagggacaaagtgtgggtgatcctggagacgccagtttccgagattgttctgcatattcatttgcacattgttgtctgggttggacatgcgtgtgggcttcagtgtgaggcttttaatatgtatatcctgttatcaataaaacaattatccaagtggttgaatcctgtgagacttggcaagtgtgtgcaaatcaagtatacttgacttttcaacctcttctttcaatgtaacttttatatgaaataaagtaatcaattaacagtt

SEQ ID NO: 6530 - DNA, 826 bp, Homo sapiens
cgacgtagggtaagtgcaatcccaagccgtttaaaataatcccagactgcctggaggctttgttcttattttctgattcttttttctttgtctttgttggattgtgttaattcaaagaccttgtcttcaagctctgaatttccttcttctacttgttcaattctgttgctgagactttccagagcattttgcatttctgtgagtgtatccaatgtttcctgaagttttgattgtttttctttatgctatctatttcttggtccgagcccactgctcccggcggtgtgaccttgggaaagtctcctagcctctctgtgccttagagtcctcgcctgcagagtggcttagaacagtaacctccgtgtagggctgtgctgagtatcagatgaacagatctatacgaagcacagaaaacccggcctgttgcgcaacaaacacttgagacttgttgctgccattatcattactgatgttgctgtcgttttattattattattatttagagtgctcagagcaccatatggagcccaggaaaagaaggggaggagagtgaggacaactccatggaggaggcccccgtggaggacctcagggcactggggcagggaccccataagagagaactgcccacaacagtcagaagaacttagctggccttggatcctcaggtgggctctgctgtgtgccctcaggcaagccacgtgtcctctgagcctcagtttcctcatctgtacaacagggccaatatcactcacttcacaggttgctctgggggatcgctgtgcctggcatatagtaggtgttcaataaatgccctgtgactctc

SEQ ID NO: 6531 - DNA, 537 bp, Homo sapiens
agaaaggcctggtgcaggcggcttgctgggggatgtgagcgctcaggacgtgatgaggtactcgtggttctggagctctagaaacacttctgatgcatgaaaaatgtgtgatggtgcaaggaatggattcaggatgttgttggagaaacaagtttgtgattagtccttaaaacttagctccctgggacattcttcaattccacatctgtttctagaaaccagccctttttccccccacttttgagaaataaaaaagccttaggtaaataagtcattctccctagcagagccacttgggtctcctgcatggaagccatcacacttgggcaggtgttcagtgactggtaggtgtagatacagcaggagtggccatgtggtccacggctttttaccccttcttgatcctgatttcttgggctgaatttagactctctcacagaggtggctcacagagaaggatggcagatggtgcagccaacaatgctgaccggtgcttatcctctaagccctgatccacaataaaaatggacccaactc

SEQ ID NO: 6532 - DNA, 40 bp, Homo sapiens
ggaggtgtcctgggtttggctggctggctcctgctccagc

SEQ ID NO: 6533 - DNA, 1078 bp, Homo sapiens
gcaggcaccgctgtgactgggctccgggcctttccactacgttgaagaagaaaacctatttttaaatgtaaataaaatatcttgtagcctgtgtggaaagctgaccgttttaagaagtggcatgtgccttgaaagggggcagaatgttcagtcggtcgtgtttttaacacagagtctctagaagaggtgcagacatcccgtctgactgtccctgtggactctctcagttgtatgttgctataatcctccaaatcaaagctctttctgcttgtgcaagattgttcctattaaacagttttaactaaccttttataatctggagagaatactttttaaggcttttgaactatctttttttaaaaaaaaaaaaaaaagcccacatcttatactccaatgagtgtgtttgtgagtttttatcctgtttgaattttgatgtcgtccaggcgtcctgggatcagggtagacacgtggagtgctggtgctgagctgtttgagaagctctgtgtgggtgtttctgtggtcaggtaggctgggctgtgaacagcactgctccacatggtgtcggctcacagagccaccgcaactctgcccagcgggagtgacaccactgatgccacagaagcctttatcgttaggggcaaaagcagacatctctggtagcaggagctcagtgtggtgctcttcagccacgcagaaagctcacgtgcctgcagggccaggaaagggaaatgatcgtttcttttgtattaggaaaaacaagacttagacttcccgagttgtgcagagtgacgtctgtactttttatacttagaacatttggtcaagttttgtaaccaaaccttagggaattgagagggaaactttatggtacgtttaccttttttcctttttatatgaattattttgtacaaagttcagagagcggtacctttcctactgtcttttctttgactccatggaggaatttgtaacgatcggtgtgacctgaaagggtttgtgatacagcggtcactattttctcttaacacataggaaaaaagttcagacatcgctacaataaatgtgctttatttgatcc

SEQ ID NO: 6534 - DNA, 1834 bp, Homo sapiens
cctcgtggacagccacggagctcactgcagactcgccatccccgtcccctgccgctccggttccgatggcactcgagaggcctgcgtggcaagacgtgtcggagccaccgcctgagctgctcgggtctcaattcttctcagaagtcaccgctcagtgaacgcccaggccctcctgtgagtggggaagccgccctgcggttcatctcacagcgcgcagagactgcagcctcccaatcgtgcaggctcgggccttgagtcggtttctgtttctctggagggacagagcagaggggccagggactgagtgagtggctaagcaggggagggtgatgtgaaggtgatctcgagtttgccaggggtgggctgaacaggagaagatgaacaaaggatccggctctcaaaaggccctggcagggactggatgctgggtacagaagcgcgcccttgggcttcaggctcctgagctggcagcacggcagggagagctccatccatgtcgcaggagcccaggaagctcagcccctgggtaaaaagtgctcactgcagctcagatcagtcctcaggtcacatttcggggagccagcctcccctcttcccctccccagccccgctcctccctctgtggacacactccgggccctcagccagctggctgcatgaggagcagctttgtgctgtgggagagaccggctctgggagaatgggtttcatcccagcctacgtcacatttgcccagtgccttatgttttctgggtttttttcctccagttctgtttctaaaaaccagcttgagtttggctgaactgtcctttctcaacagaagcgcttttgcaattgatcccgggcaacaagtcaaaataagcttttaagtggagattttgtttttttcaaatgtatatgctttggaaattttgattttttagccagagggttttaccaagtgttctttgaagcacattacgatgcctcgagagggcggcccgtgcacgcgctttcaagaaaatgttctcgggacactcggtcttctctttgaaaggacattttctcattggttttgccgtgaaaatcctgtggagacttcgcaaagaaaacgcagccttacatttgctcattaaagacagatttccttcccaagtcgccatgaataaaatgagagagtagaaacgtctggaagcgccacacctggccctgggccctcggccctctgtgtccttggccttgcccccgcccgcacggctggtcacgtttgtcattgggcattcagctcagcgtcagaggctgactcagtccccagttcagagtagtcacctggttacactgaactcctcaccttcttttctctctttttttaaaaaatacttctttttctgaaagattcttatttttttttttttgtttacctttttcctgtggatttgctgccgttagaatagcaactccaggagaagagcaagtgagtcagccccccttctccactccctgccccaccggcagtgggcacagccctgcagacaggagcaaggacttcggggaatagacccactggggccgggagagggagaagctggattctgaccccaccactggcactcctgtgtccagccatgcctgacgcccaccccaccctcagacggcgggattaaaccaggcagtacagggttactcggggaagccagactgctgggatttcctgtcgctttagccagaataatccaggtatatggatatacagataatctgaaagagtttctcatttttatatttgtggaacatcgtgtaagaaaaactgaagagcaagtgcctgaaataaaatcccccacatgtatcagcctgc

SEQ ID NO: 6535 - DNA, 1950 bp, Homo sapiens
ccggccacatccttgccgccacatcccgggtggctctggggctctgaactctgacctgtgaatagaagcagcatgcactttggaaatccggccttttgaccagaacgcacacctcgtcggggggcccagtccagccaccccccagcactttatgtagagagtgtgacatagacctgcatatttgtcagtgccatgatggaagaagctgagcatgtcttaccaaaaacagagagaacgagcctgaatacagcagatgtaggggacagccgtgggaccgcgtgagaattgaagcggtggggttcccgcaccctgggctggctggtggttttctcgggaagcaggaccctcctgactggtgctcttcctgtgagcggatagagtgatagactgggtcgtgtgtgagacgcatgtgctccaccccactccttttgggggaagccaggcaacagtggcctctgggagggggtcaggaagaggcgaacagctcaggcagcgcaggtgtgatgggcacagtacgcagagcaagctcgggaagttggtaggatctcaggcttggggccgggactctggagtgaatccccatttctctaccggcttgcttggagtttggacagaagcatttcacctctgatctcagcttccccacctgtggagtgggtttagtgacctgagtcactagggaatgtcacctgaatgcacagcccagcccatgcacctgccccagcccctccagctttggagccaaggccatcgttccagccacttgactgtcctcgacggcctgttccagacagggcgtttgttttgtccatgccttcctccctgcacgcacacggcgtcaaaaccaagctgccggccactgtctccagaacgcaaggctccaggcccgtgtgtctgaagcagtgagtggtccacacaggtgccaggagtgcccatatgagatgacgaggaaacccctttgcaggtgaggggacagctttctagaaaagccacacctgcatctggggacacactttggaaagtgggaccctccagcctggagaccccatggactgatgcctccactgctgtgtgccccatgttgtgttaacacctgcgtgtggggaccccatctgaggtcttggctgaggttggcatctcctgaagaacagagagcacggtgtccagagctggcccttcccccagcccacagccagctccgtgcccgagtgggcgtccccagcgagccttccctctctgccgcttgtccttgtgtctgggctgctccaagtccttgtgctgggcaccctggacacgtcctgctggtgagggacctcgggaaggtgacagtctgtgtgccttggtgtggagaccaacctgaggatgtcctgggaaatgttttcctgatgaatttctccttgactggcctttaaagaacataagaattcccattgcccagcctcagtgcatttggcaaatgcttactttgcttcccagagtcagagaattggcaaaggttcctaaatggtaatctggccggcctgggagaaagactcacgagaaaagccagtggagaaagcgcccttccagggcggcagcagcgggagccacgcagaccccgaggcgcacctgctggctcttgtgtgtggccccagtttctagcggcttttgcagcattagcctacaagctttgtcactccctgccctctgtggtggtcactgtttttctctcttgccaaatgaggcagtctctgagtgacggtgactgtggccttgaagcctggaggactgttgggcatgtagactggcaccttgaagattcaccattgtttaaataaaatcaagcaaatgcttttttaccaagagcccgagcctcgctctaagggacgcagtcctagaggcgtgccctttggggcttgaagagcacactgtgggacgcacgtgcttctgattaaaggaatctcagatctc

SEQ ID NO: 6536 - DNA, 4034 bp, Homo sapiens
tatttttctctggcaacagaacgttattaagccatggagacataaggaaaattaaatacaaaactgagaagtctagttgctgttgagcttaatctttttaatccaaaggtgctttacttttcctagactggatagaaaatctagcgtagaagtgcatcaaactcgatttattgccaaaaccctagattggagcttggtgtcagaactcgcctagtgggcatctctgtggctggtgagatcggccacctccacttttggttgcagtgcagagacgccatgtctcccgaagagcattgccatcactggccctcctaggctcacacgtcaattccagggcagctacacgtggtctgaatcgagaaccgagcttggagttctccaagtggagttccacccgccggactcctgacacccctgggctagggaaaatgtcgactttgttttgttctgttcctaaagtgattagcactaatctctgggatttttaaggattgcactacagaagaatgtaccctgatgtaaatctctgcggttctgggagccaaactcctctgagaacagtcagtgcaagagactccaataatccatattgaaagagtcagcaccagcagaggctactcgacttaggacgcaacagaggttttagtatttccttccctcctccaagcacttgtagcagtttcaggtttttaatttttttctgcaaataaatctaaactacgttattaaatagaaatagtttactcgcaacaacttaatttctaagggtccaagtcccagagaatccatagtcgtcaaagctttgagagtatctttcttcccagccagtcagtggctttgagccctatcttccactacaaatgacctctcgaggggggacggcgacagcgcggctctgtgagtggctgtgaggatgctgcacgtcctcagcagagtttgcaagttgctttatctcccacgggctccccaagaacctccaaccccgaggcttatcgctagcggattcacacctgagacagacatttcaacaatgatacagtcctgtcatttatcagcaaaagattgggaattttctcctgtcaacttcttttgtattaggctgtgtattgatagttaattccgttaaaaattacttggaaaacagtgggaagtggtaggactctggaagaggccacacacccgagagctgcgagatctgtgcaagtctggttttggttaggtagtaataaaagtcctcactgtagatctctaaatttcaacccacggaaatgaaagccttttgtctgaaatttacggacttaaatcttcaaggttaaagggaattttctgctcaaataatactcttatcgaaaatgctaaagtcttcaatgttaaaatactgattggtaaaatcttgcagttgggattttgcagttggatatttattttaaaaaaaattataatattcagactattcttaaaatgggacaatcagcctcatgaaaaattgatgtaaatcagaagaataccctagaatgaggccttgtgatgtgagcgttcaatttgaagagcagttcctaacttcatagaaactaaagcagaaagttgttacattttttttatgacaggcttttagtagaattttttagttttattttagttgaattttatttctatgcaatgcagaattaacagacctcttctcctcatggtacacagtattacagtgttgaagtaatggtgatgcttattacaacagctatttaggggaatgttacgttgatctcttaaattgtaaacactacaaaatgtcaaaataatgagaactgacacaactttgccttaaagagtactagactggaccttctcatattacgtttaaggaagacttagagtgttcattgatgtttacgattttaatatttctgaaggccattacagtggcctggatatgtgctgaaagccaaacttttaaattttttggtttttttaagcaaagaaatattttaaataaatcctatttcaacactgaaattgttgaaaaccgtctcataacaaaaggaaaaaacattggaatttttgttttagtggtcagtataggggaatgaaagcgtctgttgttacccacgtaactattttgataagtattagaggttaaccttaaatccagcaaaacattaaaacagaaacttttcaacttggagcctgccattcagcgttgaggtagatgagttccgacactgtcacggctgtgttcccagcagcgaaggcctctgcggagctgccagtcgtcttgaacgtgcatgggcggcgtgtgacatctccagggaggccgtccgaagtcgagaatcgtcagctgtaagtaggagctacacagcgcagagaaaatggaaccacccatccgtgaggcctctttccggagggagccgcacacttggacttgagagtttgccagcagcgagctcggatgcatctctccaaaagccaccaaggtcggcgcgtctgaagagcgttttgcggtcatcagacttcctcatctgaaaacacagaacatactgaccctttcaagtacttagtcattttcctgaaagtgtggtctgtttcagaatgctgtggcaaccaggtaggtgtggcactggccatgtgccacgtctttgccctttgtagtctgtcagatattaaagtttctaaccctgtttttttaatctccaagaatggggaaagtggaatgtagagatggaagcagaacgtgatgtttggatacaacagctatttaatccttttttattttttaagcaaaacactcagttttctaccttattttctaatgttgatttcatggtaatactgacagttggaagtgtttaacataaaaactcattgctaaagagcactgaggaaatgggagctagcgcacttgtaataaaaataaagacaaaatattttcttgaatgcatatatgtgattgggtattttaaaaaccagtatcatctgtcatctccaaaagattacaggagtcagcttgttaatacagtagtgttagtaggttctgtatttttaattcagtacttagaattctaggtcctttattgcccaaagtcagcacagttagtttataccacagactctgtcttggggcacagtagtggggcggggtagtgactttgcctaaacatcacccagctggaacagaggctgagcggggctttaggcacttgccagatgggaactgggttgcaccctccttgctccctgtcattttcttgtcactcttcctgcttcccagtgttttattttatgccttgctcgttgtacatcatgatgactgatggtcttcaaggttgtgaggaaagccgtctccctgcttgactcgactgctgtcccagaggagagtcctgtgcgacctgagcgggggtggctgccatttccagcatgcaggtgacttccaaagaatgagtcaggtggcactgaaagccatgggttctgaagaggcgaatttgttgaaaagtcccaagggtctgaatgaaagcatctttaatcaacactcaacactcgcaatattctagaaaaccatatactgtgctggttgaggccaaaggttaacattgctccactgttcaccaaggaagggggcagtggccatccgccgcggcctcacgtgcgttgtaacaagccctcatcacatgtgtgagtcttacgtgcacaaaaagagaaggctttggtactgaaactggacaccttgtgtactcgataccttcacagcttctattggacatattttctttttaggaatgaaggaaaattctcccatttttgagccattcttttgtcaattctacaaaattgcatgtaactttataaatatttttaaaagatatagttttgtaaatatttaatattccgctaatttgattttgaattgtaaatgtcaagtattctgtttttggggtttttatgttttattatactttgttaaaaaggacaaattgtacatttttagaatgtttttatgagtaaatttaatgtactgaaaataaaaattttaaaaaaggctg

SEQ ID NO: 6537 - DNA, 260 bp, Homo sapiens
aagagcccctgccaggggcgcctggcaagtgctgtgcccacgtccgcccaggacccagccgtgttgagtgaagctcttggggccagcgtgcgtcctgacgcacaggagagagctgaaggtgggtggcccaggccagggtgtgaactttctcccatggtttagtctctgacgcggcactgggccggaagttcaactgagtgcagtgcaggtggattccctcagcagcctgtgtgttgtgtgaaataaattggacttgaaac

SEQ ID NO: 6538 - DNA, 2946 bp, Homo sapiens
ccaggaggccgagtggctgccggaggagcatgcgcagaggccagttaaagtagatcacctcctcgaacccactccggttccccgcaacccacagctcagctgcccatcccagtccctcgccgtccctcccaggtcgggcagtggaggctgctgtgaaaactctggtacgaatctcatccctcaactgagggccagggacccaggtgtgcctgtgctcctgcccaggagcagcttttggtctccttgggccctttttcccttccctcctttgtttacttatatatatattttttttaaacttaaattttgggtcaacttgacaccactaagatgattttttaaggagctgggggaaggcaggagccttcctttctcctgccccaagggcccagaccctgggcaaacagagctactgagacttggaacctcattgctaccacagacttgcactgaagccggacagctgcccagacacatgggcttgtgacattcgtgaaaaccaaccctgtgggcttatgtctctgccttagggtttgcagagtggaaactcagccgtagggtggcactgggagggggtgggggatctgggcaaggtgggtgattcctcccaggaggtgcttgaggccccgatggactcctgaccataatcctagccccgagacaccatcctgagccagggaacagccccagggttggggggtgccggcatctcccctagctcaccaggcctggcctctgggcagtgtggcctcttggctatttctgtgtccagttttggaggctgagttctggttcatgcagacaaagccctgtccttcagtcttctagaaacagagacaagaaaggcagacacaccgcggccaggcacccatgtgggcgcccaccctgggctccacacagcagtgtcccctgccccagaggtcgcagctaccctcagcctccaatgcattggcctctgtaccgcccggcagccccttctggccggtgctgggttcccactcccggcctaggcacctccccgctctccctgtcacgctcatgtcctgtcctggtcctgatgcccgttgtctaggagacagagccaagcactgctcacgtctctgccgcctgcgtttggaggcccctgggctctcacccagtccccacccgcctgcagagagggaactagggcaccccttgtttctgttgttcccgtgaatttttttcgctatgggaggcagccgaggcctggccaatgcggcccactttcctgagctgtcgctgcctccatggcagcagccagggacccccagaacaagaagaccccgcaggatccctcctgagctcggggggctctgccttctcaggccccgggcttcccttctccccagccagaggtggagccaagtggtccagcgtcactccagtgctcagctgtggctggaggagctggcctgtggcacagccctgagtgtcccaagccgggagccaacgaagccggacacggcttcactgaccagcggctgctcaagccgcaagctctcagcaagtgcccagtggagcctgccgcccccgcctgggcaccgggaccccctcaccatccagtgggcccggagaaacctgatgaacagtttggggactcaggaccagatgtccgtctctcttgcttgaggaatgaagacctttattcacccctgccccgttgcttcccgctgcacatggacagacttcacagcgtctgctcataggacctgcatccttcctggggacgaattccactcgtccaagggacagcccacggtctggaggccgaggaccaccagcaggcaggtggactgactgtgttgggcaagacctcttccctctgggcctgttctcttggctgcaaataaggacagcagctggtgccccacctgcctggtgcattgctgtgtgaatccaggaggcagtggacatcgtaggcagccacggccccgggtccaggagaagtgctccctggaggcacgcaccactgcttcccactggggccggcggggcccacgcacgacgtcagcctcttaccttcccgcctcggctaggggtcctcgggatgccgttctgttccaacctcctgctctgggacgtggacatgcctcaaggatacagggagccggcggcctctcgacggcacgcacttgcctgttggctgctgcggctgtgggcgagcatgggggctgccagcgtctgttgtggaaagtagctgctagtgaaatggctggggccgctggggtccgtcttcacactgcgcaggtctcttctgggcgtctgagctggggtgggagctcctccgcagaaggttggtggggggtccagtctgtgatccttggtgctgtgtgccccactccagcctggggaccccacttcagaaggtaggggccgtgtcccgcggtgctgactgaggcctgcttccccctccccctcctgctgtgctggaattccacagggaccagggccaccgcaggggactgtctcagaagacttgatttttccgtccctttttctccacactccactgacaaacgtccccagcggtttccacttgtgggcttcaggtgttttcaagcacaacccaccacaacaagcaagtgcattttcagtcgttgtgcttttttgttttgtgctaacgtcttactaatttaaagatgctgtcggcaccatgtttatttatttccagtggtcatgctcagccttgctgctctgcgtggcgcaggtgccatgcctgctccctgtctgtgtcccagccacgcagggccatccactgtgacgtcggccgaccaggctggacaccctctgccgagtaatgacgtgtgtggctgggaccttctttattctgtgttaatggctaacctgttacactgggctgggttgggtagggtgttctggcttttttgtggggtttttatttttaaagaaacactcaatcatcct

SEQ ID NO: 6539 - DNA, 110 bp, Homo sapiens
agacattaggtccacatgaatagcagaactgactttgaaggaaggaagcgttgtttcccaagtttcacaatgtgattgtacatgacttctgaaattaaaaagagagcatg

SEQ ID NO: 6540 - DNA, 74 bp, Homo sapiens
actcgttaattttggttactgcactgaagttaggcaagcttctgcagctttattaaatgaccaatgctgtccct

SEQ ID NO: 6541 - DNA, 63 bp, Homo sapiens
cctcgccccggacctgccctcccgccaggtgcacccacctgcaataaatgcagcgaagccggg

SEQ ID NO: 6542 - DNA, 585 bp, Homo sapiens
ctgcctcagcagggaccgcatgccgcttggagaaggggtggcctcgccggagctagggagcggatgtggtgggctggccggactcctgggacatgtgggtggtggcttgaccccgggcccatgggcagcttgctgtggggcagtgcagggagtcctgcggccgcccaggtgtcaggagaggtccccgccgagtgcttcagctgccctaagctgcaccagcgctttgccaagatgggatggggagggggtatgagaactggcagagcctcggtgcagcagggctgaagggctttctcaccccagctctggctatgcccagttctctgagaaaggagctcagtggggaggtggtccctccagcggaccagggaaggggtcaccgtgctgggagcagcctccttgggcctcaggaaaccaccaagtgcctcggatggtggctgcccacggcgcttctgctgagaccctgcccccggcccaggtgtctcggagggtggctgcccacggcctgggtgtggctggaatggtggcaggagtgggcaccagtgcggccccggtggccatggggaataaaccagcattgctgcc

SEQ ID NO: 6543 - DNA, 766 bp, Homo sapiens
gaggcacgtggtcggcgcaggtaggagggatggtcctcaccgggagagctggcgtccctcctgcccccagaggagccaggagtctgggagggcggggcctggcctcacacttggtgcgtcctccacatctgcgtccaatcagaaccaaagaagtccagcgggggccactgggccggaggacactcccccaggcatcccaccgcgcggagcccactcagaggagactcctctcccggggaaggctttcatcagaacaagagccatggttccatttcgacacggccaggtctccggggctacccttccaagagtcagagcctcggggaggtggccgccagcatgggccggcactgccgccggatggctggcaaggctgcctagttccattgcagcagaaatgaacagttctgacttatagtgagcaccgccctgtggcccttcctcagtaggcacaactacctctcagccagcccccgccagcctttggtttggggtctgggacgagctgccccatgtcacacgtctatgtgcatgtgcacacacactcaaacatgtacacacacgtgccctccccacctcactagactctccgggagatggggcaggactgggagagcccacgattggtgatttgggtgtgttgggatgaggcggagtgcctgtgggatttgtcccggtcagagcctcagggggctggggtctcagggcactcagcttcccaggcaataacagccgtggggtaataaatggtctctgcacacctgca

SEQ ID NO: 6544 - DNA, 1067 bp, Homo sapiens
agggaagcgcagccacccgcctgcgtctggggtcagggatgtccccgctcctgtgtcgcacctggcacctgctcgggagcgcacctcaccggactgagctcacaggaggagcctgcacccgcgcagaaggggagccggggccgagcctccgggcctgaatacgggccagccgccgaggccgccagagcagggccgcctggtcccaccggcgtcgctgggttcttcggtgcttctggccgagcaggcggcctacttgggcagggctggacgctgggacctggagctgccgccgtctcttcaaagccatgataccccctcgtgggaagaagggaccgacgcgcgagtcgcgctccgcagtcgagccgggaggaacccaggctgctgccctgcccagcccgaccctgccccggccccacttccaccttgcgcatttggtactggcttttgtgatacttaggaaccctggcatcttttctatattatccagtgtgataatcttttcacgttttatagagcaaagacagagcagttactcttcatattgcaatatctgtgtttgactaggaataatagtatttttatggaacatttacaaaattatattttttaagaaaacaatcaaaacaagcattgggggattggggcaaggatggaaggagcagtggggcagctgccagagctcaggcgagccatggggtctgctgtggggtctgccctggccacccactgtgtgtctgggtccttgaggtttgtacgtttctctttgatgaccaggaagaaatcccagcaccccagccacaggctgtggctgctcccagcagaggcggggccggcagagaaggggcctcctccacccagagtcctggccttggcccgctgtcaccttcaaagctgactgtgccccgctgcgggaggggacggcaccccagtggtggcagagcttgggggcctgggcaggggcccgcttggcgggccgggcaacacgtcaacattcttttctgttcttggcattaattattgctgtcttttttttaaaaaaaaaagtttaaataaaatgtctcagagca

SEQ ID NO: 6545 - DNA, 258 bp, Homo sapiens
gagctgctgctggcgcccgagagggaaggagccggcctgctgggcagcgtggccacaaggggcggcactcctcaggccgggggagccactgccccgtccaaggccgccagctgtgatgcatcctcccggcctgcctgagccctgatgctgctgtcagagaaggacactgcgtccccacggcctgcgtggcgctgccgtcccccacgtgtactgtagagttttttttttaattaaaaaatgttttatttatacaaatgg

SEQ ID NO: 6546 - DNA, 231 bp, Homo sapiens
gtgaccacagggcctcccagcccaacatctccagctggatcccagggaaatatcagccttgggcaactgcagtgaccaggggcaccggctgcccacagggaacacattcctttgctggggttcagcgcctctcctggggctggaagtgccaaagcctggggcaaagctgtgtttcagccacactgaacccaattacacacagcgggagaacgcagtaaacagctttcccac

SEQ ID NO: 6547 - DNA, 704 bp, Homo sapiens
cacctgcgcagactcaggccaggcctagaatctccggttggccctgcaagtgcctggaggaaggatggctctggcctcggtcctcccccaaccctgcccaagccagacagacagcacctgcagacgcagggggactgcacaattccacctgcccaggacctgaccctggcgtgtgcttggccctcctcctcgcccacggcgcctcagatttcaggaccctcctcctcgcccacggcgcctcagacctcaggaccctgccgtctcacgcctttgtgaaccccaaatatctgagaccagtctcagtttattttgccaaggttaaggatgcacctgtgacagcctcaggaggtcctgacaacaggtgcctgaggtggctggggatacagtttgcctttatacatcttagggagacacaagatcagtatgtgtatggcgtacattggttcagtcagccttccactgaatacacgattgagtctggcccagtgaatccgcatttttatgtaaacagtaagggaacggggcaatcatataagcgtttgtctcaggggagccccagagggatgacttccagttccgtctgtcctttgtccacaaggaatttccctggacgctaattatgagggaggcgtgtagcttcttatcattgtaactatgttatttagaaataaaacgggaggcaggtttgcctaattcccagcttg

SEQ ID NO: 6548 - DNA, 2117 bp, Homo sapiens
ccccactggcccctggcctgccggacacagcaccgtgccaaccccacccagctccaggcccaccggatgctgtgcctggcctccgatgcctggcctgccagacactgcgccccgcctgacctgggggagccgaccaattagtcactgctgctactgcccctctccgaaagaagacacagaaccaacaaaaccgcattcagtgcacctgcctcagctacctaatgattccgcgcggagacctcctgacaacgtctcttcaagcatcctcagaagcctcgactgagctttagacagcagagcagatgccgcaggcgcggcggctctgcccacctctcttttcctctctgtctgtctctccccctctgtcttctctatcctctctctctctatgactatcacacactttctcttcaatgaaaaaatcgaattggtggcttatattttcagcaaagaattttggggggttttgtgtgttggcaaaagagctactcagaaatggacaaagaaaacgggggggttctccccctcctgattaaaaagggagaaagaaaactgcgattttatagctggagatctgaacccagctgtgcccctcccccaggggcgtgaggctgatcagcgaagacgggaggaaagatttcgatttctgactcaagatgcatttttggtttcagatttttttttcctgtaatgttaaactctttggctttaagtaaaaatccaaaaagtttttttaaaaaagcaaaggaagcatacttgtgaactaccttgctagctagccagccaaggataccggacacacctctgctccaaaggaaatccaaaaaagcaaacacaagaaatcaaaatccaaaatttgtttgtcactgccaaagtatttttttcactgtttcacttgctcttgggtttgtttggatgtgggtctttttctcttctgttctgattttgtttgtgggtgtcgggatatttgggtgcagagggtttgtgcccagttagaagcgacttttgttctcttctgcgtaggcgttggtgcgtccgccgcgtgtgcgtggtccgtgtgccgttgctccggcctgcgtctccatatgtgtaggaaaggacacgccgtctgtcctcacgccccctgtgacttttcatatttccgttttccacttgtggaaaaaaagtgctaaagttttcttcccagagagagcataattccgaaacaaaactgtgacaatcttttgggttgattctcgactgcttttcgagcatgcggagccagcaggcctccctgaaacactgcttctcggccagcccgtcctcctctacctctctcctctccgcgccctccgacctctctcggccccctcaccccagctccgacctctctcagccccatcgccccaactccaacctctcggccccatcgccccaccgcagctactcccctttcttccaaacttttgcagaaaaaacaaaaaaactacaaacaaaagcagccctctgcctcctccccagggaagaccctgaccgtgtacatagccctggtgctcctgcccagccacccctcagatgcgttcgcctctggccctggggtgtgtctcggtgacgttttctatcagacgtgctccctcccatcctccagccctgcccaccctccctccactcctctcaactgcctcagcgatttcaagaaggaaataaagggataaagaaattcatgcttgcaccgagtacaaggacagacagcaggcacggcccgcagcctggcatctgtgcgtgtggcgtggcccgtggcttggcatctgtgtgcgtggtgtggcccgtggcctggcatctgtgtgcgtggcgtggcccgtggcctggcatctgtgtgtgtggcgtggcccgtggcctggcatctgtgcgcgtggcgtggcccgtggcctggcatctgtgtgcgtggctatcaggagttctaggaactcagtgcaatacgggagtgacccagctactgaaccagccacgaacagcccgccagaggcctgaagctgagcgtgtacgttaatgtgaatgtatatagtctttgcagaggtccaaatgatattcatgatggtaataaacgagatgtttgccaaataaaaaacagaaaccgc

SEQ ID NO: 6549 - DNA, 851 bp, Homo sapiens
caccgcgggacggccgcaggacgcaggcgagggccgcacggctgcccaggactgctgctgagccccaggggcggaggagggagcgccctgtccacccgggcggggagagaccccgagagagactgcacttggccacagcgcctccatcccttccagactggtccagacgtcggggaggtgaaacacgtctcttctctaccagctgccgcggcgggggcaaagcccccagagcctcactggccccggcgggatgaggagaccatgccgggcgcgcacacacggcagcttctgtttgaaaacggcgaccttcgggcccttttctccagcaactgcagaggcatttcaggagttggagaacggagtacatttttaaaattttttgttccattctgatcaactaaagaaaattaaggtgtccacctctcacaaacagtgacctgcaggtcggaggggcaggagccccatcccagccgtggttctgttgccgccgagctgcgacggcctcagactgggcttcagacctggtgcggagccaggcggagggacacagagccaggactcccagccgtattgaaatggagtcaaatccgcgtggtttgtatcttctttcctttaatcttgggcattttgtttctctttctgagaacgtaacttgaaacactacagagccaataatcatataaaaagtgtatccgtaaacgctgtacagttttatataccttcacaatgtacttttgctgccttctagataatttattttgcaacacattactgcacagttgtaaataacttatgtactgtaacatcactttcagttatgtgtaaagaaataaataaattaattaaaatgc

SEQ ID NO: 6550 - DNA, 1629 bp, Homo sapiens
ccgtgccccgccggtgtgcaccgcctctgccccgtgatgtgctggaaggctcctgtcctctccccaccgcgtcttgcctttgtgctgaccccgcggggctgcggccggcagccactctgcgtctctcacctgccaggcctgcgtggccttagggttgttcctgttcttttaggttgggcggtgggtctgtgtcctggtgttgagtttctgcaaatttctgggggtgatttctgtgactctgggcccacagcggggaggccaagaggggccctgtggactttcacccagcactgtgggggccttcagactctggggcagcagacatgctgcttcccatcagccagagggggtcagggctgccctgttgccaaacaactccctgaggcctctccgcaccacctcagcgggcaggaggtcccaccatgtggacagacatagcccaaggaggcaccacaggtctatgtgtgctgggggatgtcaggtgccacccaacgctgtcctggtggtatttacaatgacatcctcctcctccatcactccaggggtggtgtctcggccgcccctaccagctggctgagccccctggcctcctgcgctccctcacttccctcagttcccaaagctgcccagtccatggggacagaaccgtcactcagatccacattcaagtgtgcccaccctgcagtcttcatcctcactcagctgctgcctctggaggtgcctttggccacatgtgctgtgctgtttgtctcctcgacagggagcctgtccaccagcaggctgcggtcccagcgggtgcgtctgcagctcctccccttgggcagcctggttctcccggaggacctttccttggggccctgcttcatgacgatgctgcctgtgtcaccctctaccatctgtaaacaactgggtgccttccccgaccacaccccaatgccttcccagcttggaagccaaggcagctgatgaagggagctcaggagagccgtcttcagctgggctggggttggggctgctgtgaggaaaacctgccattgtggccctggagagtcaccagcagctcttgggaaggacttgctgggaggctgagagaggctttgggcacagcctgctgtcttttccatttcctaaagtttacttcattgtcttgaggcttccaggttttgtttttgtttttgccaaagtagaaaaggcaggtggtgggcggctggcagggagtgcgggtccccgcccctcttcagtcctgccctcccctcctcagtcctgcccaccccgtgcagcccatgctgaggctgcagtggtgtcgtgggtgttacgtgcaggaacgtggagaccctgacgtgggctcactgcgtttggttttcttttcagaacttgggagcccccagggaggggctagtgttggtaggtcctagacgtggttccctccagcctccccaaaatcaaccctggtgttgagagaacgtccttctgtccatcgtgggtaacagccttggggagggtgcagagctctgcagagccatgggccaggtggggctgcctcagtcctgtccccttgggcactgaggagaggggcccattcacctttctcctagaatgctgttgtaaataaacaaatggatccctgga

SEQ ID NO: 6551 - DNA, 977 bp, Homo sapiens
gccagctgggccccaggtcaagggctcttgggagacagctcccgtggtgcttctctttgctggggaggggtctgggcctctggttgccttgtccctgggggagtcctgggcacagcagggggttggagagtccaggccaacccttgctggaggtgggactctctgtatatggaaggctccaagggcagcaggcctaagccggccagcaggagcctttccacatttccccaccctcggaacccagacgcatgcccacatgtgctgggtagaggggtccagcctgttccagccagtgcctgaacctgtccctgagaaggaccctgtgccccaaggcccgtggctcctggcctgctccctgcagtacggagtacggggctcaggacttgggggtcctccacgtgtcccagggattctccacacgagtgtcctcaagggcctgttggtgacaccgagctccccccaccccaagctctgctggagccaatctgcggggctctgccgggtgcacggctgacctggcttcggggacgccggccctccccttgggtgtcacagcagctgggcccacagacaggaaatgacctgacctcaaaccagatgtggaggtgcacgagaggcgcaggaacgggcagtggctgacagctgggaaggccctgagcgtcactgctgctgggcggaagggcctgtggacagcccgcccaggcggcggggtcttggtgggtccagtggtaatggtgcccctcccctccattccctgtgggtgcagcccacaggctggcgaggaggtgcctctgccctaccctcgggtctggcgagggagagggcagggtgcatccactgtgacagcccctctgggcccacaactccctgaccctggaagctgagcctgctttcctgaccctccgccccaccccctcctccccagaacactcagagggacggtcaacatcagagcacattaaacgctggtgaaacca

SEQ ID NO: 6552 - DNA, 728 bp, Homo sapiens
tacagctagagcccagggtccctgcagggcctggcctcgcctcccagggctgtctctcctacacctggagccatgggatctactgaggaccatcctggagcctcacgctgctctgcacatggtgggggcttgtccactgtggtgtgctctccagctcttcaccttcctcacctcacatctgaccctggagcttggggttggcacctctgccccgacagaatggggctgaatcagctccaggaggaaccaggccctgctctcctgtgtaggcctcagagaggccaagaagggaagctttgggcttcggtgggtgcaggctcagcgatgaacatctggctggggcagctcctggggagcatcagggaagagggggccatgagccggccagcagtggagacggcagtccagtttctctcccctctgacccctagaaggggagttgtagccccatgaactagtttcttgtctgggtcaggaacaagggccggctggggcctggggtgcagctggtgtcagggtatgctgtttgctgatgggcagggacacccctgcagggtctcgggctctgagcccaggacattccctgccccttactcaccttggctgtgggctgtgaacattccgggaccctgggcatcttatctaggtccgtgcagcccaagggtcagccctcttgactgtcacatgctgcccccacccagcctaaaataaagagctcactgctgtgc

SEQ ID NO: 6553 - DNA, 1050 bp, Homo sapiens
cgggacctgccactgcacaccagcccagctcccgtgtaaataatttattacaagcataacatggagctcttgttgcactaaaaagtggattacaaatctcctcgactgctttagtggggaaaggaatcaattatttatgaactgtccggccccgagtcactcagcgtttgcgggaaaataaaccactggtcccagagcagaggaaggctacttgagccggacaccaagcccgcctccagcaccaagggcgggcagcaccctccgaccctcccatgcgggtgcacacgaagggtgaggctgacacagccactgcggagtccaggctgctagaggtgctcatcctcactgccgtcctcaggtgggttcgggcttcaccgcctggccctctgtggtcacagaggggctcggtggcccaggtggtggttccgcctccaggggcagggccttgtcctgggtctgtgtcagcgggtgcaccatggacatgtgtacattgaggttgtgggccttctcaaaccgccggccacactggtcacaggcaaagtccagctcagtctcagccttgtgtttggtcatgtggtacttgagggatgcccgctgcctgcactggaacccacagacctcacacctgggggacagaggcagataagaaggtgcgagggccacagccctgggagggggtcctgactcacacttactgcaaaggcttggctcccgaatgtcgcatttggtggacgagaaggtgcttccgctgcttgaaggtttgtccacattcgtcacagatatagttccgcacctctgagaggggagagtccagtgagtccaggcccctgatgctccaacctcccggggggacgacgatgacaatgtgaaaccatcacagctgggaagacatttctgcacatggttcaccatgcagtgggcccaagcaaggggcctatgagggcctcgtttattaagatctttaaactgctttatacactgtcacgtggcttcatcagctgtgtgcatttcaggatggtttttaaagaaacctcagaaagctatttcctt

SEQ ID NO: 6554 - DNA, 720 bp, Homo sapiens
gcttcagcagcccgctcctgagcacacttcctctgccagttacgataacgtgcgtgaggaggaggcgaccatgggaaagcccggggaacgctctggtcagccttttcctgtgaggatgaggtcggaaggtgcgcccactgcagtatcctgttccgcctctggaagtcctgcaccaatgtttgtcccactcactgtgacctcctcctgtgtggagtctccccttgctcctccttccctgggtgtgattcaggctctagagctggccctgcctctcagccccccacatttctagaacacactgtagctgtgcctctacagactcccgctgcctggcctccacagatcctgctcagattcaccagtaggcaaagcttggccctattagctttttctctccatggctctgtggagatgtgcggagacccttacaggtcgggaggcggaagctgaggagtgggggctgggtggaaggtggacatcggggtttggtggaaatggggctctggggtttgcttccctctagtgtgggcaggggaccttgaagtgaagtcttgagaaaccagtagaatttgccactgtttccaggccttgtcaaccttttcattctttattttgctcctcatttcccatccctcacagtaactgtttaactgctcaattaaatgtgttgtaccgttcggtacttttactgaaacagtgaataaagcactgtgtgatttc

SEQ ID NO: 6555 - DNA, 1565 bp, Homo sapiens
atgagacgagacttgattggaagagaatgcccaaaggaacgtttatttccgaggaagagaatgctgagccagggtttaagtcatccaaagatcgcttgatgctgctgcttggtggcagtgcagctggggactttaagttgaagcccttactggtgtaccgctcagaaacccgcaaggctctgaagggttcttgaagcccagtttgcccgtgatttggcgctccaacagaaaggcttgggtgaccaggagcatctttcatgaatggttcacttactttttttgccgttgaaaaatacagtgcccaaaataatctcaccaacaaagcactgctcatactagacagtgcgtcatgccactctgtaaatttgagcgacctttctgataactaagagtagaataccttcaggccaggcgcggtggctcacgcctgtaatcccagcactttgggaggccgagacgggcggatcacctgaggtcaggagttcgagaccagcctcaacatggagaaaccccgtctctattaaaaatacaaatttagccgggcgtggtggtgcaggcctgtaatcccagctactcgggaggctaaagcaggagaattgcttgaacctgggaggcggaggttgtggtgagccgagatcgcgccattgcactccatcctggacaacaggagtgaaactccgtctcaaaaaaaaaaaagaaaaaaaagaagtacaagagtataataccttcatgacagtacagctgactcaatccggaccacgtgtcaaggtgtaatctcgaccttgaaagctcattatctgagaaggacttttcagcacatcctagaagcagcggatggtgaggacacagctatgatcagggaattttggagaaactacagcatcatggatgctgtggacatggccatcgcatgggaggagctcaaaccagcactaatgaacagcatgtggaagaagatttggcctgagtgtgttcaggcccagcgtttttcccaggcagataacattgcacagcttcaaaaaaacattgtgacccttgccagaaatgtggcctttgaagaggttgctgaggctgctgtggaccagttgctgcagtcccatgaagaagatctctcaaatgaggaactgatgcggctggaacaggagctggcagtgggggaggaggagagggaagatggtccctgggcactgtggcagctaaccacaggaagactgtcggcagccctctcacattttgaggctggcttgtaggtccttgctagtaacagccctaatgatgactggaaactgagaggttccagagaaatcagtgttgcagtaaactgctagcaggagctgtacaatgagaaaaagcgccactcaaaacaactctcttaggtcatttttcaatgtgtgtaaccaaaagttaatcagaataaagcggaagcaccatgatgacctcaacagtggaggcccagccaggcctccctgctctgtggtgttggacatccctggaaaccttgctgttggtatttccattttgatacttgagagcatcaaattttgtcattaaaatgttatttaaat

SEQ ID NO: 6556 - DNA, 1462 bp, Homo sapiens
accatctccacctgccccagctcctgcagggatggggtccgaacacgatggcagatctgggcagtgctgacccagcagacacacttcacccgcccacgaggctccagccgtcacctcctgacacacaccctgggggcagctctctgccagccccgagaccggccttgtctgctgggcacgggtcttcgcctcacttggagaccagccggctttcctgggggacacacggggcccccggatgcctctgggagccccagcacaagcacagcccagtggccttacgtccagctcgttcctgggccccgagtcaggaagacagcgtcacggagtcactgccaggaacgtgctgaggaatggagtggcccacggcggccttggggtgaaggggacccaggcctgtgacagccactccaggaactcctgggggtgctccaacctccgcgttttcctgtgctgccaagctcagaagccagaggcgggtttggtagtggctaatgggacaatgtgctgtccagcaaagcacacatggagaagcggccccaaaattcccaccttgatttccatcctgccccttcttctactccacggaggcgctgtctcactagggtcccctccccaaggctcagctctaagacctgcacctgcttctcttggcccctgcgtgacagacaagtccattccctccttagctcagaacaccaaatatcaccagactgcctaagagacttgatgacacctcccggaatgctctcggggtggggttcacctctccttgtcctgcacccactgctaggccacattctcgtttctgctcacatcccattgcccggctacaaggcctgcccacggcccttaaacttgctgggcaggtttggagcccatgggaccccgtgggtctctgtccaggagcagcagaggaggctgacaggccctgctccctctgctctgggggtgtctgggagccccagctcacaccctcccaatgcttatatgctgaagctcacagaatgggcttcttgcctgacagcaagtcaaagaatgagtttaatatcaaagtgtaagcttactttccatccccaagccagcctgccccctgccccatttcccatgagcacacttctggggaaggaaaacaggctcctggccttcactctcagcagagctttggagatgccccaggcatgccctgagctccttctgtgtacctgctcccacttctgagccacccgctgcccctccgcactgctggcaaacccagttcctgcctcagccaggtctccttccctggtttccagtcacacagagcccagcagctttctctttcagtcccataagggcagccttgtgtccctggccacacttccacccgccagggtcttcctccccatctttccatccttcctgctgagcttccacagagctcgtttgcaaacagggggattaaagcatcactgcgcattcg

SEQ ID NO: 6557 - DNA, 81 bp, Homo sapiens
ccccatcacctctctgcttagccactggcttaaactgccaatggtttgcctgcatgtaaaataaagccattctttaccatt

SEQ ID NO: 6558 - DNA, 461 bp, Homo sapiens
aaatctacccacgacgctcacaaacttataattcctcctcaccacaagtttatgtgttaaaaaccatcatcataaaaggaaatgagacccgtatctgaaggaaacagatgttcggtacacggacgacgccgactctcccatcaccaagctgccctcggttgcccaggagagccacagtgccttgagaacataagcaatttagtgaacagagttcttttcagaatttcctttttcttaagtaagcatctctgttacttaatttctcaccacagctagatgtctataatctgccccaaaaagaaaagaaagcgtgtagatgatttacctcttaagtctcaatctcatggtgaaactcctcacacggtacctgcttctgttggccggaggacgatgccctgaacctcttggagcctttttctgttttaattaaatgcatggcctgcctttatatggcctcaaat

SEQ ID NO: 6559 - DNA, 1264 bp, Homo sapiens
atgctcctgggagtcaggcgcagcctcacaccagctgcctcctccactcagcattccatggaccaaattgtgccctgggtagcctcagactttgggtattgataagccgatggatttgagtttttctaaagaatattcatattacctccttcttctaacttgccctatttgcaaaagcacttttgtagtaacaactattgggtcctgtcagacctccacggacagcaaagtggttttaatgcaagcccaaggatccttcttaaggtcttatctcaagagctctgggaggtggaagcatggggtgggatcggtggaccagggtggtaagtgtctgcacatctgcctgtccctgtatcagcggctacccaccttccaaaccactcaggacagtacccgtggcactgggcccgcagaagcaagggatgacttggttcttggaagtaatgtcgtcttgtgacattggcctgggacaatcattgtgggtaggtagttattgatcgtttactagataacccattggttctttgcctcatcctctcatccatgggtcagagttgaattcttatgtctatagacttccaatcagaagtctcactggtggggctgggggtgggggcaggcaggaggcatggatgggaacctgagtaggtagtgtggccaagagatcagcacaacctttgcaggctgacttgctaagtctgacagtgacaaacttgtgagcttactgcagtcagtcacagaggctgttctttttcacacaccccttcatgcccggctttccccatatccacatgcagagggcgagctcataaaactacagggaagcgtgaaatgatggctttggtagctgtttactgggtaaccccactgtgacactgtccttttcatgtgatgtggaaacctacttctgtcctccaaaccatgaaatgtgtcatctagactgcagagtacttgagtgctttgcctcccgatatgccagagcttgtggtccaaagcccattcctgtgtgtccgtcctgccatttagccacagaaggctgcggagtgaggcggcagctagcctggccagtggctgtcccgtggaccgacacctgcgcccccttctgcaagcaggattttctggtgccaacactcattcatcattcccgatcaactaggatgaatttaagactgtgctaccatgtgttctcaagtggtagtttaaaaagtggatttttaaagtgcctttcaattgtctgtgaacgtctaaaggactgatttgtctc

SEQ ID NO: 6560 - DNA, 431 bp, Homo sapiens
ggacgcagaagtgacttctgcttgaggacgtctgcagctcctcctacaccagcacactggtgggaggctggcggagtcagtgactatggcccccacgttcaggaggaaggtgtgatgccgtcatacagttacaggaaaaataagaacttcctcagaaagaacaggtccgaattcttcctgtcgcgtcactgattttgaggttcttttttctcttggtgacaataggtgacccacgtggctctgtgtgtttttaaaaattgtccaccaagaagcactttgtgcccagaaagttcctgaagcatcatcctggcagggaggcgcctgctccaccagctggtgggtgtttgtaatcgccaagcaccagctataggtcacagccacatcactcacagctgatcactggttggtggaaaataaactatgagcagcag

SEQ ID NO: 6561 - DNA, 1060 bp, Homo sapiens
gagtaattgcctgcagggaaggatgatgccagccccggatccgggctgctctctggaggacagtttctgtaccacaccagggccttgcttcagggcctgaagacattcattttccctcatgtcgttggtattctgagggagctgcctggcttctctgcctccagcctttggggtagccacactttgctgctcctggactccagccagccttcacagaggacgtcccgtgccagattctctcacagcagatcgggagacaggatgttgacatataggaattcagctccacaaagcttcaggcctgaccacagctggccctctaggttgtttggtgttgtgggcacagaggtgacagtgtctctgcaggcactcaggaagctgttctaccttggaactccatgcaactatccgtctcgaataccagggcagggcaaggcggactgatgccgtccaaccaattatctcacttgttttgtgttctgtcatccttgttttttttttaaaaatacactcccctcccccaccgccacacaccttacagttcaaaaggttggtttatttgtattttattttcaaattccctattccaaaaatagtgccgggtggcccaaagataacatctgaagggaaagaatgagaaagctcccagggaagcgggggatggggcgctgaggcagggttgttagaggactgtgtcatcctcaccaagctcattacatctgccagggcctgcctcaagaagcccagcccagccttttcctgggatgcagtgaaatcccatccatgaactcgatgggcccctcctgtgccggccgagaggcacacactgccttcacgacgtgactgctggacctggccgagcttgaggccacatgtgaagggtcctgctgtggtcatcttggtgactcggtcacagcagctactggccaagatcagacgtcgctgaggggctgttcaccaccatcctcgttctccagggtcaaggaagtgttttaacatgtcgtgttttcgacttgaccttgtggtatttttcttggcctagttgtgtgccatggatatt

SEQ ID NO: 6562 - DNA, 2723 bp, Homo sapiens
acttaagcagggagctgggctagcagaggccggccctggccatcgggagagctctgacctgcacaccgcgggaggccagggtgctgactgtcaagcatcccctgtccccaagttccaaaagcacagactcaaagggaaaccccccagtcacccactgtcagcccccatctgacaagaaagcctggagcgaggaaggaaagcacagcgaacccaatgggtaacgtggtttactctcccggacgcgtcctgggatctcaaccccagcagtctggcttgtttctcattcccacaatttcctgggttccaccaagcagcgaaaactgccaggatgaatgaggaaaaaacccagccccacaaacgagacacacgctggcggggagagacgcagcagagctccttcctgtctgtggactcggagcaaagacgtggggccccatcttttgtgttttcctcaagcggggaaagaatggactgtttgcatgcttcgtgccacacgcccgcggtgatcccagccagggccccgagcgcagaggcggagctgtgctcagcacaggcctgggacctcccccggcaggcacctgtggggggtgcagctcccgggaaggaggcaactgcctcacttaacatcctccgctgcaaggtggtggcgccgagaggcgtgtctgtgaagacaggtaccaggatggcaggacccgcacgcctcttcccacacctgtcagcttcggaagcatctctcgaggactctggtcccaggatgtctcccaggacaagccagtctgcctcttcctcctacttctgctgtagcctgggaccagacctggccaaggtcagccagcggggagggccgaggtctgagctctcgtcctgccgtggcccccgcgatggcctggggtgcaagcttggggctccgtctggtgctgcttaggtagtttcaggcttccagcccagccctatgctctgtgcttggccctgggcccctggccatccacaaacagcagaggccttccctggaggaggctttgggaccacccctggggggacttcccaaagggtcccaggctgtcaggggcgtttgcgccacctgcaagggcgtgggtcagagagtttttatgggggtctgttgtttgaccgtcctgagaccgagggaagggctcagctgaaggaccccgtctgcaggagagtcgggggaccaggtttgggaatacacttgcatgtacagagcctggggcctggacgccacggcctctcatcttaggacctaatgggacccccgaaaggagccaagtggggccctcggcctcttccttcgttccaggcccatgattttccctacacttctccctggcccaggctccagccacaggcacctctcctgcccccgcccaccctcctgaccgcagctcccaggccctggagacctccaggctttcctgccctgggcagccccacctcacagccagagtcaatgccttcatgggaagggctcccagccacacccagagtggcccaaagctgttgaagtcagcatcctttgtcccatcaggaccctcctgcctcctctccaggcccttgttcgcctccccaccctcctcagaggcccggggaagggaagagcaggtcagtacagaggttctgtctacagggaggggccctgggtctatgcacagctggagctctgagccttccacagcccgtgtgactgctagagggcaggggtgcagggctcagggggcccgggctggtcctttggggctggtgttcctacgtcagtccccacctggggaataaactccagcctctcctgctcatacagaagggactggttgggtttgctttatgggatctttgagaccaaaacagatgctcctgtttgctgggggagggtgtgagcacggagtatttctgtccctcgtgaagtcacgtcacacaggggagaggcgaggtcgatggaactggccacgcacaggctctggctctggaaggagggatgatgagtgggcgttttcccggcaggcccccggggtcctcagcctcagcaacccagggagaggacagaaacgaaccgatggttgagggattgtcacgggaggaacatgacacccgaagggactctaggtgccctcggagtgccacacatgcccagaccttctcacacccacacaaataggctctgccgtgcactcctacacacacacacacacacacacacgcttgttcacactcagaacccaggacagccacagccaccgcttaggggaagccactgcagatgcccctggaatgggcacagcacagccagggcgctcttccaggcaggcgaggataacttgagagtttcctagggcaccagggacagagctcagaggcccccgaggtgtgtgtaggaggcggaggcccgcagagcacagagcaggagaagggcttgggccctggaggagaaagccattctggacaccaggggacctggacggagggtccccacagcccgtgccccacgccgcctggaggccagaggggtcagtggccctgctgtcccggctccatcttggttctagccgccacctgcatgaacacagtggcccggcttaacgcactaacccagcctctccctgtgtcccacagggagtagcaagacccaccccacactgccttcaccatctacaccagtgacgccgctgtgtgtcttagcatggaaataaataaacctgaatgtacgtgctcgc

SEQ ID NO: 6563 - DNA, 899 bp, Homo sapiens
actgaggcaggagctggccgggcaagggtgggaagacatctgcgggcgcgtgtccactcaccctgttccctgagcagcagctccctccagggaggccctgggtcccacgccctgggtgcccacatggcctgccaactagggcctgcaaatggagtgggggagtcctggcccctgaatcaccagagccaccaagcctgccagaggggtctcattcatggcttggggacacagggctcctagcaagcaggaagttaagagcaggaggaagcgttgctaccttcacttctccccagctctgccctctgggtccacatgaggacagggaagctcgggaaggggaagggagactggccctgcccagccggtctctagcccctcagcccccgctgggcactctctgtcccatccctctaggacagggaagctggcctggtccagggcactgatggtgcttggattccagcctaaggaaggctggccgtggtccaggagttaagggcttgggtctggggtttaagtggccacccatccaggccctggccagtgtgggaccgggacgggaaggaagaaggaggctaggagcagggggaaaaggtgcacttggccagtggcgcctgccaggagtgagtccatgcgttgtctgcccacccctaccacagtgtttgtgccttcagctgagggggcagcctctgggccctgaacccctgctggggctccacgaccctgagagaaggggtgagaagaatcatctctgcacctcgggtctctgccagaggaagacttaagcatccctgcgacctcacattctagacagagatgaggtccaggggttggcccctgctgccttctcacaatttgcaatagatgtaaataggaccaataaatcctttggaagagcc

SEQ ID NO: 6564 - DNA, 731 bp, Homo sapiens
ggggccgtggctgtggcatccagagtccctgcctggaccagcctctccactcatgtgactctttccaaccggctttgtggcactggggcaggggccgggggcagtctgagagaggccattctttcccaacacctcttggggagtttagggtggggggggggcgcggctgggaggagggcaggcatcggggagccgggagcctgaccctcatctttcttccaaacaggctcagagggtgtcctgcaccggggcctgggcaggagggaggtgcttctagttctgccaggagacaggttagctgctccccacgtcagctgggacaccccgacttttgtttaccagagaaaaagggagggggagagggctgcctttggacttgtcccgggacacctaggctagggtggggagagacgggccctggtggtggctcgggaggcgaagcgttgtcctcagccccgcgtggaactcgtgtctggcacagcctggctgtggcctaacctgccgagagtccatcagcctccatcctaccccctgtgccttgtcacgccagacttcccacggctcctcgagatcccaacactgccagcatttcccttccttcctctcctgtctccctcctctgcccgggagctcaggaaccgaggcagggaaggatcccatgagctccttaaggctcttttgtaaggtttttgtagtgatttttatgccacctgaataaagaatgaatgggc

SEQ ID NO: 6565 - DNA, 127 bp, Homo sapiens
tatcccagtttaatattccaataccctagaagaaaacccgagggacagcagattccacaggacacgaaggctgcccctgtaaggtttcaatgcatacaataaaagagctttatccctaacttctgtt

SEQ ID NO: 6566 - DNA, 900 bp, Homo sapiens
gaggagcagtgccaatcgggcagaagtttgcaaataggcagaatggaatcgatttcctcccacctccgtgtgacgatcccatgttagctacacagtgcagaggctcttgatggtggactaagcaatttcccccctcgtgcgcatctcagaacccatcggtaggcaaaggaaaatacgctcaggtggttgtggtgtagactgtgtcaggcctacggagtcagccagtggctagcgcaagaccagtcactccctctgccttcaggcttctgtcaatttcattatcatcaagcaggaattatgtcgtaagtcactgaccctaactgcagaccatgaagtaaattatgtaactaggtttttgcttctccagtggtgaccacccccccccatccccgctcacaacttgggttcttctcagcggggcgagctgagaagcggtcatgagcacctggggattttagtaagtgtgtcttcctagaattcgaaggctctctctttctagaggtgctacatagttggtaatgcttggaatggcaatagggtagaatgattaatcaaaggcatatcttctatatctgaagagtatccttccttcagggtttaatagactgagtcagatgggtctgatattaatcaaaattgtctcttctgaggaccgctgataagcattgacttgccgtcccctaaggaaatccgagcggctacaaagcgtttctttacttctcacttcaattaatgctgcgcttcgcttggtgagtgcgtactttttctacctgtacacattcctgcattcatgtattttgttttttttgactaaagctatgttacatggaaaggattttgaagccttttgtttcccttgctttgttttaataaacagtatattctttggttgtgaatcct

SEQ ID NO: 6567 - DNA, 826 bp, Homo sapiens
ggtcctgccctccggaggagcagcctcgaggctggtggttttcagagcaggaggccgacgttttctccgcattggaagagcccgccgtctgcaggggcctggaggaatcactggggatggtggcacaggcactgaacaggctggggccttttgacggccttcttggtttcagccaaggggctgcgctagcagcccttgtgtgtgccctgggccaggcaggcgatccccgcttccccttgccacggtttatcctcttggtgtctggtttctgtccccggggcattgggttcaaggaatccatcctgcaaaggcccttgtcattgccttcgctccatgtttttggggacactgacaaagtcatcccctctcaggagagtgtgcaactggccagccaatttcccggagccatcaccctcacccactctggtggccacttcattccagcagctgcaccccagcgtcaggcctacctcaagttcttggaccagtttgcagagtgaaagatcaagaaatgtctctgctcctacatccagctcctctaggggcagcctccgtcatccatgccctcccaggaccctccactcactgctgtgagtgcgcctcaccagaaccagttaagagacaactatcaattcttgagacccaaattataagggccctgccctgtactgaagaaaaggggagcacaaggccttaatggacattgacttgtgaaaacgcaaacatgaatatggttggagagccctggattaggagggtgacatggggaaggcagaggctggcaccatggtgactgccacataataaagtggtgatttggattttg

SEQ ID NO: 6568 - DNA, 852 bp, Homo sapiens
agcgcccctcgccagcccgctctgtcgctgctgcgcggccctggcccgcaccccagggagcggcgggggcggcgcgcagggcccactgtgcccgggacaaccgcagcgtcgccacagtggcggctccacctctcggcggcctcacctggcctcactgcttcgtgccttagctcgggggtcgggggagaaccccgggacgggggtgggatggggtaagggaaatttatatttttgatatcagctttgaccaaaggagaccccaggcccctcccgcctcttcctgtggttcgtcggccccctcccccggctccgcgctgctcttagagggggaggggtgtcactgtcggggcactcctagccctacctccggcccttgcgaccacacccattctcactgtgaatctccccgctggggtcggagcgtcgggcagagttggggagtggggaggggactgagccggccggagggccccccgcacccccgctcccacccaccccgggactgataatgtgaagttcctcattttgcacaagtggcactagccccagggccaacccttccttcctcagtcaccaagggcggggagttctggagtcggaaggcgaagagcctaccaccaggtctcccactcccgcggtgccctcccttcccttccctgcggccccggaccatatttattgcatgcgccccggcggccccccatcccgagcccaggctgggctgggctggaacgcggtctctttagctccctcctcttcgtttgtatatttcctaccttgtacacaggctcttccagagccgcttccattttctatactcgaaccaaacagcaataaagcagtaaccaagga

SEQ ID NO: 6569 - DNA, 1386 bp, Homo sapiens
tttacagaaaaggaaatggtgggaattcagtgtctttagatactgaagacattttgtttcctagtattgtcaactcttagttatcagattcttaatggagagtggctatttcattaagatttaatagttttttttggactaagtagtggaaaaacttttatacttaactgagacattttgtcaaggctaaaaaaaagtcttgcaaaatggggcagtggactgacaggctgacatagaaaataaactttgcccaatcacaacttgtgcctcccatccctggagtactgactggcaccggtaagacagaatctctttgaatccattactccatgcccccttgaggcactgttgaagaaatctcacttttcagccagggtactggttctggtacatatggatcataagtccatttggggaagactcgtttatacaggttcatcagtactgtgtcttgagattttagcttcccatcaaagctgcatttcatgtggccatgggtacctagaaagacatcagaacaagtcggtcaaattaaaagtagaaaattttaaagcaatgacttccaacccaacagtcatttagcaacactgcagaaatgcagacatggtctcaaatcccgtgtttccttacctaaaggttccttgatatgtcctctccggccccacttcgttctcagttccactggtttaaaccacagcacatcctcttagaatcaaacacattaaagaccaagatgaaacatttacccacaaaatgtaaacccaacctttataccacaaaggcaatcagatcccatcctcctccttcatacccacctctgttgaagaacatgtaacgtactactgccatcttagtaaaaattttgaaaggatgaccactcagaacaactctcttgatgaccattctgtctggatctactgacataagatggcctgtagcaatgaggctgtgcattcctaaaggacaaaagcaaagaagctatttaggaatttacaggccaaagtcttcatttattgcccagtccatttaaagacccatgcaagagcctggtttgtcatccctgccctagcccaatctgaggctaagattggtaaactgtaagcccacacttaaccttgtcaataggttcttgaaaacttgtacttcaagagaaatgatgtataacaaaaccatactttttctcatcagttgttacaaggaaaggatgttgaacaaaaggcagttatttgaggactggctatacactgtttcacgtaaaagttggagttttcattgttctattaacaatgttaaatgaagacttactgtattttgaaaaccatcattaccttctccataccatttggctcccaaatttaaataaacaagagaaaacggtgttcatct

SEQ ID NO: 6570 - DNA, 1534 bp, Homo sapiens
gctggggccaggaggcagcagccgtgcagagcctgggctccggcagggagaggtgcaggggagtcaccgcccagacctccccagccaccaaccgaccccacctctgttcctaacaaagcggttgtgagcctggatccgactcccggcagtgctgaccctgcagggcaagtcaggggccaggatgccctcggatcagggccgggatgggaggggtcagcctcagggagcagctgccttgggggacacacctactctgctcccctctcacacatctgggagtagccccactgccacctgcagccgcagcctggactgctgcccacgagtgaacctggggccccacaggattaacaggggctatagcggcctgggccctactcagctggggtggcagagggcgagaggctctgtgctgtgtcccttctgagggtccctttgcagtcccagtatattgtgcgtgcaccagccccagctggagcaaccaaaactgcttctggtttaggcacacgtcacgggtgcgggagacccgggcacgggagacccgggccgccttcaggccgctcccccgagattctggggcagtcggaagatgtgggccctgggtgggagcagcccacttcagcagcactgccactgcctttggccacctgaggtgacccccaggcctccccggccttgtacagtgtacctctgtgtatctgtacagcctcgctcctgccaccccacccttgcgttctgcattaggtacttccctgaaaaccacgtgtaagaagtgatgcttttgccagtggatgatctggaatgcgaccggagcacttgctctgaggaatcccagggtgactctgtcggggaagaatccggtcacagcctcccctcagagacaggcctcagttcgagggcagcccattatctgtcgcagacatctgccatgtccctgagactgcgggaggcaggggatgcatgggtgtccccatctgtccctggtgagaagcaaggctagctctgccttccacatgcttctcaggatgccaagaggcctaggaacccagaaacccccttggaggagctgtgtatgcgggggtgccaggaagggcatagctcctgcccccaggcctaggcatgctgcttgctcggccatccccacttcctcctctaccccaacacatgcaggctaggccttgccctggaacatggaggccctgcccggggctggggcctagtccagcagccaccaaagtctggcagactttctgcatttgagaaacatgacaaagggccccgcagcccttctgcacccagcacagcctgcccagcccagccctgcccccgggcactgcacagcctgtctgggggccagaccaccccattgtccatccttgttgtccgtgagtccttggcctccaccaagcacgtgtggccattgtgtgcctgccttagtgactccgtggttttgtgaggagcagagtgtgtatgatttttgcctcagaaactatactcttctgtgtaacagaccaataaacaacatttgtcaaca

SEQ ID NO: 6571 - DNA, 3792 bp, Homo sapiens
ttgtgtctccttcggcccctcctccctcttttcctctggatgcactctgatgataccatggttaccccattgagctctgtttaaataaatattgtcctttcatgtaaattattctggatgtagattgagcttattaaatgttacacacaaagtattcatgcatggtgaatccaaattgtatactgtaaatttacatacgttgtctagaagtaccatagggtttaaaaacctgggctggcattggtcacaccaggcctaagaaggcagaagttgaatcaattgaactagggcactaaactgaatagttgacagtgtcattttatgttggattattaattcctgtttttctttctgctatctgttggtgcctgacttgatggcctcatttggggaaaagtggtggttattagggctttttctgaaatgtgtatctatgtaacatcacttaagtgtgcttaataaatcttctgtaaggattttagatgataaggctacaattcagaatcttctgaaccatctatgtaatgaatggggattatacattggaatttttgtcatgacacatttgccaaatcagtaggatatatttgttttggcagcctatcacgcagaggctagtggtatatttatgtaagaaaatgactgtaaatctcaagaaaaatctcagcagctaatagcaactcatttatttcattttggtcttaatgctttgtaaacaggtcaaaaaatactgtcatactctaagcttctattttccacactggacatacttctagttgtattctccatactattagactgtgtagtgatgtgacttccaagtagaatttaatctccccattgagtgtgtcatggtacaaatcactattcgtttttggtgttttttagggatgtgcaatgtgcattacataatgacagaaatactgagaaggttctgtgtgcccatttgaaaggagtgggaggaatacagcagtttgtttttcaacatgaatctgatattgatttaaactgtgtttcacttacaagttttaaaaaaatgacagggtttaatggagcgtgcataaaaatgtactgttttcaccttttgtttatatgtaaatgtttgtaagtatatgggcctatctgtaagtggataagtctgtatgtgtgtatcatacacatcaacctccatgtccttagtcctgggtttttgaaaaagtgctaaaacggacaagtagaataaatgttgctgtggaatgccatgctttagaacaaaccctttttgatcttaatgcttctgaaaactaggtctgactctggggatttttttccagccgaaggaaaatcacttccgttatgtccccctctaatttagccgctcgacattttacacaacccggatatgttgtatattttgacccaaagttacaggtaggtttaagagaatttttagccatgacttttggagcactattccattgtcagttattaataaagaattccattgcttagctaaccaacaggttttttttgtttccaagagagttatttgaaaagttaacagaacaatgagataacagtgacagtttaacaaagataaaattctgaactgcgttttattcatttgtgtactatgtgattttttaaatgtcccctttagtatttaatggaaaattggttcctgcaaaagacaaagggtgagagttagcgtcctgtagatacacacagagactaggccgtatattaactagaagcagctttatgtctagcttgtgtctttttgtttgtttgcttgtttgtttttagattcctgagagatgtctctggaagggaaagttttgagaactaatggctatttttgaggacaaaaattacatcttaagctaattccttaaatacatacagtaggtgaattttcaggacaatattgcctcacaaccctgcttacattgaaaagtctttttcccttagctcttctgactggatttttctacaaaaactatggaaaatatctttgttcttgtttgctgctattttctgtcctattttgagaaatataaatacatagaaatggtgcatcttaacatttgtttgtacatgtataaatgtcttgtattttaattcatttttagcatgaattgtttaagggtaagccacaacatctagaaatcactcatagatattgaacaataaaggagaatggtaccgatgcaggaggaagcaagcgtgtcttcccctgcagcacacagcgacttgcgttgacaaaggaggaggaaacgattactctgtaaacaaagttatccttacttgggagattgccacagcctgctgctgagttgagttaccagacatcctccatgtgagaagcagcgaacattgaatctcagggatggcccacaactgggtccacatgtaatgagccctgtttaataacgaaggggtgggggagagcagtccgtctacaacctggaatcagatttgcaaaatttcctgcactgctgtctgacactgtcctgttgatgccctttctgactgtgttctctgttttctctgtctgctgtctaaccctgtgccttgcctgggataaggacaatgatgaggttactggtttggattgtaagtagaggacttttattaattggtttagaggttcactgctgctttgtcactttctcaatcaaattggccacttaagaaataaagagctggtagaattgcatcctcagatgattattgactgtgtgtgtgtgtgaaaacagacattccagtgccacccaaatatatatctgtaacgtgcccaagaaatcctagctgcgctcttgagagtgcatgccatggagactggtttagacaccgcgtggagcctagttgcctgttgtcacggcatcttgcactttaggagactaagaccgtcctggttcgtctgtgtgtggtgtgaccaatggtgtgcccagagcactactctcaaaatcactagtgttagcaagtcgtcccgggctggggagcgttcgccgtagtctttggaagctttggctttagatttaccaagccccgcctccccgctgccagtgccctgctctcccgttcgcctctttctgtttctgtgtgaactttcccggtaatatcactcgttaaataggttttctttaaacttaattaaagaaaaactatttaaaggtaaaggatattttgttgacatcggtggctcgatcatccttaagcaactgaagttaaaattgttgaaggaaaaggcacttaaattggttactttcatgtccagctgtatataagtccagtgtgttcatctagatgacgcaaagaatctcctggtagagaagcgacatgtaaaaaactggtggaaaaaggttttggattttttttccagtggggtggggggagggcaagctggatttacaggtcacggctggactgaatgggcctttttatcttcccactgtatcatggaagtagctgcttgcttgtactgtccatccttcaggcatccctaaagctcactctgaagatgttagagacaaacacaaactcttcgagttaaagttgatcctgacactgacatgaaggcaagccttgatttcgtatgaacgttgctgaagtggtaattgaggaaaacagttccccagattgttaagagttcactgaagatattgacacaattttaaaaaatcagtaaaggaatgtatataatattgctctcgtgttttacagtaagatttgttgctctcagactgtgtaaaacaaaatttattcatgttttctgcatattaaaaaatcttattgtaccaactggtaaac

SEQ ID NO: 6572 - DNA, 4350 bp, Homo sapiens
ggaatcccctcttctgtcctggaaaaggctcctgtaccagcagtttgggagtgccgtccacgaccctgacagtcccagccctgctgccccatggccacgtgcccacagatgtgctgttggtccaggtgtcccagtctggccacagccctgcctccgccctcacctacatgccctcccagcccctcccatctctggacgaggcctccttcctcaggttcctcctgctcctgacctcccagtgtgatgtccgggtcctttatcatcctattcatcctggagaggaaaagtgtcgggcaaagggggatctggggggagctcagcagtgactggggagctggtctgcctcagagacagagtagggggtgggagcagagcctcggtgagggtcttggccacagggcagtgccttcctgaacgtggcaggctttactaccaggaacgcactcggtggtggaggccccatgttcccaggagccaagattcgtagcatccttgaggccatcctgataaaattcggcgctattgcccccgtagctctggagctctaaaccgtctatctgcttctgtgctgaacgcctttcccatctgctgacgtaggcccagggctgccctgcccctgctgccagtgtaccgtgagcggggctccagccagttcaagctcagagccagagctggacgggccagaactgcgctgcacacttcctggactgaggcggggactttgggtcccacccggtttctcctgattatggctgctgtggggtgaggggagggaggggcagccccgaggcagtctcttccctttgagaagatattttcccacaaaggggtgggaagccaggagtgagaaggaattcagggagagcaaaggagccagtgctgagatgctgctgtgttggttgaggaaaacctcgggcctgagggccaggccggagcccaggtctctgctgacaatgggggttcaaggaagacgtcgttatctcccctccccacttactcgaggagagaggtgagggggggatgacttgcgggttctgatcaggcccctgggtggggaaggggcacagtgtccctcagcagcttacgcccctggagtcttggggggcccagcctggccctggggccttttccagctactgtgcccttgggcagctgcgtctggggctcaaccccccaatcctgttcccctctccagctgcgggtctgtaggcagctgtcacatctgaagggtttctgcaacctggaccccatctgggtgtgggtcagaccctgtgacccacatgccacccccaccctccacagagcccccttgctgggacagccagctcacctccaaggacatcccctcctggcttctcccccttccgagtctgcagcgccgtgggcttctctgccgatgggcccgggttggggttaaggtgggcatcctccaggtacaacgagcctgaagagcccctttcagtgcagacggggctgcagagtgacactggctgggcacctgccccacgaccaatgacaaggatttccagctgaatgctttattcccatagggatctggacctgtgcccaagatataaatactacactttttttttttttttttaactgacattgtgaaattctccctatagcttttgccattcaagcaacattgtgatctttcttccccgccacgtgtgtgggaatgattgagtcctgtttgcaagctggagaggagctctccctttgctagtactttctctaaagtactagtctagtaaaatttattcttgttagaaggtcaacaaaatatctgtttagcttttatgaagagtcaccgtagcagcccccacggctggaaagaggcctgtacgttctggacgcgttttgttggctgggcttctggaggcactggcaaggtcaaactgcatttctttaagaacagttgcaggatctggctcgcctctgtgggaagccggcattacaggtgcttggtggatgggccgtgtcacattgccatctggggtcctttggggtttccaggttgtcaccatgctgtcccatttgggaatcccatacctgcctgtccccactgcgctggctgacccttgctgcctgctgcctcttgggagggctttgtccctgcctctgagctggtgggcaggatggctgggtggcccccagagaagcacagacctgagatggggtctccatgcccggtttgctgttggaatgatctgaacaggaccccaaatgcctcttccctctggtcatgcctcactatctctaggagctccatcctgtggcttccagagtgtgcacttccagcccacccgggcagtgctgagagggaggaggagaacaaggatggcccagcctcccctccctcccctagaccacggggcgggcagctcgggttcctggagggctgtttcccccacgctgtccctacatctgctctgatctaaaatgtctttccttttatgctgcgcccagtcttggggctcaaagatttgcccaaacctcattggccctcgtgactaggctcatctagatggtgctcacgctggtgtttgaggcatttccactgtgatctccacgaggggatgttttccgggacacatctctggctctgggaactgcctgactcactgaagaaactacttttcaggcactgtagggtcacccatatgcctccagctcagttgacgcttaaaaacaggtgcagaaaagctcgcgatggaaggtcttaatgagagtgtctgtctatgccaatcatgtaaaatgacgtttcttgaaaaagattcagtggttcagctttgtcagcatcatctcaacacaagcctgctggctctttttagcatctcatccaaccatgtcatcgtccagatgagaaatcttagcccaggtgaggggagtaacttgcttgaggtcacacagctggctgttggcaaagctgggattagaaccctcaacccagggtcccttcctctgcagcgcctacatggttggttgaataagtggctgcgtttcctggggccctgggttttggggaagccagttagctgctgctttggcactggcatggaggtgagcagtcaaggatgctggtgaggctgcagtttctgctctttttcatcaggggggatagtctctaggatttttcagtgaggacccttgggctttggatgcagcttgaaccaagaaaacgaggagggaaagggattcagtgaactattcctcagtgggatcggttcttcagctcctgatgggggctgtgtaatgggggcagaggccagggaaaaagatgctgttcacccaccctcagcttcccttttcctaaattaagaggaaaagtggtcaaagaaaaactcttcatttctccctgattcttaaacgaaggtggttaatagaaactcaggctcccgtgacaaggcaggacaagagcctgtttcgctttcctccctgaccctgccaggtgccaactcaaacactacctttctcattggtttctaagtcagtagagacagatctgttttaagcagttgggggttcgagtagatctcatgggtacaggaggccagcagggaccaggccagtcagccatgctcaggacccctcggctcctcccccagcctctagctaccctgtatcgaggcaaggggaggccagtaaagtttgccaagcctgatcctgcagcctggtggggctggctggggtattcttttaccaaactctgttttaccgccagccccttgtacaccccaatcccatgtctccctcccttcagctggaccgtgtgcccctttgggaggaagaagacaagccccactagggccaagggcagcagagccctgccgagtgagaggctgtggggcagcggctctgtcctgtgccttaccagccctggggaggggggcatttggctggaagactggaatttaattgccatcgtctttgattttgtgacatttctgcttggaagtgtgaactacccccccccccccgcttcctgctccttagcatgcgtgcagctctctcctgttttgggtgttccccttggacactccagctcggggactgctggcgtgtgaatgtgcagattcccctgtgtggtcgaacctaagaactgtggcttggaagtgatgctccatgtgacgacgactttgctttctttcctcttagtgaggaggtgattcgtagatcccaactgcctatgtaatgtaaataatgtacatttaatttattgctatggtagcacattgtatttgttaatgtacaaaacaaattctaaaaggttgacaaatgtatattttgttgcttaaatgtgtctttgcagaaattgacaataaataacatattttgtgtcca

SEQ ID NO: 6573 - DNA, 317 bp, Homo sapiens
aaatcacttccagcttacatcttacacggtgtcttacaaattctgctagtctgtaagctccttaagagtagggttgtgccttattcaactgcatacatagctcctagcacagtgccttattcggtaggcatctaagcacatttcttaaattaattaatatatctttaaagatatcatattttatgtatgtagcttattcaaagaagtgtttcctatttctatatagtttattatacatgatacttgggtagctcaacattcttaataaacagcctttgtattcagaatataaaattgaaatagatatatataaagtt

SEQ ID NO: 6574 - DNA, 2734 bp, Homo sapiens
cacccagggacccagtgtacccagcctctggcctcgtgccctgctggggaaggcctcacccagcgaaggccggagaagcggttgggccctggcacacagggctggctcagtgtgcggacagaggagaccactctgctcctggggccagaggccattcaatagcctgccttcgtccgggcccctcctgggcctccccggccaggcacgtggcaccgtcgccttgacaccgccatctcttttctttaaggcttcaggcagcgcgcacaggctctggcagccgtctcaggcaggactgggcaccaagcttgcagccgaaggccttgccccaaactaccagcgtttctgcaagcagcttgaagggctgaccttgcagccgggtgagccaagggcactttgctgccaccgctgcattcccagagatcaagcagcccggtgccgtggccagtgaactcagaggtgctggtggacgggctaggactttggggttaggccatggggctctttctctgaaggccactttcctgacgtactctctgtacataactcagcgtccgtgactgcagtaacagccagccctacccagagtatttctgagccatgaggggcccaccagattggttctgaattggattcatgcccagcgcattagcatagtaactcctttcagattttttggagggacgtttggaagtggcttactctcttctgccctctctcctacctccaccttctcagattagccccatctgagcacatccagctgctccttacccagcatctggagtacaggacatagctctctcctgctaccagtctgtgccttagaggtctgttaggcctgccaaacggcgaccagctcccctggagcgagggcaggccccttccctctctttccccagacacctacttgagactcaccaatttctggcctgttcaggagcctcagataagtatttgtacttgagaccacctcacacaatctgtatgggcccaaccctgatctcaaacctccttccctctgcccaaagctgtccttcctatggcaggaggggtgggggtcccaggacgtgcctcatacatgacttgagcttgtcagtccactgagtttccttctacgagatcaacgcgaggggcctgtatcttgaattaaaacctactcgcttcctttctgcactctgtgtgctcgatacagaaggcaggtgtgctggccttcagagccaggtgccctgctcccctcgtgtaaggaagcgcataaggttgtgaaggtcactgacccgagagcgctgcgtgctgaccccacacttcactggggagccctcttgggtagcgcgagacgcctacccgcccagggccaggtcagtctcccaggctccgtgtcttcacggttaccagggcacgccactcaatctggatgtgagccggggtggatgaggttctgaagggcacaccagcactgggagcgggggcagtgggggtcttattctccagacgcttcctctatctagttgtaacaaacgtcaaagaatgtcaggtcttgtttctgcagagcagactttggcctgacggggtccacagacctgtttcacttgcaacacccagtaaatgtgttactgggtgccctactttaaaaatcagagatttcaaatgattgacttttccggctgagtgcggtggctcacgcctgtaatcccagcactttgggaggccaaggcagatggatcacctgacatcaggagttcgagaccagcctagccaacattgcaaaaccccatctctactaaagatacaaaaattagctgggcatggtggcgggcacctgtaatcccagctacttggttggctgaggcaggagaattacttgaacccaggaggcggaggttgcagtgagcgaagatcacgccattgcactccagcctgggcaacaagaacgaaactccatctcaaaaaaaaaaaaaaattattgacttttctttaaaatctgatttggcagtgctaggtaggtccaggagtgctaacaccttcccagaggtggtacgcaggtagtcaggtgctctctgactcacccccatctggccagatcacggcccccagcaacacgtggggttgtgtccctcgctgggatacacggagtgcccttataggcagggagtcttataggcaggggtctctcccaggcacctctgggtgtccctacggcccctcccaggtgggagctgaggctaggttgcaaaaaggaggttgggagcaagtaggggcttcacagtaacacccaagaaagcacacgcaccccagggtcccaccccagtgctcccagacactcccacagatgtggttctggtcaggcgcagtgcagctgctgcggctccaccagccccgggctttcaggcaggtgggcctgggagtagttgagctttgtcccagaacagtgggggatggggccatcattaaaaccacagctctggccccaatatcccaccgccacccccaccccgatatcccagcccatgcctcagcaaagccccctgtgaattccagcatttttattgagcgcaccacatcggggaggggcggcagtggtttccacggtaaccaaagtaaggcttgtgcacttgctgagcttccagatgcgaattagtaaaagctaaattcaaaagtagaatgggcatctccaaagagtacgataaaaacattttgtatcaaacttgtgattaaaaaaatacaaaagttaaaccca

SEQ ID NO: 6575 - DNA, 189 bp, Homo sapiens
aatgggggcccgggggacttttttaaaaaaccagatcgggaggactgtggccagcaattaacaccatgtagacttccttagttcttaagtggttgaattcgctgcttgttctgtaacgttataaataatttatatctgaagacggagagcctgtaatattcttcagattaaatgaagcgtgagacactt

SEQ ID NO: 6576 - DNA, 364 bp, Homo sapiens
gctaaatgtatcttactgccccgaaatgagaggagactggtcttgaagcctctggtgctgtttcaacctccatccccacaggagggtggaactcccattctcacaggtttccagtcagcttttcaaacaagaattttgtttccaaatggaaactgaaatatttgttgaaatgtttaaatttgctgataacaaatgttctgaaagaagtaaactagccgggcacagtggcgtgcgcctgtagtcccagctactcgggaggctgaggcaggaggatcgcttgagcccaagagttcatatctagcctggtcaacatagcaagacccctgtctctatttttttaaataaataaactacatgtgaaaac

SEQ ID NO: 6577 - DNA, 613 bp, Homo sapiens
gccgtagcctcttctgttaataacacacagagagctctgccaagcacctgagtaggcccttgacacttgtgtgccctgggatgcctcctggcgcgaatcaggagggtctggaaggactctggctatattctgcaaatgtggctcatgccccttaccgtggctcggcgttgtggtgcctgagggacagccggccacctgcccagtactggtcagcttttcaacactattccctttgacctactggccatcttcctcacagccctcagatatcaacgggcacaaataagaccaactcaatttccacttgaatttacaaccaaaagcctgctgagttgattacagctgggccaatacagtacgaggcaataacaaattagtgtgggttgattctggaattggaaaagcttttgcttgtatggatacagcaaatccagatgtctctgaacaaagcaacaatttaaagcaacgacattttctgtcctttaagcacttaaaatcaggtgtggtgtgttttcaaaggcagaagtctgcattttgagcaaaaggtggcttcccagctctaacaaggtaactggttagcatgacattaaagcttgggcaaggcttcaaactt

SEQ ID NO: 6578 - DNA, 309 bp, Homo sapiens
ggtccctgcctacactcgtcctgcctgcaagcctcccgttggtccccacagcagcagtgcctcggttcctctttggctgtcctcggggactccggctgaggcacatctgccacttttgaattcccggctggagagctggcaggaccctgtggctgggctgggaatggagctgtcagcactctgcgtgggaggcctgggcctgtgcctgcatcccgctcaaggctgccccagcctggggtctccagcctggctgctgctgggccctgaataaagagaggccagtacaaagcccatggattttgggcctgt

SEQ ID NO: 6579 - DNA, 832 bp, Homo sapiens
agcccctgagcctggattgccaaagagcagccccaggaagaggccgggggtccgcttgcgattccccagccaggatgcccccaggagccttgccgtttggtgtgagcgcgctgtttgttctgtggcatgtgacggcactccccttcgagcccagctgtgttactgattaaaagtactgctgagctgtggtccgacagcactgatcacagccaagggcttggaggaaaaggaaaaattatgagagagagagagacattggtgctaagtaatgatcttcctaaagaaatgcttgtgtttatagcttccagaatgctaatctacaattttccctctggtgaattcgatacatcggctttacagggttacagtgattaccaagtgtttttttttatcaaaatacccagagttttttacttcctcacgcgattgtaggttcctctcctccctccctctgggccactgccaggaaacagagagaccgcttaatcagcagcttgacaaagaagacctcaagtcttgggaagaaacagtttaatcactcccaagtcctgggcaacagatgaccttcaagtcacctccgctctccggggagatgggaaggctctcctctcggtcccaaagtcctcctgttcttcccaggaggccccacaagtgtttggctaagcacaggctctcgggaatttaacacttttggggaaggaataggccctttgtgctgagagagagtttttattcacatcttttttaggggatttgctgcagatatttataaaaagtaactccctctgtaccactgacccatttatacataaaaaagatgtgttgaattttg

SEQ ID NO: 6580 - DNA, 460 bp, Homo sapiens
gaagcggggtgggaagaagggaggggatggggttgggagaggtgagggcaggattaagatccccactgtcaatgggggattgtcccagcccctcttcccttcccctcacctggaagcttcttcaaccaatcccttcacactctctcccccatccccccaagatacacactggaccctctcttgctgaatgtgggcattaattttttgactgcagctctgcttctccagccccgccgtgggtggcaagctgtgttcatacctaaattttctggaaggggacagtgaaaagaggagtgacaggagggaaagggggagacaaaactcctactctcaacctcacaccaacacctcccattatcactctctctgcccccattccttcaagaggagaccctttggggacaaggccgtttctttgtttctgagcataaagaagaaaataaatcttttactaagcatg

SEQ ID NO: 6581 - DNA, 414 bp, Homo sapiens
gccagggagatggacccagagctgagagggagaccatcacctgtgccatgggacagaacctgggaacatgtagggtggggagtatgagcaccaacataccctgctggtcaaagtaccctaggacaaaggggcaaatggtgggcatggaaaaactgaagcccgagcctgcccacagctatgctttggcctctccagcagggtgctcctgctctgcactccagaaacaccctgacaggctcagagaggagatggaaactgacatacccaacccacttcctcaaacacttcatgctgctgccccagccttcccgcagacttggcctaatgaaaatacatacttcttcattcggagagacaaaacaagaactagagttttaatgataataaaagcaataataataaaagcaataacaa

SEQ ID NO: 6582 - DNA, 120 bp, Homo sapiens
atgctgataccctagtagtccccagctcccaaacactgaaaggaaaacgtgaaaacactcaaggcctagggggaggacaggttggtaaaacatgaaaaggtaaataaaattacttgtttg

SEQ ID NO: 6583 - DNA, 83 bp, Homo sapiens
ggctccactgaccgccgggttacacctgctccttcctggacgctcactcccttgctcgctagaataaactgctttgcgctctc

SEQ ID NO: 6584 - DNA, 94 bp, Homo sapiens
gacggcggctgcggggaccggcgggaacggagcggaccgcccggggtggggccgcgcagcccggggtcagtcctgcagcccgcgccgcggccgc

SEQ ID NO: 6585 - DNA, 71 bp, Homo sapiens
atcctgggattctagtatgcaataagagatgccctgtactgatgcaaaatttaataaagtttgtcacagag

SEQ ID NO: 6586 - DNA, 568 bp, Homo sapiens
ttgaggcccccgtcagggagaggtcaccagctgctgtgccccaccacgtctggctccctgccccttaaccccaaggactgagggcagtgccctttgagatctggggaggcaggcattcctgaagggaactagaggtgttacagaggacccttacgtgagaaatagctgaaaagggcactcccaaccctgggctggggaggaggagagagtcccagagctcatcccccctgctgcccagtgcaaaccacttctccatgctgcaaaggagaagcacagctcctgccagggtgagcagggtcaagcctcttattccaggagaagggggctctgccccaggccctactacccattgttcccttcctcttcctgcccttgaaccccctccctgtcccagggccctcccagcccattgctgccaaggtggagggaaggataaagccacttctggcttcagcccccaccaggggaaggaaggagggcacattaactccctccaccagcctgctgacagacactaactttgtatccgttcaataagcatttcataaataaaggtgtagaaaaggtt

SEQ ID NO: 6587 - DNA, 776 bp, Homo sapiens
cggggccctgggctggggctgtcccacactggacccagctctccccctgcagccaggcttcccgggccgcccctctttcccctccctgggcttttgcttttactggtttgatttcactggagcctgctgggaacgtgacctctgacccctgatgctttcgtgatcacgtgaccatcctcttccccaacatgtcctcttcccaaaactgtgcctgtccccagcttctggggagggacacagcttccccttcccaggaattgagtgggcctagcccctccccccttttctccatttgagaggagagtgcttggggcttgaaccccttaccccactgctgctgactgggcagggccctggacccctttatttgcacgtcaggggagccggctccccccttgaatgtaccagaccctggggggggtcactgggccctagatttttggggggtcaccagccactccaggggcagggaccatttcttcattttctgaaagcactttaatgattccccttcccccaaactccagggaatggaggggggaccccgccagccaaaacattccccccattcccgacccccctctcctcttctagcccatgcccttccccggtggagggagggagcagggagccctcactctccacgccccttgcttgcatctgtatatagtgtgagcagcaagtaacccttctcctccctcccccctcccccctcctcaatgtagtggccttggatatcctgtttgttaataaagacaattcaaccagctcccacc

SEQ ID NO: 6588 - DNA, 468 bp, Homo sapiens
gggtgggaggtttggggaccttgagagaagagcctgtgggctctcctattggaatctagttgggggttggaggggtaaggaacacagggtgataggggaggggtcttagttcctttttctgtatcagaagccctgtcttcacaacacaggcacacaatttcagtcccagccaaagcagaaggggtaatgacatggacttggcggggggacaagacaaagctcccgatgctgcatggggcgctgccagatctcacggtgaaccattttggcagaatacagcatggttcccacatgcatctatgcacagaagaaaatctggaaagtgatttatcaggatgtgagcactcgttgtgtctggatgttacaaatatgggtggttttattttctttttccctgtttagcattttctagttttccactattattgtatattatctgtataataaaaaataattttagggttggga

SEQ ID NO: 6589 - DNA, 204 bp, Homo sapiens
taaccccccacacatacacctctggtgacctatttgcacagaccgtcgtcttccctccagtcttctgagggataggggacattccatcccaagcttctcccttacccacacctatccttttgaggggctttggggtggggctggggcaagcagagggactgggtcttcacttcttgggctaataaaattgtttctttgtggact

SEQ ID NO: 6590 - DNA, 82 bp, Homo sapiens
gaagctggaggctccaggactccactggacagacccaggtcttccagacctgcttcctgaaataaacactggtgccaaccaa

SEQ ID NO: 6591 - DNA, 550 bp, Homo sapiens
gtcccacatcctgggcagagggcctggtggggccccttgctaggagaagggaagacgcccgagacgctgcttccccagaagtgctggggcagggaggcccaggagatgagagagaaggtccgagtaggtgatagaagacaagggggagaccgagccggaggctgaggaaaggaagagggcacggagttgccaggagcaaaccaaagtgaagagagagataggaagctgcctcggggccaccccttgcaaagggggtgtgtcccacaaacgctgctatgggtggggtggggggctggggtgctgcgtagccagtgtttgactttcttttcaagtgggggaaagtgggagaggactgagagtgaggcaagttctccccagcccctgtccgtctgtctgtctgtctgtggtggtttctgtttcttgggaggcatggtaggatcataagtcattcccctccccttccaggcctcctgctatatttgggggacctgactggtttggctggagtcccatgaggatgtgggccctttaataaaggatagcaaacagg

SEQ ID NO: 6592 - DNA, 3360 bp, Homo sapiens
tctgcaaaataggaaagcttttagtggaaaagctaaagtccaacttattcatttgttcataatatgcaaatatgcaccccaagtattcaaatccaatgaatggacagaacctcctctgtcctcccactgattttaaatagttggttgaagaagatgaggcacttttttttttttttttttaagcattggggtcttgctctgttgcccaggatgggatgcagtggcacagtcgtaactcactgcttccttgaactcctgggctcaaacagtcctcctgcctcagccttccaaatagctaggactgcaggcactaatgaggcacttttatgaattattcattgagaggtttcagtgtgctaagttaaatcataaaagctctttcaggccttaatttcccctctgtccttccttccccttctcctcccccagtggatcacataacaaacattaagggtctgtaccagccatctttcctaaattactcttcagcaaaattgtgggaacaggattccaccacctcctaagaatgagagttgactcattgactgttaccccctgaaatattagaaagtcataatttagaagacacacctcattctcctgtccactgtttagcattggaataatttagtaagctgttattagcttcaaagtcgtccagccctgctatgaagttactttagaagatggcagcattaatgaagaagcaggctcatttcacatctgtcaggcttccttattcatctgaagaggctgccatgatggaggaactgacaggcaatttacaacgggattataagtgaaggccttagaatccagaggggccgattaggcaacaccaggggataaacaattgaggtcacactgctcggcatgggcagaagcagctcttcaggagctgtccacacttcaggggtgctcagactgactgctcctaagaattctgctgcatatatttttagccccatctcctgccactgctgacagatattgtgacagtaagtagcagacaggactgtggcttcacctcctccgggcacctggctacagtgatgagtcagttcacctgatgacaaaccagggtctggccttgccaaagcacttaagttctcatgacctggaccgcactggaggccctggctaagtcaggatgtcgtagcctcttcttggttttgccccttggccttgaaattcttttttcttgaataactttaaaaaaatagagataaagtcttgctatgttgcccaggctggtcttgaatgcctgggctccagcaatctttttgcctcaacttcccaaagtattgagattacaggtgtgagctaccatgcccggccttgaaattctttcttcgctatgtctgcatgttttttgtgttctgtatttatttcttctccaaggaaacagcctacattttccatgtgtccatgtttctgaggccgtgggtgacagtgggaattgcactaatgggggcccaacaggcctgggggctggtcttagcgctagaccttgaacaaggcacttcacctgctggtctccaattttctcctctgtaaaatgaaagagttgaactaagtgatctcaaaagtttcaaccagcccgataattccttaattctttaaaaatttaactttatatatctttattattctttaacctcatctttgttacactaatattagtcactaatatttattgagtgtttactacctgacaggcagagtgccagtttacattttaattttcacatcatttctatgatgtgggtactcatttttttaaagctttatgaaggtataatttacgtactataaaattcacctgttttaagtgttcagttgaatgatttttaatttacatagtggtgcaaccatcaatgatgtgggtattcttaccccaatttaaaagataagaaggggcagtgttaagtaattgacccatgattccacagctagtaagagcgacagccaagactccaaacctggttgatgctcttaaccactgtgctatgccgcaggtaggcagattcattactgccttatctgaaaccctttgcacagtttctattactgatttctatgtagatttgaatataacaaatttaaatcatgtccttggtaacagaactgatcacagccaaaaaaaattcaccaaatgggtttattctgtactccaatataggtgtcttcccaggtttatatccttggcttgagaaaagggttgtacaaatagatgattgcagagtttccacatccttccagatacctctgcctctagcagtcacactcttagtaagggaagttgtttgatttacttcttcccttaggttgattacaagtgaagtgcgccgtcttattcctttttcattgctggagcacaaattgaattgtgcccagaccgtatctttctcacatgaaacctggatctcacctatcccttccatgcctgattcccgtgtttgcatattttatttccacatttacctcttgtcagccctgacagagaatttggcaccccttcaagcttctcctaaacaatctatgcacacaaacacccctgagcaatatggacttcactgaagatagtgtgtaagcaaaggagaagagttcacattgtgcatcctattagacattttgttctcagaagtaccttactggccaaaccaatgaaggttttcctcttgtcctcccctctcaaggctcagtcacctcaacttctttttgcctactagatatccaatccatcacctcgcctcccctggccctagctcaattaccctcttaaacccattcctgctcagcaaaacttcctctagttcaccattcattcatttgaacattaggaggcaatttagtgacctgttgtacctgaccatgttcttaagggggaggtctcacgtctcattcccagaaaagtctaccatatatagatacatattccccgccccgccccagatttctggtgaatgaaatcacttgtatcttattaggtacatatacgcaaatccttaacctcaattctctgtcctcttcatgtcttacccagatatctcaggaagatttctcttttccttctgtttgcctccctcttcgacttacttgggagtcagcatctgaccacagtcgtgactggtaatgatgatttgtgcaaatactatcaaggaaaggacatgaattgtcttaattttagacccattaaaaaaccgcacaggcctcaatcttaaaagtcctatctaaatacccagaaatacccttcagaatttttgaagctatgcccatgtacaaaattttcttccttccctaattttaatggtatactaacaccttaggtaaataaaatatttctttactattttattg

SEQ ID NO: 6593 - DNA, 2051 bp, Homo sapiens
agctaccactctggctgctagacagcttggtggcgagggagatgactccttgtagctgatacttggcaaaagtgtcactgaaagacaagctaaatgtagttattttatcctgttagaacaaaaattctaattaaaatagttaacttgaagagtagaaacaattgtattttgaagtctcatacaagctgtctgatagagaactttcaggcagatcccaccattagcctgtaaacaaaaggtgtggcaccagccacctgggaccaaataagaattgaattgtgcttgtccagatatgaacaaatatgtagtgagtatagagtttaccaataatcataacaaatattaaagatttccttggagtcagaggaaaaaacaaacaattataatgttgtctagggacgacatgatacgctacctcctttttcctgaagttttattccattatattgacaagatggagaaagcaagatcatgaaggtgtgcaaatgattcttacggcatggacaaggatttttcaatttattttttaaactgtttccataccctttctttttcttgctttttgtttttgccattgtgtttacgtttgagacacaaccagtcattggtggcaggggcatagagtggtcagtctgaaagggaggctctcttaagagctatgtgccttccaaccagagggagacccagtagaaagaaaaacatcctgggaaatccagctaccagggccctcccagtggaggcatcttacatttaggctacttcaagtatcctcagaaatgtattctgcacccccggccccgcccatgctgagggaaggggagcagttgccaatatttgcaccatcttcacatgcacatgttgcaacaagagcttctgggaaggtaagcggcatcggagctagatcacgtttcacaattagtggttattcttttctgtgtttgttttgcactttaaaaaagagagaacacatgcaaatgaacttgcttgtgtgtatttgatggctctaagggctataaattacaaacaaaacacatcccagacattaggagttcataagtatatttaatgaaattggtggttttaggaagtcaactttagttttgctttgtttgcatgtccactggtttttttattttgatatttgtctttttttaaattttacagtagtcattgaaagttatgtttctttgcttacttcattttttccctctaattatttaagattggaacaaaagtataaatattatttatttgaggtagaatttttttcatgtagtttcttaatatatacttgaaggaaatgtttcaccttatttttggtctttgtttattcatttagaccctgcaagttgattctcattgccagattccattaccctttcttcctcataggtagtaattaccaatgtaactaagcatttgtgttctgatatctgaggccagtaactattaatatctagttctcagagcatttggaaaggttatcttaaatggctacctaaattgaaatccttttcagaaaaaatataattgcaagtaggtaggagtggcctaaattgtctaatgtaataaagtcagacaaaatgcacactttatagtttcaagattttcagtaaataaaatctgtccattcctacctggacatgtcccattaaaaagtggaagattttaaataatttctttacagatgttttatttaaacaggtagcacaatctactaatgttgtgtgatttgtgttatactggttgtaattaatttttttaattcatgaactagcggaaaatttattaaattaactattaactacattcaccttgtaaattactgtataaaacttgttgacaatgcactgactttagaaagatgttaatgtacataaatagagtgtaaataaaatagtgttgatgtactgaaatatgaactgtatcaaaagtattggtaattgtatatggggtgtacctgtttatctgttaactattatccaaacaaattaaatactgtggttgcctctatgtgctgtttttcctcatacaagtaaacacagaaagtc

SEQ ID NO: 6594 - DNA, 2614 bp, Homo sapiens
caccctcatggcaggattctagcctgcactttgggtttttaactcatctttagagcaacagtaattattatttaactcttaactgaagaaagagaagtcacaacaaaaggaagactggagaaatgcttacttctagagggagaagactgtgcggcacaggaaacagcaaacagtggggtgatctgcagcccagagaccttcaaatgcgaacactataaactccaggcttgattccaacaggcgtgggatcagatttggtgatggaaaaagcgctgtttccttgcctgctttctccaagacagattttcggaacacatttccctaccctaaagcgacatcccagtagtgtttggaattttctgttcatatagtgtttggaattttctgttcatagatattggaagagagaatttgctttatctgttgtctagagctcatcagtaacagtattcagttagcagacagaagtgtagtatgctgtatgaatattttatattaaaatatgaaggtttgagagcaggccattggctactgactgtattttgttttccttttaccattttatcttatcttgctttggaggaccttaaatgctactgaaacttacctgagaaccataggactgtggcaaacaaaaccaattcatgaagtgaattaatgatgaggatctgaaaacttggctggggctatatatactggaagttgaaggttaaaggaaaagcacaagaaactttggaagcactttttctgcatacttagatgatcttcatgggcccacagggtaccaggataaagccgaactggtaccatctactcttttgaagtgttttagtctagttattggatcagtgaaaaacattagtatacgtttttaaataggctaatttttcaacttggatcattaggcttacgtactacttgtttcaaatgtgtcaaatacaaaaatggtaactaggttgacagatactttgtatttttcttttgaattcagacctggaatgtaagtaagtgacaatgcttatggaaagccagttagttagaattggaaatctgtcttgtcattttacaagcattagattcctttcctgtgtgaagaaagcctcagtgaaacaggtctttgccataactttatgaagtgctacagaaagcacaaagaattgattcatgttcatcaatacctgctgagagtactgtcccaggaatatccagtggatggattcatcatccaggaggttcaaaagtaagatggttttcaaatcatttttgagactggttgcataacagcagggtacctgaaagagccttctgggagttagtgaactaggtagattgttttgttcacataacgccaccatcaacttaaagtgaattgtctttgttataaatgaggtcactatggacttaccctaaagatcttctgtacttctctcttccataggacaaatgataagtactacatacctcatctcttgggttattattgtagtcttgcattcatggttatgaatttaaaaataaataccaattatggaaatagtactaaaggcttgccgcacatgaaacattattttaattggtttaaagtccctttataaagagtgctacatggtttagataaaggaaacatataactattgagttacaggggattttattaattataaaatgcaatcaatttaaattacgtaggtttaagactagtcccttggataagccccaagcgaatttgtcttcagattattaaaattagtgctgtaaatcagggtgggcaattcacagcctttctgaactgactgaactagagcttgcagtgaagtgttctgctgagactgagcaccttacagatatttttctccagaagatggtgctgggtaataaaatcatcacaattagggaatggttagtggtctctactgtggcaaatgccaactgttggaattcactttattgtagaaaaacccaaactgagactcttaagttttgtttagcaatgtgtttctggtatgaaacaaactactgtgtcactgtccaggtaggaaacaattctttcaactgggttttcagcataaatgggaactgatgtagaaggcaggatttagcccttctaggcaaaagaaaagctcagttgggtttcacgagtgttcctgtgcttatattcagtctgtgcctacatgttctcatgcatgtctaacctgatttacctcttacctgtaacctaccttatcatgtggcttttaattgacagtcactcagccatttctaagcagatatagtagtacctttcagaactcacattggcaagtgtaaaaagatgacttaaggtgaagtgaggacaaaatcacattctgcatactaacctatttttttctccctttaaggtgctaaacttgcacctcatgtccactcagtaacaagtattgggacgtagagcacagcctcactcagctctgaaaggtaatacagcttgtgaggaagtgagccagcagtggcctttgcaattgtggatcttgagctctgctctcagcagatttcaggtgtaaccatttgttaactgtactgaaggtgtgtcctcaagaagaaagtgttcaaattaaaaaagctgctgccaagtaca

SEQ ID NO: 6595 - DNA, 305 bp, Homo sapiens
agccagcttggactcacatcattctatggggttgaagacaactcattccctctgaggagccttgtacatacaagccttttatttataacttattttgtattgaaacttttaaacaatactgaagaaaaaaaaacttttccgacatctgttcttggtcttttgtgacgcaggttgaagggggaggaatagaaaaagacaaactgccttggaggagataaaccaattttatgtctatcatgttatacaaaaatctagaaataatagatttgtacagaaaaaaatgataataaatgagaacacaaaac

SEQ ID NO: 6596 - DNA, 1328 bp, Homo sapiens
ttgctcagtagtcaaaaggaggagcctgtcaaaaagtagaatcataaggactgttcaaaccataaggactgttcaaatcataccagtgactgttcaaaccaaccatactttttattagatttgctttgtcaactctttcttgtattctgtgttttcctcttttttggtccactttgctgaggtatgaagtgtactactttgaactaggctgaagcatctgagtcttctaataagtgggaagggatccaacaaagaagccatgaccagttaaagatatttgcagagttacaccttggtcataagtcctttgtgaccttgattattttggcttactctttggatgagaccagacaagaaaaggattaaacgggtggctcctttaatattattattattgtttttgagacaaggtccctttctgtcacccaggttagagtagatttcagtggcacaatcttggctcactgcaacctctgtgtcctgggctcaagtgatcctcctgcctcagcctcccaagtagctaggaccacaggtgcgtgtcaccatgcttggctaatttttttgcagaaacgaggcctcactatattgtccaggctgagtggctcttttattaaccagtcattacactgcggaacagccaacatagagtacttgctctcgtcctgtgaattttctttcatgagggagtcaatatgtagtggaaagaagcatgtagcaaaaaagacaaccttgatctttaataaaaaagaagttggtttatttccaaaataaatcccctgacaaaaaacctggtgatgttaagcaattgactgtcttagagtccagcagaagaccttagacaaaaaaagcagaacccactggagtagaaaaggaagcatgtagcatatactcagtagtgaaatttaattttactgactgttaggtatctatgccaatttgttttcatacttcagttggttttggaatctgccttatacctaatatttatttattcacactcataagcatcaaatatttaatgccctcagtgggaaatttgtgtttaaactcaatggaatctaatatttctttatgtcgttagtccctgtaaaatgttaggtcacccaaggaaaggggagaaatagcaatggttgttcctaaggtattgcttgccctccatgtcttcctaaagagcagaacttggagtttctcctttatgtagagaagaagtaacttagggtgtatttgcaatgaaatattcatagatattgaaagcttgtgtttacatgaaatatgtttattatcaagaagtcctttttccaattctgtacattaaatatatgtgtttt

SEQ ID NO: 6597 - DNA, 3764 bp, Homo sapiens
taggcctggcccacgccgccgcccccgctgagtgacgcaatcgcaccacggggctgcgctccccactctgatgctcaggcccgtggcctcactgggacgaacggtgggtggggggctcaccctggtgctgcctcccgcacaaggagacctggacacaacagacacacatcacaaggcgaacacaaatggacacacatacctggccacgaacccacacctcctcagacactcagacaccactccaggctcatagccccgtcttgatgcagagaagccacccacgtggggtgtgccaggcacccccagatacaaatgcagccacgcacagacgtaacacacaggtgccaggccgtgtgctcctggaggctggctggctgtctctctcacacagatacacgtgcgctccctgggatccgggaggccctgggcttcctgtgtgtagccctggcatagacttgctcgtcagggtgttcgactctgggatgctgggccgggcagacatttatgctctgagcagcaaggaccattgggatggaggtgggcacaaagactgctgcttccagggtgtgcggccctggccgtgtgtctgacatcccataaatgtgtgtgtggtgtgactacgggcaccacaaactccgcagccttgcctctcttttctctgtggctgggctggctgcaccatgggcagggttgaggactgccccccaccccgcccaagccaatgcagacactgacctcaagaccagccacaccaagtctgtgcactgcccaccacccccttcaacccctcctacaccatgctccggggcctggggcctccttgcctggcttcttcctccagctatcctcagggaagctggagattcaagtcatgccccagaagcaaggtgtaagcatgggggcgtggggaagagggcaggagctgaagttccaggggagcccaggacccctggggacctgtacactagcaggatgggtcttgggagttggcatggggagattgtaagggctgtatctccgcgattactggtactggtgctccacccataggggccctgttctctctggggtcccacactggggtcatgagagctagttagtactcagcctgacccctaggtctggtcctgccagcctgggatgggggtcaatgtatgctacacatcttgggctcacaagtgaggctgtggaggccaggaggttcaagtatggagggtaggagtgcaacccaggagcaacgctcaaggtggccgagatgcagggaggattgtggcgatccggttgcacactggcctctgtggaggtcagggaggtgggaaggtgggtgggcctgaactcaggcagcccttcagtggcttcttcaggcctaggataaccctggccaggccccatggtcctgctctgggtcagctgtcagggagacctcccttcagcctgagccaagctgcattgggaggagaaggcagggtgagggatctgggagagcaggacgttgagatatcctgaccctctgcttcctagcctgatgatggggaacccagagccacccgctatgagcacaggccgggggtggaaggcccagtagagctgcccttccccagatggaagcttcctccaaccttcagtttggccagtgggtgggtttgggcatctgtgcccctggtggcctccaaatccttcctgggattcccccaaacccacactgatgcgaagctgttcttgaccctcccatagcatcaactcagttcagctcaaagctagaaacaccaaggtctttgaaaatgtttattggctcaggatagcttcggcatccaatctgcgaaggcccctgatggagctatttcttcctagtatcaggagcaattgagacccctcaggagtttccacactgctgtggacgggatagccagggcagacctgcatcccagagcaagcctagatccttgaaagcaatgtcaggcgtggcagtggggaagccatggaggctgggaagggcaaagtgtggagagaggagtgaccgggactggagccagggtctggggagagcaacagcaccaggcttttcctggtagttggattggtacattcactgctgccaggtacccagagatgtcatctctctccaggtagagcatcaccagctcctgtggccttgtagatgactctgtacctcagtgaagagtgcaggcaagtagagtgatggggtcagtgtccatccagtttacgctgagtcagtccatacagcaagacacctggcacttggcaggtactcctggatgttgatgagcaaggaagagcaacggccctgtcagctggcagtggtcctcacagccttcatcccaggtctgcctacgtgggagatctcatcagaaacaggaacggggatctgtctgtgcttgcaggaaagtccatttgtttttctccaagttaggtctcatctacagctcttagcttctcagtaaagaggatactctcccaaccagccaaggaataaaagctgatctgtatgtagggcagaagtgtggcaaatgcatcaggaaccggttagaacagaacagagaaaccctgactgtctacagattccaactttaatagcaagcctgtggagttacacaaacctgtgttaaaacatgtaatttttatggatttcatctcccgttgtggatcaatttggaaaaaccaaaatatgtaattttaaaaaactaaaacacatcctggtagtcccagtgatgtgtaaatgagagagaagaatagacaggcttccaaaccctgggaagaaagctgcttaattatgtgaacatcttataatgaagtctcttgcagctaaaattagattttgagtgcatgaatctgtgataatgtttgcatatcagaatgcattctccccttaaaagtagcagtagccacttggttcttagggggccccaagaggagaggagaagtgctgaggttgatgttacgactgcaagaattcttgggacacaggtttgttttctgctgacttgctcggaaacccattggaggtatctgaaatgtgatgactccaaaggggttcatttcactatagggagaaattgattcgtctgacttcctatttatcaccactcaatattgggtgagttggtctgaacaaggtggggataaagtagagtggaaataatgtagagtcgtcagactgaaaggccaggttgtagtcccagctcttatctgccatcttggacaaagcttttcccatctccagtctcagtttcccatccataaaatgggggaagtggtaggtcttgctgattgcatccacattcattcctccatttcctttcccagcaaccccccatttctgtttgggaattcatatgatctgccagagcctctccaggggtggaatacatgtcctggactaagccaatgacaccttccatctttccagctatggtgactgggttaggtatgatcttgtgagttaagacaatgaagccagagggaatttcaagacttatgggaatgctgggtagaagctgttttaattcccctgttgaatgtgaaaaaggtagtagtattcctgggtctttatgatgaccaccttgggccttgggatcatgaccaggaatcacgtgaagctgacaccactgaagggagagttgagaggcagaaagagatcaagtccttggtgaaattgtttaagtacaggatcaagccttgcttgagattggccttacctctggactttttttgttatatgagctaataaattctgtttattgttt

SEQ ID NO: 6598 - DNA, 703 bp, Homo sapiens
gaaacaagccctgtctgaccgccaaggcttcatactcaaggatgtctatgcttccccgtgagcttcctggaaaaaacccccgggagtcgtcagtacccctgggccactgctaacaagcacctaacaaggggcccagagccccctgctccagccacatctggacccatcagtgactgcctgccatagcctgagagtgtcttggggagaccttgcagagggggagaattgttccttctgctttcctaggggactcttgagcttagaaactcatcgtacacttgaccttgagccttctatttgcctcatctataacatgaagtgctagcatcagatatttgagagctcttagctctgtacccgggtgcctggtttttggggagtcatccgcagagtcactcacccactgtgtttctggtgccaaggctcttgagggccccactctcatccctcctttccctaccagggactcggaggaaggcataggagatatttccaggcttacgaccctgggctcacgggtacctatttatatgctcagtgcagagcactgtggatgtgccaggaggggtagccctgttcaagagcaatttctgccctttgtaaattatttaagaaacctgctttgtcattttattagaaagaaaccagcgtgtgactttcctagataacactgctttctcataataaagactatttgcatttg

SEQ ID NO: 6599 - DNA, 1522 bp, Homo sapiens
gattttaggatggcaatcatgtcttgatgtcctgatttgttctagtatcaataaactgtatacttgctttgaattcatgttagcaataaatgatgttaaaaaaactggcatgtgtctaaacaatagagtgctattaaaatgcccatgaacctttagtttgcctgtaatacatggatatttttaagatataaagaagtcttcagaaatagcagtaaaggctcaaaggaacgtattcttgaaggtgacggaaatacctaaaaactcctaaaggtgcagagcacaccttccaaatctctcaaaagatcagtatcttttattttaagttatctccatctgcaaagcaactgatgatattcctgaaaccccttctttgattttggaatgtagaacctaacctcaccactgaaggaaagcacatgacctctaatctagcctctgcttaattcaggcagttttgttttgtttaataaaaaacagactcctgagcactagaagcagtttgttttgcagctgtctcaatgtgctttacttgggatgaggcaggtggcggagagcggccggaaagactctataacccagttctgggaagaactccaagctgggagtcagtcacactgactctaccacttactagctgtgtaaccacaggcaagttactcaccccgtccaaacctcagttttctcttctataaacaaggttcttagaataaaatgagaattcaaggaagcacttaacatagcacctggtttgtggtacctcccaaatcaatggtagctttcccaaatgaacacaagtatttgaggctcctcatgtttgttctaaagtcaagagtccagttagtaactaaccactagttgtcctgccatgactaggtcaagtgaggccacagtgattcagtgattcttaaagccaccttgcaaagcaggtaatacagttatttcctgtcctgcagaattcaagaacctttatgcagttcctgtcctatgatttaaagaggtcagtgactccgctactctcactacatcttagagtagagtggtagagtagttgatctgagacagtaaggttccaggagatggtcttgccctactatatgtcaggaacagctagccttagaattcagtatacttggtggcccacccctaccccatgccccagtgccttatttggtctaaagcacctaacttttccattcttaatcagctgattatgctaaatgcgtaaaaaagaaaaacaccttacaaatccacagggaaatcaaagaacaattcaggtttaacagaaatagtctattaacaataaaaagttggatgaaaaagcacactaaaggttctaggggctaccataataaaggtagataggaagagttttcattttttttgtcttcactgtacaaaagaaatacattatatacatgtattaagtgcctcgtttgtatccagtttttcattttcccgatgtgttattttgctgttgctgctctgccaaggcttgctgaaggcgcatccgcttccgggaata

SEQ ID NO: 6600 - DNA, 2474 bp, Homo sapiens
atttggaaaaggaaaggtactacaaattcaaaagatttcacttttaacactggcattcctgcctacttgctgtggtggtcttgtgaaaggtgatgggttttattcgttgggctttaaaagaaaaggtttggcagaactaaaaacaaaactcacgtatcatctcaatagatacagaaaaggcttttgataaaattcaacttgacttcatgttaaaaaccctcaacaaaccaggcgtcgaaggaacatacctcaaaataataagagccatctatgacaaaaccacagccaacatcatactgaatgagcaaaagctggagcattactcttgagaagtagaacaaggcacttcagtcctattcaacatagtactggaagtcctcgccacagcaatcaggcaagagaaagaaataaaaggcaaccaaaaagaaaggaagtcgaagtatctctgtttgcagacgatatgattctatatctagaaaaccccatgatcttggcccaaaagctcctagatctgataaacaacttcagctaactttcaggagacaaaatcaatatacaaaatatggtagcatttttatacaccaacgacatccaagctgagagccaaatcaagaatgcaatcctattcacaattgccacaaaaagaataaaatacctaggaatacagctaaccagggagatgaaagatctctacaacaaaaattacaaaacactgctgaaagaaatcagagatgacacaaatggaaaaacattccatacttatggataggaagaatcaatattgttaaaatggccatactacccaaagcaatttatagattcaatgctattcctatcaaactaccaataacattcttcacagaatcagaaaaaaaaagcattaaaatttatttgaaaccaaaaaagagcccaaaaagccaaagcaatcctaagcaaaaagaacaaagctggaggcatcgcattacccaacttcaaactatactacagggctacagtaaccaaaactgcatgatactggtacaaaagcatggtgctggtacaaaagcagacacatagatcaatggaacagaatagagggcccagaaataaagctacacacctacaaccatctaatctttgacaaagttgacaaaaatacgcaatggggaaagaattccccattcagtaagtggtactgggataactagctagccatatgcagaggattgaaactgaaccacttccttacaccatatgcaaaaatcaactcaagatggattaaagacttaaatgtaaaaccccaaactataaaaactctggaagataacctaggcaataccattctggacataggaacggaaaaagatttcatgacaaagatcccaaaaataattgtaacgaaagcaaaaattgacaaatgggacatgattaaacagaattaccatttgactcagcaatcccattattggttatatacccaaaggaatctaaatcattctgtcataaagacatatatacacaaatgttcacggcagcactatacacaatcgcaaagtcagggaatcaaactaaatgtccatcagtggtagaaaggataaagaaaatgtggtggcagggagtggtggctcatgtctgtaatcccagcactttgggaggctgaggcgggtggttcacctgaggtcaggagtttgagaccagcctggccaacatggagaaactccgtctccgctaaaaatacgaaaattagccaggcgtggtggcgagcacctgtcatcccagctacttgggaggcctaggcgtgagaatcgcttgaacctggaaggtggtggttgcagtgagccgagatcctgccactgcactccagcctgggcaaccaagcgagactctgccttaaaaaaaaaaaaaagaaaatgtggcacatatacaccatggaatactatgcagccataaaaaagaatgggatcatgtcctgtgcagcaacgtggatggagctggaagccattatcctaaatgaactcactcagaaacagaaaaccaaataccacatgttctcacttataagtagaagctaaacattgagtacacatggatacaaagaagggaaccgcagacactggggcctacctgaggtcggagcatggaaggagggtgaggatcaaaaaactacctatctggtactatgctttttatctggatgatgaaataatctgtacaacaaaccctggtgacatgcaatttacctatatagcaagcctacacatgtgcccctgaacctaaaaaaaaagttaaaagaaaaacgtttggattattttccctctttcgaacaaagacattggtttgcccaaggactacaaataaaccaacgggaaaaaagaaaggttccagttttgtctgaaaattctgattaagcctctgggccctacagcctggagaacctggagaatcctacacccacagaacccggctttgtccccaaagaataaaaacacctctct

SEQ ID NO: 6601 - DNA, 217 bp, Homo sapiens
tgagcactctacagatgaagaaagctgggagcactttgaacttgaaaatcatttctcttagaactacacttgggcactgccggcccttttgctcctctctctcccctccactttttttttttgtcagctccatgacaacatgaccagctcagcaaaggctgagactgcccatgacctgaaggctccaggtggctttaaagcgctatgtttaccaact

SEQ ID NO: 6602 - DNA, 313 bp, Homo sapiens
gccctagagtgactctacctgcaagatttcacatcagctttaggactgacatttctatcttgaatttcatgctttcctaaagtctctgctgctaaggctctatttcctcccccagttaaaccccctacattagtatcccactagcccaggggagcagtaaactttctctgcaaagactagatccttttttacgctttgcagaccgcatagtcactgtctcaactactcagctctcctgctgcagcatgaaggcagccacagacaacatggaaatgagtgtgactatgttccaataaaactttatggacactga

SEQ ID NO: 6603 - DNA, 245 bp, Homo sapiens
ggccccggcgcgtttccccgctccagcccctcctctatttaaagactccctgcaccgtgtcacccaggtcgcgtcccacccttgccggcgccctctgcgggactgggtttcccgggcgagagactgaatcccttctcccatctctggcatccggcccccgtggagagggctgaggctggggggctgttccgtttctccacccttcgctgtgtcccgtatctcaataaagagaatctgctctcttc

SEQ ID NO: 6604 - DNA, 254 bp, Homo sapiens
ccctggattctggccttctcatgacctctgctgatcctcctctcctctcctgctgagccttccacctctgacctctcactgttcatgccggacctgtggatctcctgggactccgagcaaggcctgcacgagagagggctgaaaggctgctggggctgccacctcgctattcccgcataagcatctgcccccaacccctttgaccttcatctgatggacatttttatacagaaaacaataaagatttccctctc

SEQ ID NO: 6605 - DNA, 2023 bp, Homo sapiens
ctgagcgcaggcccaggccccacttgcttcctgcgggtgggaaagctgcaggcccaggccttgcttccctatcaggcttgggcataggggtgtgccaggccactttggtatcagaaattgccaccctcttaatttctcactggggagagcaggggtggcagatcctggctagatctgcctctgttttgctggtcaaaacctcttccccacaagccagattgtttctgaggagagagctagctaggggctgggaaaggggagagattggagtcctggtctccctaagggaatagccctccacctgtggcccccattgcattcagtttatctgtaaatataatttattgaggcctttgggtggcaccggggccttcattcgattgcatttcccactcccctcttccacaagtgtgattaaaagtgaccagaaacacagaaggtgagatcacagctctgctggcagagattactagcccttggctctctcgtttggcttgggtattttatattatttctgtcataacttttatctttagaattgttctttctcctgtttgtttgcttgttagtttgtttaaaatggaaaaaggggttctctgtgttctgcccctgtaattctaggtctggaacctttatttgttctagggcagctctgggaacatgcgggattgtggaattgggtcaggaaccctctctggtattctggatgttgtaggttctctagcagtctagaaatggatacagacatttctctgttcttcaagggtgataggaaccattatgttgagcccaaaatggaagtaataataaatgcctcctggaggctgtgggtgtgggggattctgtatctggattccgtatcactccaagtggaggctggcaggtttttctgcaagatggtccagaatctaaaatgtcccattaatctggtcacttgggtttggctctgctgtatccatctatagtggtagagacccaccagggctcaagtggagtccatcatcctcccacgggggcctgttcttagcactgagttgatcgctccatgggggagagatcagacattccttatcagagatgatgtgaccttttctgactctgcccagtctctatgaatgttatggcctagggaagaatcatgaaactctttagcttgattagatggtaaacagtgttaacccatcctttactacagaggcatatgggtttgaatgttacctggggttctctctattgagttgagccccttcttcctttagtgggttttggacatcttctggcaagtgtccagatgccagaaccttcttttcctctagaagggatggtgcttggtaaccttaccttttaaaagctgggtctgtgacctggtcttcccatccctgcattcctgtctggaaccagtgaatgcattagaaccttccataggaaaagaaaaggggctgagttccattctgggtttgctgtagtttggttgggattattgttggcattacagatgtaaaagattgactagcccataggccaaaggcctgttctagttgaccaagtttcaagtaggattaagaggttggttgaggggtgcagtttctggtgtaggccaggtaggtagaaagtgaggaacagggttgcctcttggctgggtggagtctctgaaatgttagaagaagcgctgaagccttgattgatagttctgccccttgttgccctggggcttatctgattatgggacgagggtagaaagtaagaagcacttttgaatttgtggggtagaacttcaacaataagtcagttctagtggctgtcgcctggggactagtgagaaagctactcttctccctcttccctctttctccccatggccccactgcagaattaaagaaggaagaagggaaggcggaggagtctataagaaggaatcatgatttctatttagcagattggatgggcaggtggagaatgcctgggggtagaaatgttagatcttgcaacatcagatccttggaataaagaagcctctctgtgc

SEQ ID NO: 6606 - DNA, 168 bp, Homo sapiens
atactcccggccagggcctgtcccagttatgtgccttccctcaagccaaagccgaagcccctttccttaaggccctggtttgtcccgaaggggcctagtgttcccagcactgtgcctgctctcaagagcacttactgcctcgcaaataataaaaatttctagccagtc

SEQ ID NO: 6607 - DNA, 1152 bp, Homo sapiens
ggatggggcagagtggcagcatcctttgtacctacaggtggatcccacaactcatttgacctttaaccttcacctgtccaagaaagagagagaagccagagatagcctgatcctgcccttccagttcagttctgaaaagtaaggttgggacctgggtacgtggatccctgagtagatcccagcatctgggccatggagaggttggggcaacaggttattgattaacctgactttatagggactgaagtccacctccagagacaagtccaagttcttgatccacccattccccctataatggcagaggacctttatgtctcttttctctcccttatacccttgggtcacagctccagttgtccccagagcaccctgggcctgggctgagccagaccagacccttgggaggtggccctatccctaggcagtggtgctaggaggacagaaggctatatgggcgtggcagaggctggttaacaagggcttagtacacgcttgctgttctgtgcccagtatgtgggcggatgacgcaagactacaagatccttgccctcaagctgctaggaacttacggttttattaggagagcagtacaagggtatctatcccagtaccaaatggtgcttcagctctaacatggaggtcagagaaagggacttggaccaataaaatgacatggaggcctaacaggttgcctgaatgagagtcacagtcacctggaagaaagtatccagacccaacctgttagctaccctcaccagcaccaaatcttcccttctcagacagcaggctctcctgcggcctaggccagggcaggctaccagccacatcttctatgagccagatgcttatgatgacctggaccaagaagacccagatgacgacctggatatttgactggccagatttgattagattgtaattggagggggcgcgggaagactttgggcccagaaccatctttctattgtttgtgttagccttaccctgtccctgccccaccttggttccccttgtctatggagccccgccttgtgagccaggaagcagcgtctcatcaggacagaaggtaggatgaagacatggggtaatgtgagagagtagaacacccccgtacctaataaaaatctttatttttttattaaaaaagaa

SEQ ID NO: 6608 - DNA, 1418 bp, Homo sapiens
ggggccaggcaggggtgggagagccagctctctctacccggcccagagaccccttcctttcctctgcagcactttaaccctctcttccctattatttccgggtggaaaagaatccctgcagcctggtagaattgggaagctgggggaagggtggtctgagcaccccctcattcccctcgtgtgactctcttggattatttatgtgttgtggtttggccgtggccatcagggtgggccactctcccctccctcttccttcccccatcccctttcctccccaccttccccagactcagctccagaataccttcttcgctgctagagaagggggattggagggaagacaggtctagactttctcagtgggacaaaccagagcagagagcaggacaggagacaagaaatccagtttcccaccaccttggactcctcccacaatctgggactttcactgaattcttgccacgcagactctgggcaaaggggtttttttttttttttttttttttttttttgagacagtctcgctctgtcgcccaggctcgagtgcagtggcgtgatcttgcttcactgcaagctgtctcccaggttcacgccattctcctgcctcagcctccggagtagctgggactacaggcgcatgccaccacacctggctaatttattttgtatttttagtatatacgcggtttcaccatgttagccagaatggtctcgatctcctgacctcgtgatctgcctgcctcagcctcccaaagtgctgggattacaggcgtgagccaccgcgcctggcgaagggagttctctcttgacccctgcagggaaaaggactcacctccctcactgcaggctcagccttccagggcaagagggaacaggaaagtatgtgcccatgtgtggcaagatggaaggacggcaggctcccgcctctaggcttggggctctaccccgatggtttcccaaggctgccaagaaggagccctaactttcttcctctcccttcctggaagggtgctgcatccacaggcttttgaccaactaaggcaaagaggggatttgaaaggctgcctggaaacactgggctgggaggagcctttggatatttttatatacgtttgaaaaggggattgagagaagaaaccaaaggtcggttgtactaaatgtatatatatagatacttctataaagtcactgctgaagacaagcatcctattgtggaggtacttgaggatgggctgagacagggaccataactcttcacccctcttcctccctctgtcctgcctcagctcaaggcctcagaatcttctggatgccattgctcatgcccctactcacatttctactcgttgctttattaatagtaaatgctcaataaattgtagctgccagtgccgggcattgctcttggcatttgc

SEQ ID NO: 6609 - DNA, 632 bp, Homo sapiens
ggtggcggtggtggcagcagtgatcctctgaacctgcagaggccccctccccgagcctggcctggctctggcccggtcctaagctggactcctcctacacaatttatttgacgttttattttggttttccccaccccctcaatctgtcggggagcccctgcccttcacctagctcccttggccaggagcgagcgaagctgtggccttggtgaagctgccctcctcttctcccctcacactacagccctggtgggggagaagggggtgggtgctgcttgtggtttagtcttttttttttttttttttttaattcaatctggaatcagaaagcggtggattctggcaaatggtccttgtgccctccccactcatccctggtctggtcccctgttgcctatagccctttaccctgagcaccaccccaacagactggggaccagccccctcgcctgcctgtgtctctccccaaacccctttagatggggagggaagaggaggagaggggaggggacctgccccctcctcaggcatctgggagggccctgcccccatgggctttacccttccctgcgggctctctccccgacacatttgttaaaatcaaacctgaataaaactacaagtttaatatg

SEQ ID NO: 6610 - DNA, 80 bp, Homo sapiens
cccgaggcccacggggcccgcgcctgcctcccttccccgccaccgggccctctgccattaaagcctccgtgcttcgctct

SEQ ID NO: 6611 - DNA, 1302 bp, Homo sapiens
ggatgctgttctcagtttgactgtggggaggagagagaatggggtactagcacccctgaagcctctttccagctctgcttcaggagctatgagagtcgggactctcctgcacctgactggagctcagatgtgggcaggaattcccaaacctgagcccaccaaggactcacaagtggtccagaaggtctcaacctgtgctgaccctgggaggggtagggaaggttctctcagcttgttcttgcctaaggctgagcacctccagtctctccttgatttggagctcagtgtttaagggcttggaaaaggggggaacatctctttacccagactagacctagcaaaaccctggaaggatattgaggtctggggaaaagggaggactttgcattttcccaatgcggtctcttggaccatggcttctactcctgaagctgggtggcctggcctggcctgaccaatgagaggccagaacactctggaacatcggaagaggagttctttgctatgttccaagccatctactgagggaggcagaaaggccacaacccaccctaggttgatgtatgggagctaggacagtccccatggcaatggggctggagcatccctcatctggaagaatcccatactgatggcagggctggccagggggaagagggtagtatctgtgggtcctggcctttcttcatgtgtgcgtgcatatcagcccgtgtggctgactgatgtataggtccctggcatcctggttcatatctgtgttgctgactacagtgtctgtgatgtccgcatgtccaggcctgtttggggttgcctagcgactcttctggcacagggtgtgtctgtggtatacctgtgaggtggttgacaattagtagtttaatcacagggtgtgtgtgtgtgtgtgtgtgtgtgtgtttatgtgcacgcatgtatatgcatcaccacgtagccaggaggggcctgttggggtttgagtcactgggatcttcctggtgagaggtaagagaagtcactgggcttagctgggcctctgaggcctgtatggaactcttggttgctgaggcaaccatggacctgttgctaggagatagctggggaaggcccaaggccgcccagggcagagagaggagacgaagagtttgggacagtgggggaggagatgggaagggatgggatttctgggtcccagagcgggtgggatactcacgcacagcttcttcactggtggggggtggggcacacattatttctcactggtcatgatttacaagaagaaaaataaaactgcttttggaaccacaa

SEQ ID NO: 6612 - DNA, 587 bp, Homo sapiens
agacgctgaaaacctcccagcctccagctctaaggggtatgcactcacaacttccacatcccttggaggggaaccagtcagccccttagtcccagctccaaagacagtctccagaccctaaaacccagacatccctgcttctggttggtgagataatgaaaaacaagaaaatccccaaaaacccagatcccccacaatcccagtgtcagatggcctcccgggaacccaggcacccacagctggaaagttcctcccctccagccctcaaccaatcacatggctgtcaacaatgccaggaaaatatctacagaaggaaagaatcccctacgccactcccaccacacccacacccccttctgcctgttccgggaaagcgggggcatctgccccagaagctattccaggccctcctatgactgatggggaatccgggaatgcatgttctggaaaactcaccccactagagtgagatcacatcagtgggttcgcgggcatgccctccctccatcgtgttaacagtttgaaatcctggcctccctcagaggcctccatcctgccaggcctaagtaaaacttgctgttcatggc

SEQ ID NO: 6613 - DNA, 689 bp, Homo sapiens
gctcagcttctgcgggcacagacaccagcatgaaaagcctaggcccctgagggcctggccacatgggaccaagcggaaccagaacaaggtcccgacaggggtagacgttccacctggggagatcccacctgccgtaggcacatggaggaggagcccagagttgggcactggcaaatgtctcctccctcccatgctccttggcttctgaaggctgaagctcctttggctgggccaagaaggatctagtctgcccactacattctcaaacaagaggacttggaagaaaagagctgctatacatcatatgcagaggaagcttctacgcgctagagaggatcaaggggccacactggaccatgtgaacagccatcctgaactgccatcagctaccacactggactctgcagggcagccatcctggatgatggaagccaccatattgacttggggtataggcccaaactgccttcgtttggtccagggccatcgtgggtgatgacgattgctctcttgcactcaaggacatttgatgctggtagtatggattatgagatggactagcccctgccccagcccagctctcacattcccctttgttttttcccataccaactgcttctaccctcccctattacatacatctttcaatgtccaaaaagttacaaagtttatatgaatgtaacatataa

SEQ ID NO: 6614 - DNA, 2061 bp, Homo sapiens
ggggtgggtggggaggccctcctccccggccctccctggcccggccactccgaaggcagggaggaggacttggcaactggcttttctcctgtggagtcgtcacacgccatccagcagcgctaaggtggacatgggattcctccctgcgatgcgtgtctttcccacgcagagaagcccagtctcttctctggatctgggcctttgaacaactggggggcgttttctcccccccattgggacaccagtcttcggtgtgtggaatgtggtattttcccgcgtggaggtgtgctttctcacaacggggtgtgttttcccatgtgcagggtgaggtttttttttgccaccctggacacatgttggccccctcaaagaatttctgtggggatttgtaccccagaatcctgttcccccatcccttctcccacctcctcccctctccctccccctggagaccctggaagtggtgtgttcacatacagtgacccttggccaccagaccacagaggatggagcctgggaagcagcgaggaaatcacagccccctcgcccctgcctcccttgcccctaccccggcgaagcatgttccccccgacgccccccttggcacaagtcagatgaagcacgttctgccggggaggccctcaccttccagagaggacagacacagatttcctgctgggggagggaggagtccacgcatcctgatgctgcctggaagcttattttcccgtggccaggacgcatttctctgagtggaaacaggttcttgcatgtggatgtgtgtttccccaggcagacggcccctctcttcccagcacttccctgcctcccccaggcctcaggcccagcacccagttcctcctcacatggcaggtgagcacagacttctagttggcaggagctgaggagggtgaacaaaccccgagggaggcccggcccttgctcccgagttggggggagggggtgtggcaacgtgccccccgcagaggccacgcatgtttgaccaaagccctcattgtggtccgaggacagccttttccccaggcctcagagcattgctcatccgtgccaaactgggtaggtggatttgagcggaaagactcccaaaatgtgccaagaatttcccagtcccaggcagggcaggggaaactaagggcaagcaggatacagggcgagggatgtggcaggtgagggggctcccgcctgtgccccttctcctcaccatgtctcccccaccctgcctcagttctccgttccccttcatctccgtccccctctttgaagctgtccccatctcagtgtcagaccagccttctcctcagctgaccaccctcctctgacccacgccccctccttgtctgaaagaaaggagccttgaatggtggagggaggcagtggggagaaaggtctcaccggacaggttgggagaatgaggtcagcggtgctggggaacagatggagggggcagtggggacagggcttgggcagacaccagcaggaataatttgaaatgtgtgaggtgactccccggagggccttgggcttgggcatttgggaaaagaatgatgtctggaagggcttaagggacacagtggacgaggggagagtcctcatctgctggcattttgtggggtgttagtgccaaacttgaataggggctggggtgctgtcttccactgacacccaaatccagaatccctggtcttgagtccccagaactttgcctcttgactgtcccttctcttcctacctccatccatggaaaattagttattttctgatcctttcccctgcctggtctagctcctctccaaacagccatgccctccaaatgctagagacctgggccctgaaccctgtagacagatgccctcagaattggggcatgggaggggggctgggggaccccatgattcagccacggactccaatgcccagctcctctccccaaaacaatcccgacaatcccttatccctaccccaaccctttgcggctctgtacacatttttaaacctggcaaaagatgaagagaatattgtaaatataaaagtttaactgtt

SEQ ID NO: 6615 - DNA, 26 bp, Homo sapiens
ctggaaaaaaataaaaaggagagagg

SEQ ID NO: 6616 - DNA, 1784 bp, Homo sapiens
aatgtagtccctggactggaggttccctgcactcccagtgagccagccaccaccacaacctgtctcccagtcctgctctcacccctgctgccacacacatgccctgagcagccaggtcccactaggtgctctaccctgagggagcctaggggctgactgtgacttccgaggctgctgagacccttagatctttgggcctaggagggagtcagagagggggatgtctgaagatggtcctggctgatcacttctttctttccacactcacacaacgccatgccttttcctgagatggcgctgggagttcccacatggacagccagggcataaacacttcccaccccggctcagccagttcctggagtcctgtgccccttttcattgccactgagccatttctagattcactggagctcaggattcatgtgtccttctttccctactctaccttctaccttggtctggacacattctggaacactggacaccctcgccagggccacttctgcactagggctctgtgctggaacccaggcatgctgccagccttttctctggatctgtcaggcctctgtcattgactcagatggacccctggtttccaagtagaaagaggctagatttgggccttgtctagctgttggctttggcctgaaccggaaccagtctcagatgaccacgggtttaaccttcttatcccagagacacccaattctagagctttatggagccgtacttccccctgaatcctagctctaggacatagatcatgactctcagcccttttacccaggatggagctggggcctgtatagccatattattgttctaagtaagttctagccccaccctcccgccttcttgagtgatacctattacggatgagttctggaaaagacccagctatgattcataaaaacacttctggatgaatcaagaaccatttcttgtttttcctagataattctctaaaaatatgattcttccatatagaatgctaagcttatttttacatgcagtttctagctccttcaacccagctgaggtcgtgccagggagacagagtctggagaagggcagaggaattttggaaggatccctggctcatagtagggaagctgggatgggggaggggtcaaaattatggcatgactgaacctgcatctgtgttgggtggacatgaatacttagctacctcagcaggaattccttccaggtcccctttaaagctgaggtccttagagtaatatgtccttaataaaaaggacaaatggatacagccttgaccctcccagtgaggagaccccaattcagcaataagtctcacccttctcccctacaggtcaggccaagaagggtgaaggcctcttgcactccagacctcatacgccccaacagcttctaattggatagaacttgctttaccttacagctcacaacctcagctgggttttaggtacccaaaaagggcctgtctagattttttcagaaaaacgtggagtgctaggggcagcctggaaaagatggggaacctgctagtgaactaggagggagacttccatagcctcagacttggatagggtaggctgagggggccctaagggagggactaaggctccaaggcaggtcacttttccttaggctgttctacttctggcttgttgcaagaggagtagatgccccctcacccacacaaaccccactcagtctccacccaactcctggcactgctcccaggggatcgggtctccactccagctttctcaattaaagacgatttatac

SEQ ID NO: 6617 - DNA, 889 bp, Homo sapiens
agactggagggttgagacccaggccccctgccagttgaagtgagagtttggtgatactgtcaagccctatccttctctgcctcttaactccttcacgaggaatctgggcctcttatttcgtttctggggactgcattggactgagggctgggtaggcaggtgtcttggacccacctgaaatgcagtatcatctgatttactctttgggatcttgaagaagctcttttgggtatcaacacctaggtcgccagtgaaatagaacacagaacaggaactagattataagccttatgaggtcaagaaatgtgacttggccgggcgcggtggctcacgcctgtaatcccagcactttgggaggccaaggcgggcggatcacctgaggtcgggagtttgagaccagcccgaccaacatggagaaaccctgtctctactaaaaatacaaaattagccaggtgtggtggtacatgcctgtaatcccagctactagggaggctgaggcaggagaatcactcgaacccgggaggcagaggttgcagtgagtcaagatcacgccattgcactccagcctgggcaacaagagcgaaactccatctcaaaaaaaaaaaagtgtcttgttcactgcagcatgcccagtgccacgcacaggtgctgacctatagtaagtgcttaacatttgttgaataggggaaagaaatttccggaagtaaatacagcaattaataatgtttataagctgggcatggtcgctcaggccagtaatcccagtgacttaggaggctgaggtgggaggattacttgaaacccacagtttgagaccagcctgggcaacatagtgagaccctgtctctaaaaaaataaaaatagaaataaagtagtgcttattgtttgc

SEQ ID NO: 6618 - DNA, 70 bp, Homo sapiens
ccagcaggcggatgtggggtgtggggcagggcatggagggagaggaataaagagaaacagagtccaggaa

SEQ ID NO: 6619 - DNA, 173 bp, Homo sapiens
agacgctgttcctaccagtggaaagtgcctctgtgggcgagcgggacgtggggggccctgctcgcccctcgccagggggactgactgtgtgccctgggcctgaagccccccttctggaagacctccctgttggttcctcctctacgcccacccgcctgcccccgcacaagttg

SEQ ID NO: 6620 - DNA, 433 bp, Homo sapiens
gggcacgtggggtgcggcagcgggctagggcccagggcagcttgcccgtgctgctgtgcagttcttgcctccctcacggggcgtcacccccagcccagctccgttgtacataaatgccttgtggcagagctcccggtgaacttctggatcccgtttctgatgcagactcttgtcttgttctccacttgtgctgttagaactcactggcccagtggtgttctcactcctaccccacccaccccctgcctgtccccaaattgaagatccttccttgcctgtggcttgatgcggggcgggtaaagggtattttaacttaggggtagttcctgctgtgagtggttacagctgatcctcgggaagaacaaagctaaagctgccttttgtctgttattttatttttttgaagtttaaataaagtttactaattttgacc

SEQ ID NO: 6621 - DNA, 775 bp, Homo sapiens
ttgtgttataaaaagtggctcccagcttggaagaccagggtgggtacatactggagacagccaagagctgagtatataaaggagagggaatgtgcaggaacagaggcgtcttcctgggtttggctccccgttcctcacttttcccttttcattcccaccccctagactttgattttacggatatcttgcttctgttccccatggagctccgaattcttgcgtgtgtgtagatgaggggcgggggacgggcgccaggcattgtccagacctggtcggggcccactggaagcatccagaacagcaccaccatctagcggccgctcgagggaagcacccgccggttggccgaagtccacgaagccgccctctgctagggaaaacccctggttctccatgccacacctctctccaggtgccctctgcctcttcaccccacaagaagccttatcctacgtccttctctccatctatcggaccccagtttccatcactatctccagagatgtagctattatgcgcccgtctacagggggtgcccgacgatgacggtgccttcgcagtcaaattactcttcgggtcccaaggtttggctttcacgcgctccattgccccggcgtggcaggccattccaagcccttccgggctggaactggtgtcggaggagcctcgggtgtatcgtacgccctggtgttggtgttgcctcactcctctgagctcttctttctgatcaagccctgcttaaagttaaataaaatagaatgaatgataccccggc

SEQ ID NO: 6622 - DNA, 539 bp, Homo sapiens
ggggccctggtctccccgcagtcgtcccaggctgccggctcccctcgacagctctctgggcacccggtcccctctgccccaccctcagccgctctttgctccagacctgcccctccctctagaggctgcctgggcctgttcacgtgttttccatcccacataaatacagtattcccactcttatcttacaactcccccaccgcccactctccacctcactagctccccaatccctgaccctttgaggcccccagtgatctcgactcccccctggccacagacccccagggcattgtgttcactgtactctgtgggcaaggatgggtccagaagaccccacttcaggcactaagaggggctggacctggcggcaggaagccaaagagactgggcctaggccaggagttcccaaatgtgaggggcgagaaacaagacaagctcctcccttgagaattccctgtggatttttaaaacagatattatttttattattattgtgacaaaatgttgataaatggatattaaatagaataagtcat

SEQ ID NO: 6623 - DNA, 484 bp, Homo sapiens
gcctcgtaccccagaccccaagcccataaatgggaagggagacatgggagtcccttcccaagaaactccagttcctttcctctcttgcctcttcccactcacttccctttggtttttcatatttaaatgtttcaatttctgtatttttttttctttgagagaatacttgttgatttctgatgtgcagggggtggctacagaaaagcccctttcttcctctgtttgcaggggagtgtggccctgtggcctgggtggagcagtcatcctcccccttccccgtgcagggagcaggaaatcagtgctgggggtggtgggcggacaataggatcactgcctgccagatcttcaaacttttatatatatatatatatatatatatatatatatatatatatatatatatatatatatatatatatatatataaaaatatataaatgccacggtcctgctctggtcaataaaggatcctttgttgatacgt

SEQ ID NO: 6624 - DNA, 520 bp, Homo sapiens
ggggctgtcctgccacccagccccagccagggctcaatctctgggggctgaggagcagcaggaggggggagggaagggagccaagggatggacatcttgtcattttttttctttgaataaatgtcactttttgaggcaaaagaaggaaccgtgaacattttagacacccttttctttggggtaggctcttgccccaggcgccggctcttctcccaaaaaaaaaaaaaaaacactaatccatttccctaacctagtaacctccagatcccagaggctctcctcacctcagctgagctcctttgaaagtgattcaagggactatgtcactcagcctcatttgctggaccaaatctggagggagaacccctaaaacccctaagtgaggttgcccagggggttgtccccaggtggggggaagcaggggagagaaaatggtagccatttttacattgttttgtatagtatttattgattcaggaaacaaacacaaaattctgaataaaatgacttggaaactgcc

SEQ ID NO: 6625 - DNA, 599 bp, Homo sapiens
gcatttgcttcaaaccccagggcactgagggggttggggtgtggtgggggggtacccttatttcctcgacacgcaactggctcaaagacaatgttattttccttccctttcttgaagaacaaaaagaaagccgggcatgacggctcatgcctgtaatcccagcactttgggaggctgaggcaggtggatcactggaggtcaggagtttgagaccagcctggccaacatggtgaaaccctgtctctactaaaaatacaattagccaggtgtggcggcgtaatcccagctggcctgtaatcccagctacttgggaggctgaggcagaactgcttgaacccaggaggtggaggttgcagtgagccgtcatcgcgccactaagccaagatcgcgccactgcactccagcctgggcgacagagccagactgtctcaaataaataaatatgagataatgcagtcgggagaagggagggagagaattttattaaatgtgacgaactgccccccccccccccccagcaggagagcagcaaaatttatgcaaatctttgacggggttttccttgtcctgccaggattaaaagccatgagtttcttgtc

SEQ ID NO: 6626 - DNA, 653 bp, Homo sapiens
agccagctactggagtcattccgtttccactcattcacccaacctcagggttctccccatctgagccagcctgctggtgtgacttactcatcctccattcctctgcacttgcagactttctgagccagggttttcttttagtggaaacaaatggttgatggatccagatccttagaaaaggagaggatgggggtagagtctcccaagccaaaattttgacatttgagtgctttcgtaagccctgtacatgtactattaattcagtcattcagccaagcctcctcctctagcagcaatttccagctgtgtaacactatcctgggcaaatgttttaccctgtcctccagcctccctgcttcccttctggccctggaagactgagtctggacggcagagtggagggactgggaggctgtggctgcctccctccctcagcccggctgggactgtctcccggaccccagtgctggggtgggggaagggggacggagaatgactcaggcagggccccagggtggggtgaggaggttcctgctctggcaggtctaggcggaagggagtggagatggggctggttcctgctgcagtgaggggaacagatgggacaataaagactggagactcagttgaataatacaaaactgtttaatact

SEQ ID NO: 6627 - DNA, 1876 bp, Homo sapiens
ggccccttcctcccaccccatctctctcctgtggatgctcctggaatgtccctgaccctgcctgatccctccctcacccaccccaaaggtatttttgataacagagctatgacttgtctgagcctcacatccttttccttgacttctcaacccagcctgaagtccattgcggttccgtcactcgcctttcccaccaacttctcccaacctcagatcagtcagacagggagctgggctaagatggccacggaggagttaggagcctttctagttctggtttagctgtgagagctatccactctcctgcctgcatatcccctgagagttataggaagtgcccactgacccacccacccacctacaccccccgccacacacacacacaaacgtgcacacgcgtctcatttgacccctttgcttccagagatgaatgtggcactccctccttccattcctaagctctggccaccgtcccttgatctctcatactttctccctgtctacacagtcgccatcttggtgactttgaatttatctggctcctgggcaggtcttctcctcctctccatccctattccctcctctgaaatgcacccctttgtaattgaggacaaggtggttctgtggccttttccctctttgctggcacgttctgcttctcaccctctggtgactctgtgagctgggaaatgagggactggaagtgaggcctgtgttgacccttcctgaaaatcctctagcagcccccgacttcagcagtttctttctttgtttttttgagatggagtttcgctcttgttgcccaggctggagtgcaatggtgcaatctcagctcactgcaacttccgcatcccaggttcaagcgattctcccgcctcaggttcccgagtagctgggactacaggcatgtgccaccatgcccggctaatttctttctttctttttttttttttttgcattttttagtagagatgggggtttctccttgttggtcaggctggtctcgaactcccgacctcaggtgatccacctgcctcggcctcccaaagtgttgggattacaggcgtgagccaccgcgcccggccttcagtttcttcctaggccgttctgtcacccaaatagctgctacccagaggggcggggttgacctaggctgaatatccactttgtttttatggatggctcccttcccccattcgccttcccagaatatccttcaagttccacttcccagggagctctgggggaggggcggccattctggctccgtccccagtggccaccttggaaacatcggctggctttgggactattccacctccttcccctgagcccagatctgcccccaccatcctttctctggcttcttttagcaagttatcaactaatcactaactccttccttttcctctgcatgccagcctgaaaattccaaatctagcctctgaatgtcttggctccatctcttcagacccctttgcctttaaaaaaaaaacaaaaacaaaaacaaaaaaacccataatgcccacagaatgtcaaatgaggggcctcctgcctcctgctctgaatattctgtagctgtagaggcattttaaccctttgtcctccagcatcccttcacttcctcatcctctctaacctcctttttctttttttaatgctgcagcctccacactccacccacaggtggacccttccctttttctctagctggatctgtgtttcttcccttcgggcccccatgttttcctgcacccgccctaccatggtctctctctgcagttatttaatgcctgtgtcagatctactgtaaaaagaggattaagtaaaataaaatgagagcaattatatatataaatatatatcatacacagag

SEQ ID NO: 6628 - DNA, 15 bp, Homo sapiens
aaaggtttttatgat

SEQ ID NO: 6629 - DNA, 1797 bp, Homo sapiens
gggctcctctcacgtggctatcctgaatccagcccttcttggggtgctcctccagtttaattcctggtttgagggacacctctaacatctcggccccctgtgcccccccagccccttcactcctcccggctgctgtcctcgtctccacttttaggattccttaggattcccactgccccacttcctgccctcccgtttggccatgggtgcccccctctgtctcagtgtccctggatcctttttccttggggaggggcacaggctcagcctcctctctgaccatgacccaggcatccttgtccccctcacccacccagagctaggggcgggaacagcccaccttttggttggcaccgccttctttctgcctctcactggttttctcttctctatctcttattctttccctctcttccgtctctaggtctgttcttcttccctagcatcctcctccccacatctcctttcaccctcttggcttcttatcctgtgcctctcccatctcctgggtgggggcatcaaagcatttctccccttagctttcagccccccttctgacctctcataccaaccactcccctcagtctgccaaaaatgggggccttatggggaaggctctgacactccaccccagctcaggccatgggcagcagggctccattctctggcctggcccaggcctctacatacttactccagccatttggggtggttgggtcatgacagctaccatgagaagaagtgtcccgttttgtccagtggccaatagcaagatatgaaccggtcgggacatgtatggacttggtctgatgctgaatgggccacttgggaccggaagtgacttgctccagacaagaggtgaccaggcccggacagaaatggcctgggaagtagcagaagcagtgcagcaggaactggaagtgccttcatccaggacaggaagtagcacttctgaaacaggaagtggtctggctggaactccaagtggcttagtctgggggatcaggaggtgggaggtggatggttcttattctgtggagaagaagggcgggaagaacttcctttcaggaggaagctggaacttactgactgtaagaggttagaggtggaccgagaaggacttttcccagtcttcagtggcacttcccaagatctcccttcccttgtgctctgtgctgattttaggacagctaagatgactgccatgtgctgtggcaggcctaatttgtcttgttctttcctttccatatcccagtataatctctgttaatcaacaggactaccccaagaacccatgtgctctcccgagtaacccagatggctgtcttgttcattccatcctacatttctgactcctttcagactcaacacagttcccttcttagtgaccaaaatggtggcctactggctggtctagctgacagtggtacttagcaaaggccactgtttccatagtgaccagctgatacctcttcctgccctctagtgtgcaattgggtgttgcctcagtttcctcccagctcagttttattagatcaaagctgttgttgggcaccaggttggccacctcaatcaccagccaagatggttgctttgtccaccagaggtcaagttcacctctctggtgctgtagttcccagctccttcctgatttttctaatcgctccttctggggaacaggaagttgatattgccatggtggcggggtatgccgtcacctcagtagttttactgtaaaagggaaatttgaacaacaaaaaccaaaaaaaataaaaataaaaaacttcaaaagttgac

SEQ ID NO: 6630 - DNA, 207 bp, Homo sapiens
gacctcctcctcttctccgcttgagagagagggtcagggactccaggagctaagacagatgttgcacctaggactgaggccggacctcactcagactttgaccttggccgaatttgtgtgatgtggccctggagatacctagttgtgttagccataaaagtgaaagagttgtattggagctcagtgctgtaaaacacccgcgacaac

SEQ ID NO: 6631 - DNA, 383 bp, Homo sapiens
tgaccctcgagtcaagaacaaccctgacggctgccctccctcttattcggcccaaggacttgaagcccggcatcttccgacctgccctgcccccacccctgcctgagcggagtcctagcatccccttgggagcagcagcgtcagtggacccagtgctgagaaaagcccccacatcccggaaaacccactttcctttcacgacccacatctcaatcctgaacatctaggctggaacctgcacacctccccctcagctccgtcgtgaatgggacaacaatctcgtgccctcgttttatggtgcagcttctctagtatttctggggctggggggcggggctggaggggaaggagtgtccacgcatcaataaagatttaacgaactg

SEQ ID NO: 6632 - DNA, 2670 bp, Homo sapiens
gcaaggagatgtacactcgtgtagactcaagacgtatttcgagtttggctttttctgtgccttgaggaaaagtggtggggccgaggggtgcctggacccagatctccactcctctccaggagctagcctgtgcccttctgaagtgtaaaggccctattccctgccttcattacagtttgctctgagaaaattagtgaattaatctttgggaatgatacaagaagatcaagtaccttggtttagggagatgtagaagaggatagtcagagttcaggcagaactgtttgatagttaagagagagtagttctacaggggtgagggatggaaggacttttttggcaatgatggaaatgagatgtctgcaggaagatgggatttacaaagaaataggaaatgtttatcattgaccatacaaagctggcttatcttacttgtagaagagtgtttggcagctgaaacccaagggaaagaaaggaagtgcgtcattataggcaattcaggctagatattatactaggtacttcatataccctcttttttttttttgcccccaacaaagagaaggggtcttgctctgtcacccagtctggagtgcagtggcaaaatcatggctcactgcagcctggagctcctgggcacaagtgatcctcccatctctgccttgagtagctgggacttcaggtgcacgccacaatgcctaattttttaattttttgtagacacagggtctcgctgtgttgcccaggctggtttcaacctcctggcctcaagtgatcctcttgcctcagcctcccaaatagcctcttcaagacaactaccccataaggtggattaccattactatgttacagataagtccttcgaaactttggaaagtttaatagctcaaagccacactaggtagtaaccactagagccagaatgcaaattcaagtctgcccaactccaaagtccatgttctctcaatataaagggaccatctcaatgtctaatctcatgttaacatttgtagccactgctctcagcaagtatttgggatgtggctttgtcctaggatccctgcacaataggaaattgtggtcctattgtatagtttgcagttattgtctctggaagggagtttgcagagttctcctgtggcgaagaggaggcaaggaaggctaagtgtcagttaagcaatagctattggggctacttctttgttaatcccataccccagatttctctcctgaccttttggggcaaagaggtgggtatttactaacttgaaggaaaactagagtggggaaaaggccggcaaattagtgacactttggcgagggagaaaaaggaggcagtttgccacttggagaagatgaggaagacagggttgcaagacggtgactccaaaagagggagctcgacaggggtaatgtaaacagagatgctaactaagtcagaaaactctcctggtgaccaaaagagaaccactattgggggtaatggctagatttggtctcctttaacttaaggaggggagatttgagaatgacagacagttgaacttcctggcagcagcaagcaaaaaacaaatcaggaagagtttagtgtgtcttctggcaggggacaccagggcccagcacaggagaaggtggcccctgtgagatactggtgggctatataggcattttctgaggggctttgggaggcatgaacaaaggtggaaacattgctgttggcttcggcagtatctgaatttactgtgagatggagggtttaaatctaaccccatggaatgcaggagtccatgaattatctaaatcgatcattttgatctttaatcaactctgcaattatgtgtaccttgtttgctcaattaaaccctgaactatttgagaatgaaagctatgctgttcctctagtgcaagcctcagggcctgtcctgtgcctacaggatgtccccattctgccaaaacctgtccctcttccagagactcctacttcaatgtctcttgctagaaacacatccctttcctcacacatccagtcactcatcaagtgtaatctgtctcctaaatatctctggaacctatcttcttttctccaagttaccatcacctcttgtctaaactgctacggaaacttcctaacctgttctcccatttccacttctgacttccatgctgcaatgagagtcagctatgaaaaacaaacctaaacatcgaactttccttagcttcttcagtggcttccaactgcttttggaataaagtcctaaattcaaagatcttgtataaatcaggctcatctcgcaacacccctctttgttctctatggcctagacacactggctttcagttcattacatgtcttgcctcagaccctcacacactgtcctctctgcctgcaacactcttcctttcactttccacctagctgatcctaaatgttccttcctcagggaggtcttttctgatttcttggtgggtcaagactttctgataaatcagttagcaccatgcattttccagagtttttattacaattgtaaaattatggctgtaataggctggctgcgctgctagattgtaagctcacgagggcagagatcttgttcacatcttgctcactgctatattctcattgctgagcacacagttgcagctcaataaattttgaatgaactccaa

SEQ ID NO: 6633 - DNA, 618 bp, Homo sapiens
ctggatcccaggcctgcccttcacccaggccccgtccccgaggccgacccccagctcaagcgctggggcctgctgccagccctccaccttccccaccccttgggccatcactgggctaggaacccctttgcccctctctgcagctcctctcttcaagaagggccctttgtctttctccactcccacacacctttcccaccaagccttgaagactgtgctggtgagaagaagtctgggtgggagatggctggcagggtcttccaagtaccttcctcccacactgccaagtatacacaacttcccagtaaatggttgtggggaggaaagaggtggagcctccccagccgtttccctgcagaatcagctctgtctcatgtggaagtggagaatcagccttgcctggcctttaggaacttttgtggggaagagagctttgaagagaggagggggactttagagagggatgaaaatgagccctgggagggaggaagggacgaggaggggtggctgcatgttaccgtcccctacctctccccacgtggagggtggagcagttatgagggaggaagtcaactgctgttcagcctcagaataaaggtgccgttcactggctcagtt

SEQ ID NO: 6634 - DNA, 67 bp, Homo sapiens
gcccccctaccctctctcctctttgttctctcattgttgttattttaataaatgctcattagtctgt

SEQ ID NO: 6635 - DNA, 212 bp, Homo sapiens
ggtctgggccctgctccctgtcccatctgcagtggaccccaggcacccccctttgaggaggtggggtgaactgctccttggcagggatttgtgacactgcattgctgggctgtgttcctcgggctcttctggaccttgcaccgtggataccaggccatgtgccatggtatttgggtcctgggagggtgggtgaaataaaggcatgctgtctt

SEQ ID NO: 6636 - DNA, 559 bp, Homo sapiens
atcccaggggaacacaggcccagatgacatccctttgaccacatcgctctaggataactggcacccagagaaaaggactcctcagaaaaaacaggcccccatgtgcctctcctgggacaaccagactctgtaactcacccccaccaccatacacacacacaaaaacagaaacaaaatcaaaacagagaaagcagaaaatctaccaagaacagagtctcaggacagaaccactgagtcttttggaggctccaagcctcaaagtgcccgcagagcccaccttgagggttttgctagttggttttgttttgcgttttacagccgtggggggaagcacataatcccgccccagggcccactagcatccactgattggaccttatggtcacccaactcaaggacagccaccaagaagtggctgccaaagagactgggcgcagtggctcatgcccataatcccagcactttgggagatggaggcgggaaaatcatttgaggtcagaagttcaaggccagcctggacgacatagcgagactccacctctaccaaaaaataaaaatt

SEQ ID NO: 6637 - DNA, 1221 bp, Homo sapiens
ctggccacaggggctcacctgggccccatggcttttcacctaagtgggtcctgccccctcccccatgaccttcaggagcaccccatattatttccaaaaatatcttggacagacaaggaccaaaatgccaaaatctcagcggactcgataatctgcctgctgatgttccttctgtggctgtgtctattttcagttctgctctaacatggcatgccctttctcagcccaggaaacagcatgtggttcagagaaaagagcgacaaggaaaagttaggactcctgaggtccgaacaggggcttctgttgcccacttcacaacacccagtgatcaccggtgtgcaattgcctccttggctctgagggatgttttgcgctcccttttctcatcattggggttagcgggtgcagacaaattcagcaatagtatgcagatcagcccctcaccacctcattgttctcatctggaactgaaactttctggatttctcttgaagtgctacactgcactgaatgtaaggaattgttgcttgtggaagtttctcagcgtttctggctgtcttagggctggcctcagaacccagcattcctgttatttgcttctaaattagcagctctctttttttttttttttttgaggcagtctcactctgtcacccaggctggagtacaatggcgtgatctcggcccactgcaacctctgcctcctgggttcaagcaattttcctgcctcagcctcccgagtagctgggagtacaggcacacaccaccacacccagctaatttttgtatttttagtagagatagggtttcaccatgtctcccaggctggtctcaaactcctaacctcaagtgattcgcctgcctcggcctcccaaagtgctgggattacaggtgggagccactacagctggcccagcagctctgtttctgatagaggtggttggggctctcatccctagatcctaaccctttagtatgctggaattctactcttcacttactgcattgactgttgttgattagttattattgcaaagcactgtcaccggcctcagggagtttatgtgtaatagaattaaaaataatagctgtgtataacacttagctcaagccacgcatgtgtgaggcatttggtatgtatctgaattaattctcactaaaattcagcaaaggacttgatagcccctccccgccttttcaataaaggatgaatgaaggttg

SEQ ID NO: 6638 - DNA, 149 bp, Homo sapiens
aggcgctgaagcactgcatgatgttgctgagaacttggggactcggttctgtgagggggaaaagaggttgaaaagagggtttcctcttatttcttccctgtgcgtaaacataagacaatccctcttcagaataaacttgctttataatc

SEQ ID NO: 6639 - DNA, 1517 bp, Homo sapiens
tgcaggctgaggagggggcacatgttgggagacacctaccagtgtggcacggagagaacaaagcccattcatccattggattcactgtcagtggagatactacctctcgtggcaaccatagagatcgagcttcaggacagagcagccaatgaaaacggccgcctgaacccacagcaataagaatgaatgaggatgccttgaatgtgtggccaatggagacagaggcttagtgcagagcagccaatgggtactgagctggctgagcctatggccaatgagtattcctgctatgctcagggccaaggaagacaaatctaggtcatggcagttgaaaaagggcctcattggagataaagtcgtaggataaaattgggaacaggaatgagcaggaagccaatcagccaaagaaaatggtgatctggacccaagagaccagtagtcaccctgcttgtttctgcagcaatgactggtcctgtcttttgagtctgggaaatactagtttccattcctggatgcttcctgtgccctctcaagccagttcttctcttccagaagaattcagagtatgtgtctcagaaaatctgtgtgtgtacatgtgcatgtgtagatatgtgtgtatatgtatcaggaaaggcattctgctgactgtggtgtgtgtgtggtgattgtgctcctgacccacaaatgactgagtgctccatttcttcctttaccccccatttttcctattattcgctccaagaaagatgctaagtctgagctccagaagagactgtgctgggtgtggcttggcacccaggggatgagagccctgagctttgggtctcttggaggctagggttctgtggcagttgcagggcaatgttatggagcagccaacggcctggcagaggagcccaagggactgaagatggccagtagctgggtcctgaggcccctgaagtctgcagacccttctccttgccccaaacactggcctccataattcctgcctgcagatctcccaacttgaactataatccaccagccagcctcagccttgagctttggaaccacattagatcctgcatctgggtgaagaaacgggagctgtggaccacaggccagccagtgaacctcctgggctttcttgcctttgtcctgatcctctcacagaaacactgggccaaacagtggggagagattggagagcgggtgtggctgcccaaccccatccagagcatctgcttccagatgagccagtgcctcgcatgataccagaggaggcgagggacagagacagcaaggcagacagtggctggcaggggggcccaggcccgggacgaggcctccccttcagctcaggcacagcaacttgcccaggactgacactgtcaccctgactgcaggaggcacagggactccgggagactcagagggcgaagagcactggcatttggcatgtccatgacattggagactcccctagcagggtgcctgacgtgtggggaaccctcagtaaatagtggtgcatttgt

SEQ ID NO: 6640 - DNA, 193 bp, Homo sapiens
tcttttctgaactcctggcaccaagttctgtccattcatctgaccccatctcctcatcctcccccagcccttgaataggttggtcctcatcattgcaaggaatgagaaagggaggattttgcactcctctgctttctccctgccttgattgagcttgagtgatgtggaataaattgtccgtctcttctttctc

SEQ ID NO: 6641 - DNA, 1216 bp, Homo sapiens
acggctttgaccccgctcctcctcctcctggtctgggctcctcgcgtccatcgtcagcgccgggtatgctgcctctcagtgtgtgagtgcctagcctccaggtgggggctcctgccctcctccaacaacccaggacacccacgcctcacccctcggtgcctgggcccagccccgtgcccctccgtctgcctccgcacggctggcagagggcaggctgcatgcagtggcggctactgggccctgcccagccccggaactctgcgcgatatcaatactggctattttctcttctcgccgtagtgccgttggtttcacatgattgcacttttgtgggtcgcaaggtgatacatacgtgtattacttggtcactggatgcagaagtacccattcatcacacctgccccatagcccccactctgctgtactgataggatttagttgtgttttaggacattgcaaatcttctagaagttctcccccaaatcaggtcaatgtgtgccctcctgagctcccacccaggcatctccagtgctcatgatcatgtgtcccccaactccacccctcacagtttgggcctgtttctggcaaagagtcaggaaggttactgaattagggaacattttctgcaccttctgattttacttaagcagctaccattccatggacttgcctcccagagcagcacaatgcccgtctgagccccacgtggcaggagcctctgggacggggcacacacaggcccagcctctgtgctgtctcctcctccgtgcgcctcagactcggggtgagggaggcgggcagcctctcgccagccttcccgtccttcagttcaacgacatctttggagtgtttttgttttctcttccaagggccgtcccgttgtgttaggaagggtgagtggctggttccagggtgggccggtgccagctccggggtggactgaacagcggcggctgtccctgtgcatcctttgattactctcatgctgcatttactgtttacatttgttttattgtacataggtttgtaaacattattgcctgagatatttgtatataacttgggctttgtagcttttatttattcagaacgcatacggcatgttaatgactctgatggtgtcctcctctgggcagctgtataggatcatcatgtggttacaaaaaatacttccctcaaaaaaattcttttaatgtggaaacaataaatttcacag

SEQ ID NO: 6642 - DNA, 4032 bp, Homo sapiens
cgccgaggcagcgggcgggcgggcgggcgggcgccagggcggggccgagcgagagcgggcgccttggcccggccgccgcggacttggcccgcgagggctttcccaggtggggggagggagggggcggggccgcacggcgcggggggcgggaccctcggcggcccctccccctacccccaccctgcgcgctctgggcgggagccgcgtgcacgcggggcggggtgcgccgccggccgggccctggagaaatgacgagacgtagctacctcacggggctccttccagagcagagacgcgcttccctgggcctgggcgcggccgccgtggaggggctgggggcagcctgccctggggcccgggggcgggcgcagaatcgcacaactggggccccaggcgcggggcgtggatggcgcggagacgtggacgggaggagaactgtgaattctcaagcccgtagtgtgggcggggcgcggagcacccaccaaaccaccacccgacacgcagccgacgggatccccccctttctccccggccccttctagcagttccccgcgggccacctggctgtcacagcctggactcctccatctgaaggggcctggcagcatttggggagtggacagctcctgtccagccagcatgccccaggcggcctctgtctccactgctacctgctgagtgggtcctactgggtgggggcttggggtcggtgagtggttcacctgtggagagaggagaggaagcccctgctgctgcctgtctctgcccctgcccctgcccctgcccagcgtggggctggcccatccggaaggcagtgggcccagggacacccctgagaagcccaagccgggtggtcaccgcctcatgctggagctgcctgttggaggaggcatcgcaaacgcaaaacctcccagagagtttccttttggaaacttggaaccagccctttttatgacgttttccagggggagggggaggggcactggctgggtttacggcagtgacactatttatgtaaatgacatcagctcccgcaaggcccctcagcaatgtcaacagctggaaagggcctgaacgggcttggagtctgcaggctgcgaaggcacttgggcctggcttggggccgggggcttgtttgagctgggatggggtttgctggctcagtgaagtaccagagtgcctgagccatgggtgggcaggggcacaggaatgaccaggttcctgggggccaaggaggccatgctggcttctccaagggaaggcacagaggctgccggcctgccccctacagctgtcttgggtctggcctgggccacaccttgaccgtgcctttccagacggtctttgtggagtctgcccgtgccctccactgtgccccagccctccttccaaaatctcctagagacacggtcctcaagcaggcagccccttttgttctgacctcctcacacagggtccattcctgtgccctggggcctcctggctccctgccttcctgggctctctgcactgcccgggcctctggcccacatcctcacacccggcgcactgaattaagaggcctggctcccctcacagtcaggaaattggtttcactttcccggccagagtttggctgctcaaaagggtcataccaagtatgaagctcggcccccggtggtctggcttccctccgccttccccacatttacccgcatcacggctgccatttattgagcacctgctgtgtgccaggcactttacccacatgctcccagtgtgtactcatgacaaccctgtgggacagggactcattatcaccagcaaggagactggagtacacgtgcccaaggtcatgctgcaaattggtggcaggactggggctcaaactccagagcccgactttctgaccaggggccacgctggccctcactgcactccagctctgcagcctacccgcccaatccctgtgcaggctgggagggtgctcttgggggagtggccaccgagcccctggccctggttactgcctcttgaggacactggcatctgggctggagaacaggagcccggggtggggtagggcatggggacaatcacatcttcagaggaggcagcaaagtggtgcgggatgcagggacggacttgccagatggcagctccaggttccaggaaggcaggccttggatgctccgaagaggtggtagaaaggtgtttttagaaaggtgttttggctgcctcagggtggttggagagactccaggagagactggcagaggtgcctcaggggcagggagcagacagacctgccctgggaaggggcatttggcttccctgaatccagcccaaggctagaagacagggcccctctccaagctgtcagcgcccctcggatgcccagtgtggtgtgctgggcgccatcagcatcacaaggcactacgctgctggggcggttgtcctatttctgtctatgccagtgtggtttcttcaccctgcccagaagggctgtggcagccccacgatatcccaccctgggtctgggtctcacgggtgtcctgtgaggggcttgcatttgtggtggtctctgaggccacctcagcaacggagctggcgacacgccaagcaacaaggcatcttgcggaaaattcagccagtgtcctgcccctcccttcggctcagcaccccgcagggcacaggctgtccgcccggtggtctggcccttggggaatgcgtcagggtgaccagatccaccatgctagcagccaggtcactgttgggattgcacggtcgtcacgagctgcctttcctatccacacacccagccaggacccagcccaccactcccgactgcagccccggcctctgcggtgagcaccatccttgggaaagcacccctcctccactccggtgccccactccaaggagcagagggaaatgggaattgaggtgtcccggtttgtacagttaggaagggatgtaaaacggaactagattttgattttgaagagtgtattaaccagaattgtgctatgtaggtgtttgtttgaagaaaaacataccagattagtctttgtttttgaaacagcttccccagttgtcctttttcttaccagctgggtggtctggtgcccctgacagctgagtgcctgctttacggacacgcagtaatgccgaagatttgcgggggaggacatagggctgtccccgggattcacctgctggctgtggtctctgcccactgcttctgtccttggaaagcagggcaggaggcagcatccccaggggcctctatgtgggagggagggacacctggggtcacaacccagggagggagggtcacagcccagggaggctgggagctgctccaaggccctggaactctgcctcagtcgcggcatgctggagaggggtacggacttactttcttggagttgtcccaggttggaatgagactgaactcaagaagagaccctaagggactggggaatggttcctgccttcaggaaagtgaaagacgcttaggctgtcaacacttaaaggaagtccccttgaagcccagagtggacagactagacccattgatggggccactggccatggtccgtggacaagacattcctgtgggccatggcacaccgggggggatcaaaatgtgtacttgtggggtctcgccccttgccaaaagccaaaccagtcccactcctgtcattggacgtttcttcccattccctcctcccaaatgcacttcccctcctccctctgccccctcctgtgttttggatttctgttcactcagaattgtaaatgtttagttgtgaccatgacgtattgtttgggtcaatgtccctttccaatgcatactaatatattatggttattatatatgaatatatttaatgacatggaaaaagttgtggattttctttctttccttttttttgggggggggtggggggttggttagagttgtaatggacccagatggaacttgtaatgtgggccccacatgatagaactaaattcagatatcattaaataaactcttgtacacta

SEQ ID NO: 6643 - DNA, 261 bp, Homo sapiens
agctgatgagatgtctctgagccttggcgttgcacgcagtcctgttgaagactgagtttagataactccaacactagtcttcatttctcacagctctgtttttgttcttgagtcaatttttctctttttctttatagaatgcattttatattcttaaattgcatattaaaattgaagtatgttcaagaataatttgtgcagactctaattagaacttttaacattttgaataaattcttagttgttggttttctgttataa

SEQ ID NO: 6644 - DNA, 413 bp, Homo sapiens
tctaatttattttaacttgatagaaaatgagctttgtgtttgtccctcctaaacaaaaaaataaaaatcctctgtctcattgtttagtattcagcttgcataacaaaatgtatttatagtttcagtgtgtgatggttgataaaatactcagaaatgttattttggatcatgtatccattgtaagttagaaacaaaccagggaggaaactgaggcaggggtgtatagtcctcataaggggcatatagtcctcatgagggatcttatttggccctacctgattttttttaactttttacaaggagattgtattcacatgtgttaactatgtaacttcaagttcagcatataagctcaggtaagctttttctattcaccctgctgtgtaaatgagctttggacaatttctgctcag

SEQ ID NO: 6645 - DNA, 575 bp, Homo sapiens
ccggcggggcagggccggggctgctgggcgtggcagagcagagcgggggccgggaggggccaggagcagagcttctagccttgccactctcccttcccttgtcccctctgtaggaagtgggggtgggccacctttgcccaaaaagccatacccccggggacacagccccgatggcctggtccaatacacttagacccaggaccaagagcaatcgctcttgctcctccagaagaatcagtggggagtgaggagggggctaggccccattctcacccccgaccaccttcaccaactccctttccgtcccgcgcctccttctccccatccgggggactcagctgcaggttctgtcagcagagagacccttgcttgactgtggtctgaagctgcctgggtttgaaggggccagcgggtccaatcagtgggctgaccggataggctactcggtctcattcattcatctagaaccgcatcacagaaatctcctagtgcctaaaaactgcctgctcgctctctcagagccagggagctgctgtgtccataagcacaataatgattcttttcttgcctgctgg

SEQ ID NO: 6646 - DNA, 219 bp, Homo sapiens
catcctgcagagccaccgagaaaataaaaaagctgggcttggaggctgcctagagggacaggtgggtgaagggtcaccacagacacttagaacggtaagaaaccatgagcactcacaattctgtagaattcctctagggaacttggagaggtgtgcctaaggtgaggctgagctgaaggaatgtgggcccaggtttcttaataaaatgatttactcttc

SEQ ID NO: 6647 - DNA, 2473 bp, Homo sapiens
tatcgctgctacatcagactctagaaaaaagggctgagaggaagcaagacgtaaagaattttcatcccgtatcacagtgtttttattgctcgcccagacaccatgtgcaataagattggtgttcgtttccatcatgtctgtatactcctgtcacctagaacgtgcatccttgtaatacctgattgatcacacagtgttagtgctggtcagagagacctcatcctgctcttttgtgatgaacatattcatgaaatgtggaagtcagtacgatcaagttgttgactgtgattagatcacatcttaaattcatttctagactcaaaacctggagatgcagctactggaatggtgttttgtcagacttccaaatcctggaaggacacagtgatgaatgtactatgtctgaacatagaaactcgggcttgagtgagaagagcttgcacagccaacgagacacattgccttctggagctgggagacaaaggaggaatttactttcttcaccaagtgcaatagattactgatgtgatattctgttgctttacagttacagttgatgtttggggatcgatgtgctcagccaaatttcctgtttgaaatatcatgttaaattagaatgaatttatctttaccaaaaaccatgttgcgttcaaagaggtgaacattaaaatatagagacaggacagaatgtgttcttttctcctttaccagtcctatttttcaatgggaagactcaggagtctgccacttgtcaaagaaggtgctgatcctaagaatttttcattctcagaattcggtgtgctgccaacttgatgttccacctgccacaaaccaccaggactgaaagaagaaaacagtacagaaggcaaagtttacagatgtttttaattctagtattttatctggaacaacttgtagcagctatatatttccccttggtcccaagcctgatactttagccatcataactcactaacagggagaagtagctagtagcaatgtgccttgattgattagataaagatttctagtaggcagcaaaagaccaaatctcagttgtttgcttcttgccatcactggtccaggtcttcagtttccgaatctctttcccttcccctgtggtctattgtcgctatgtgacttgcgcttaatccaatattttgccttttttctatatcaaaaaacctttacagttagcagggatgttccttaccaaggatttttagccccaaatctctcatattcgctagtgtttaaaaggctaagaatagtggggcccagccgatgtggtaggtgataaagaggcatcttttctagagacacattggaccagatgaggatccgaaacggcagcctttacgttcatcacctgctagaacctctcgtagtccatcaccatttcttggcattggaattctactggaaaaaaatacaaaaagcaaaacaaaaccctcagcactgttacaagaggccatttaagtatcttgtgcttcttcacttacccattagccaggttctcattaggttttgcttgggcctccctggcactgaaccttaggctttgtatgacagtgaagcagcactgtgagtggttcaagcacactggaatataaaacagtcatggcctgagatgcaggtgatgccattacagaaccaaatcgtggcacgtattgctgtgtctcctctcagagtgacagtcataaatactgtcaaacaataaagggagaatggtgctgtttaaagtcacatccctgtaaattgcagaattcaaaagtgattatctctttgatctacttgcctcatttccctatcttctcccccacggtatcctaaactttagacttcccactgttctgaaaggagacattgctctatgtctgccttcgaccacagcaagccatcatcctccattgctcccggggactcaagaggaatctgtttctctgctgtcaacttcccatctggctcagcatagggtcactttgccattatgcaaatggagataaaagcaattctgactgtccaggagctaatctgaccgttctattgtgtggatgaccacataagaaggcaattttagtgtattaatcatagattattataaactataaacttaagggcaaggagtttattacaatgtatctttattaaaacaaaagggtgtatagtgttcacaaactgtgaaaatagtgtaagaactgtacattgtgagctctggttatttttctcttgtaccatagaaaaatgtataaaaattatcaaaaagctaatgtgcagggatattgccttatttgtctgtaaaaaatggagctcagtaacataactgcttcttggagctttggaatattttatcctgtattcttgtttgaattcctcctctatttaagatatatacatggaatcgaagtgtttatgtaatagttctatccttttgcctgcaggtcagttgtaataaatctaggatgtgatgatg

SEQ ID NO: 6648 - DNA, 1472 bp, Homo sapiens
catgacaccgcccatcctgcctcgcgtgtacatacatcacgggccctaggaacgccgccaggagcagcgtccatgagcttgccaagtgttctctgctggctctttcctgccactgccaacacgaggttggaatttggcagaaaattgtgatctccagtccgtgtggtgatgctggtggtgcaggttttgtttgttcctttcgggtggtgacttcggccttttgtttgacctttgccttttgactttgtgcctcttttgatccactttcagcctccatgccagaaaacacccacctctccatccaaggctggtcaggaacgtcctttgcagggtcggggtggtgcgggagaggctcactttgcctggttagacccaagggctgctaccttttccttggacggctcatgtcaggtcttgcaggatcagtttaatggccacagaaaggaagcaggacagcagggcccctctcacccacaactggaccaggtccaggattctagcagtcctggggcactgacctttgccagctacctgggggagggcttgccactggaaaacctttcaggccgcccccatcagtgggctccaaagtaaatggctgaaaacaaaaatgtttcacttcctaacagttttcctttttccactgtgtgactgaaagctcctatatcattttatatttctgaatctataaaacaaaacaaacaagcctgacagtgtctggaggagccaaaggtggcctccctgtccccaaatatattggctatatgagagtaattttacccctctacgtacctaaaggcacccagttcactagtctgtggggtcctggagcctgtctcttctttctggaggttcaaactgaatagcaataattacgttacccaaagcatgtggaggaaaagtgaaaccagccacggagacgctggcccacgggctcggcctgcggtgtggcctgctttgctcaccagcgtcagccgctcatttccttctcatgaagtcccatctggtcatggggacgagggccgggagggcaccgggtagccttttcacacttggggattaggggagtgagaaaagatttgggccatgcatgcaaagtcaaagtttaaaattttatccttttcaaatagatgatataatatacctatacatgatataatatttgtatatatgaaatctctctatatttgtttaatttgagccattcaatctaaaccaatgtacaggtgtacaatgaaaaatttaaatgcttagttatttttcccaacacagtgtaaagtcaccctcctctgagagtgggatgtgcagagttttgatgttgcagctttgctcacttcctggcaagggcaggtcatgcctcaatttgtaatgggagtctggggtaagggtgggggttgaaagttgttatctttaaatacatgtacaaatcgttgtcaaaagtaacgttattaaaatagatttattatccctga

SEQ ID NO: 6649 - DNA, 1462 bp, Homo sapiens
gagcactgggacgcccaccgcccctttccctccgctgccaggcgagcatgttgtggtaattctggaacacaagaagagaaattgctgggtttagaacaagattataaacgaattcggtgctcagtgatcacttgacagttttttttttttttaaatattacccaaaatgctccccaaataagaaatgcatcagctcagtcagtgaatacaaaaaaggaattatttttccctttgagggtctttatacatctctcctccaaccccaccctctattctgtttcttcctcctcacatgggggtacacatacacagcttcctcttttggttccatccttaccaccacaccacacgcacactccacatgcccagcagagtggcacttggtggccagaaagtgtgagcctcatgatctgctgtctgtagttctgtgagctcaggtccctcaaaggcctcggagcacccccttcctggtgactgagccagggcctgcatttttggttttccccaccccacacattctcaaccatagtccttctaacaataccaatagctaggacccggctgctgtgcactgggactggggattccacatgtttgccttgggagtctcaagctggactgccagcccctgtcctcccttcacccccattgcgtatgagcatttcagaactccaaggagtcacaggcatctttatagttcacgttaacatatagacactgttggaagcagttccttctaaaagggtagccctggacttaataccagccggatacctctggcccccaccccattactgtacctctggagtcactactgtgggtcgccactcctctgctacacagcacggctttttcaaggctgtattgagaagggaagttaggaagaagggtgtgctgggctaaccagcccacagagctcacattcctgtcccttgggtgaaaaatacatgtccatcctgatatctcctgaattcagaaattagcctccacatgtgcaatggctttaagagccagaagcagggttctgggaattttgcaagttatcctgtggccaggtgtggtctcggttaccaaatacggttacctgcagctttttagtcctttgtgctcccacgggtctgcagagtcccatctgcccaaaggtcttgaagcttgacaggatgttttcattactcagtctcccagggcactgctggtccgtagggattcattggtcggggtgggagagttaaacaacatttaaacagagttctctcaaaaatgtctaaagggattgtaggtagataacatccaatcactgtttgcacttatctgaaatcttccctcttggctgcccccaggtatttactgtggagaacattgcataggaatgtctggaaaaagcctctacaacttgttacagccttcacatttgtacaattcattgattctcttttccttccacaataaaatggtatacaag

SEQ ID NO: 6650 - DNA, 529 bp, Homo sapiens
gcagacccgggctatgtaccttacccacgtggcttatctattgacagagattatatgtatgtaaaatgtacagaaatctattttataataatttatttttaattcataagcaattaattcactaagctgcctagccacactctttagagagttagcttcataatctgttaacattccaaagtgtttaactctagtatttcgttctcttcttcacaattgatggtgcttctattttttcttctcccctacctgttatatttaaaacaaagaaaagcacaacttgagatttttgttgttacgggtattcagccttcagtcaccgtctgagttctccagttgctgcctccttgtcttgtcttgggtctcccattccagcttccctgtctcttcctgcctgtgtacctcgtaggaacgctgagctgcctcaacagggctgtattctgaagggcaggcctcatgcagcagcctccttgcagatgtggtgtcccgtccaatgatgtagcctgaaagccacagccctagggttctg

SEQ ID NO: 6651 - DNA, 634 bp, Homo sapiens
aaaattactgaatgtgaagaaatgtaagttggttttatcactgtattaaatacttgagtgtttaggtggaaggcgcatccataatatgcatgtgaggaccaattctgtatgcatctaatttcatttgcgtaatacatagttttgagccataagcaggttctttatgtccgttaatttgataattatgaaatctagccagcgatttcaaaattttaatctccaacgtcccaaatagctatctgtggaaattcaagaagtccctgagagtaggtagcagtacgaacattgtgaaatccagttttcccctctcttgtttatgtcagagctttgttgtaagcctctcactttgtaaggaaattcttattgggtaggttaggctgagggcttacatccttatcatcaggaagacacaatgttgttatttattactccttgagatctagatacacatatggtataattcatctagagtgtaatttcttttatattagccttaaaaaccaaaaatgctgggttcaaagtccttagaattcccttcctccctcaacaagctgctgtctatgttgatgaccataactgggatgtataatatttacagacaactctaagttacgttcacatggattatgtacat

SEQ ID NO: 6652 - DNA, 542 bp, Homo sapiens
ggagcttgctacaaaatgcacattgctataccatagcctggggcttgcaatccaaggctggcaaggattcctgcacgtcaagggcctcaggtgactttcatgcacacccaagtcagaaggctctcctgaatcctggatgtcaccttcctgcccaaaaaaggaggaacgagggtcaaccagcagcagaccagtcacaaaaagagatgaaatgtgagtgcatggccttcctgacacccagacaaaactttgggcacaaagccaggctgcagctctggccactgacttggaccagggatgcccccatgcaggccggtgtgccctggctgctcttgacaccctctggctcctgacaccctctcttcggctgcctgcgttaggaagggagaacctgccagttttcagaagaaaatgtagctttattataacataggaaagactgcaagttattacgggaggaggaggaggcctgaaacagctcctgaaaatgagagggaaaaggaaggtgtaaatatgttggtaataaaatctccaaccacagcata

SEQ ID NO: 6653 - DNA, 554 bp, Homo sapiens
tctaggctctcgcctcttccaggagaagatacaaatccacaagaaacaaagaggacacggctggttttcattgtgaaagatagctacacctcacaaggaaatggactgcctctcttgagcacttccctggagctaccacgtatctagctaatatgtatgtgtcagtagtaggctccaaggattgacaaatatatttatgatctattcagctgcttttactgtgtggattatgccaacagcttgaatggattctaacagactcttttgtttttaaaagtctgccttgtttatggtggaaaattactgaaactattttactgtgaaacagtgtgaactattataatgcaaatactttttaacttagaggcaatggaaaaataaaagttgactgtactaaaaatgtatacttgttgccaggaaggtgacctcaaaaattaaaagtataattattcggccgggcatggtggctcacacctgtaattccagcactttgggaggccaaggcaggcggatcacgaggtcaggagttcaaaaccagcctgtccaatatagtg

SEQ ID NO: 6654 - DNA, 1260 bp, Homo sapiens
atccatttttgtgtagggagaataatgtctagtaatgtggaagaatagctatcattcctgtctctgtggcacccgatcaatggcttaaatctgtcgtttttgatattcaggtttcctcaatttagccttagtgaaggaggggttgtacacactgccatttttgtattttaaaggaaaaatgactttcattcccaactgattatgacctttcaggatgtcgtcaagtgatgctttcagttgtaacacgtgacttggtgctgtccctgctggtctaagtagaactgtagattcatatgggctggtgttcctgtgcgctgtgggtgtggtgattcagcctggcatttctaccataagtttttggtctgctgatttgctgccctgtcttctcttactttactttatcaatacctggcaaactgaccagaattaccttcctcatggcaaagggggattatggtgaattgttgttcttatagtctgtttcatgaagcacaagtggaatttaatacataaaagagaaaaatatcttagtttgctaccagcatccagcatgaagttgtaaagtggggattaggcacgtgacagtatagcacccatttgaatttaaataaaagtgaaccatatttatctggttatataaaactaaaaatgggggtgtttatataaaactaaaaactaagaatgatgtaaccttttgtctgtgttatctgaacactctacttcctttgcagccttagtcacacaactgagtcatctcaagtactctttaaggacacacagcccaggctgttctgagtcagaataggcccctacaggtatattttaaaactcttcgtaattctaatgtgtactgctggtatagctgaactactgacctggatcttagtcctagcctttttgcttttgcaatttcagtatcttcatctctaaactagggaaacactgggattctttcttagctgtgggggaaggtatttggttagatgactttgaatgaatagactgctgtgctgaaagagctttatcacactgtctcaaagtatgtaaagatacataggtggatgctcttactgcagcagtcatgaatacatttttagccatttacctaaggaaaaagacagtttttctaggtaccatgaaggaagattgaccctgttggtatgcctgtgggggtgggatgtgagtgggactgataaactgatacttttggttcgtatgtacatactggaagaatcttcataataaatgagactacacaac

SEQ ID NO: 6655 - DNA, 360 bp, Homo sapiens
agccttgaagggttttcagatccaaggaacaaaggggaaaatagacaaaggagtgcagaggacctggcctggcactggcttatttacctgagctcaaggagatccccgctggagcagcctctgcaaaagggagcccatgtaggccaggggctgtccaaactccagcttcttcccctgggaaaaaacccaaagaaccaaaaacaaaccaccccaaggataataatagctacactgctagcttctcaagttcttgtgaaaaacaatttacataatgacacagtagatgtggaacacctagcccagtgcctgggcaggtccctattatcataaatgaacataaaagtgctctaaaaacactcc

SEQ ID NO: 6656 - DNA, 142 bp, Homo sapiens
ttcttcagtcatggcattcgcagtgcccagtgatggcattactctgcactatagccatttgccccaacttaagtttagaaattacaagtttcagtaatagctgaacctgttcaaaatgttaataaaggtttcgttgcatggt

SEQ ID NO: 6657 - DNA, 112 bp, Homo sapiens
tggcccagatgcagcaggaggccagaggacagagcagaggatctttccaaccacatctgctggctctggggtcccagtgaattctggtggcaaatatatattttcactaact

SEQ ID NO: 6658 - DNA, 659 bp, Homo sapiens
gttatattcccagaggatgtcagtcccaaggaccagtagctgccatcagtttggattctgaaaactaactggcatcaacactgggtgtagaaacatgcttgccttatgtatcagaggacatgctcagcagatccaagagatatatttggcaactttttctagaaaaggcacattgggtatcattcattacattcttgagtttttttgggtttttttttttttttttgagacagtcttgctgtattgcccaggctggagtgtggtggcacaatcacagctcattgcatcctcaatcacccaggcctaagcaatcctcccaccttgtagctgggactacagctcacagcacacctggctaaaattttttttttgttgagacggattctctatgttgcccaggctggtctcaggctcctgggctcagatggtcctcctgcctcagcttccaaaggcacaggccaagttgtagctttgtcccttgccatcatgcccaacaagaggttctataccttttaatgaattgactttcataaattggttatgttggtgggcaaagttctttaagctggaaattgtaaattcctcctgaaatgttttttcatgcagttaccatgaactaatactacaataaaggatggtcttgggtgtcaattcttgaa

SEQ ID NO: 6659 - DNA, 737 bp, Homo sapiens
agtctgaaggaaggcctgacggtgcaagaacggttgaagctctttgaatccagggacttgaagaaagactaggtgtgtcccatccaagttgagcacgcgccttccccagcttgcagcagcacaccccaagcgctgcttttcacctgtacctttgttttattattattattattattgctgttgttgtcatcgttaactgtgggcatggaatgcgtgaggctggcttctgggttgtccacaccactctctgctgtgttgacttcctgttgtcttcatcaaagcttttttccgtggtattctaaaattaggccagcagtgggggctgggagggcatctgtgttagtcctttcctggctgtgacccgccacactcactgtcagtattaaggcccagcagcctgttgataagctaccctgtctcaccatgtgctggtgtggaaacggggcccagccagcacgcctcaaggtagatggaatccccactggtcagagaaaaagctatgcggacactccagcttggcctgggtcacagcactgactcctcacccgctagtctggctgttaagaggagaaagtgcactgccttccagcccaggaggaggacagcattttgtatttgttccactgatgcagcttagaaccacacccctgagagtcgtggcaaacctttcacaacctggaaaatgttgaaagcaaccattcctatttttgtttgttttttattaaatcttgcacaaa

SEQ ID NO: 6660 - DNA, 714 bp, Homo sapiens
gctggactgtgcttcgggctcctctgtggggctctgacctcagggctcccagctcggggcctgtggggccagtatgctggtctgggagtccctcctagactcctgggccccatgacctcctgctgcatgtcccttcccttccccagccctgccaggccttaacctgatcacggggcagggctgggccctctgggcgcttggacatagacacgtggtcccaggccgttcagcctgacctcaggcagcaggcaccaagctgccagaagcccaggggctcaggacagggaggagttgaggccactgttcagggggctggtggccgtctccactccctaggcaagttctctgaggcagaagggggttccctgttcccagagtctgcagccatcagcaaggaggaccaggaacccggcgactgaggtgcttccaggtggggacaagcccctcttggtctcagccacagcaccccttattccagctgccctgcccaacctgctcaccccacatgaccttctgtgtattcagcaaacactcactaggtgacagcggccaccaggctctgtgctgggggacgatactggccctggcctcgaccagcttagaggtttctcacacctctgttcccagggccccgctcagggcccagcagagagtccgtaggcttgaacatgtgttgagtgcatgaaaaataaatgctgttcatgtgtgtagctc

SEQ ID NO: 6661 - DNA, 1725 bp, Homo sapiens
agtgaggctgacttccttagaaagagggggaagccaatggcctgtctccccactaccatccccaaacgctccttggggcgtggttcctgtggaccccagctcagctcgtcaagctgcaggggcggggctcctgtgctgctgcgcgcgcttcgcctgtgcgggagccagcgcagagcttggctgcgccgggggttcctcgtgtagatccatatgtctagatgcataataactggagtgcctgctggtggaagtcagaatgctcctggaggctgcagagggggtggaggactctcccctgcctctggggagggggccatctgctgcgcccggccccactgacagatctgaagagcacagtaggaagggaggcggctcctctttgcttccttccctctctctcctcccacccccataggatcagtgtgtaccaggtacacattgttcctgttaacagcagcttcttgaaacatttgcatagaattcactggacgaattaagcctgcactcatatggcatagaattgtgagagaatgttttgaaaggccagagggtggcctttttccccaaacagtttggttccttttatgtttgagccagtgaagggaactacgctttgggggcttcagcctagagccctgccaggcagcccctggctccaggttccctgcctcctagcgctctcctcgccttcagctcttgctcccttcctcgttcatcaccctcagtcagtgcccaagagtggccaaaccgcttcacatctgcagtgcttccccagggttgacaaggggccgtcctttccacacaggccagaagaggtcttcaggcgaaccgaccttcccccttctggcatttcagattccccttgctctggttaaaaggtctttccctcgtggcctttgcacttgcggcagcaacgtgtactacactgcagaagggttcagtatgcaccttgtgttgagagagaggcaaccctgggggccagttcaggtggtccccaaccataagctaggtctgaaagttacacagccaagtttgagctcttaaaagttgatgaacagcctcatttccccagcttccctgatttcttccagatgggacgttttatttgtgtgctctcccttgactgtcagattgaagtaagagcagttctctccgttgcctctcgaggaggaggtgcgaagtcctggagtattgtttgggtctcggaatgggcgcataacctgcgctgaccagtttaggggcttagcagatgcctgccagctgacctcgttggcaggagggttgggtggagatgtttttagcagagcttccattagtgtagacctgtagccacctgtcagaaggtgggtggcatattggggacctgggaatgtgtgaaggaggagatcaaatttcagtggctttggacagaaaagaaggctctggatttaagcgggtggtcacctgtgagaccaggtctaccttgggactgttatttaactgaatcagttatttccttgaaatttcacagtagtgggtgggcctgttttaaggctctgacagataccacgaaacatgaagcacgtggaactacaagacccccggggtctttctgagtgcaaggctgaaatggacaagggctcctcacgggggtggagggagccggagcctgccttgtgttccttttttgacttgtgacatttttcaaacacataattaaaaggacttatgctctgctgtctcagg

SEQ ID NO: 6662 - DNA, 1468 bp, Homo sapiens
taatccaccccaacggccggaggagccgccggagcccgcctgcccgcccgccgccgaaggagaggagccgcctgcgcagcccccgggcctttgagctgctcccagcgctggtccagagccgatccttgatccgggtcccggatcgtggatccggccgcctagggctcagacttgcggccccgggttgggaggaaaacccgttccggagccgcctgctcccggaaccggacggcacagggcgttcttgcccaccccaggggccaggcttgcggagggggagcccgcggagcggccagactccccggggcgctcagcctccggcgagggtgggagacggctttgtcctggggacactttccctctggaatctcaagacgacgtggcacacattccacgtgggtgctgccgccaccccagtcggtcgtggcgtgcagctgggagccctgggcttgggggtgggggtcgaaacagtactggaagaggcggagggcggctcctagctccgtggactaggcgggggagaaaggaagcctttctgagagcgggctaggccggcactggagaggccggagcctttggaacaaaccgtgcggaacgcgtccaggggccttcccgcccagcctttgccagatctctcgtgcggttcgggcaaagccggggtagacctgggctatgctcagttaggggttgcgggatccccgagtgtgggcgggactgggacaccctttggcctctgtttgtcccctttccagtcctccaccccacccctggagcccagcctgggagcgcaaaacccaagaagcggccagaacgcacctccggctccggcggacgcgcgaccgttgtgcaccaccagggaccgccgcgcctactctgcacgggagcagggacagcgctagatttcgtgtacaaaacctgtgtacccctctatatatatgttacatagaatgtatatatgttgggaacatgctcgcttctcccgtgtgtcgccgccgtgcgtcgtgcgcccgcaacagagccccaaccgggcctttgccgggtaaggggctaccgcgacgccacttgtccacgcagccaccaccggcccgggccagtccctgccagtccgtccgcctgtccgtccgtgtcctcagctctgtccacgcttcgataggcctgacgcagcccccagcccagggccgccctagcaacttcctgtacatatgactgtaaaatggtaaacgtgtgtattatatctggcctcgttatatagtgtatatatatgtatacatatacatatatataatatatatgaagactgtaaatgttaagacgactagtgttcttattagtatattgcttcacactgaagattgtgtgtatcgagctgtttctaaaagatgtttattttccttaagagtaaaaaacagtcattgcattcagaaaaaaaaaaaaaaaaaagtcaataaagatacaacgattgttttgg

SEQ ID NO: 6663 - DNA, 187 bp, Homo sapiens
atgaatgtcagccacaggagcttcttcaaaacatagcaccagccccagccaggagaaggaagtgcacacgcctcacccgcacctctagagagttgctgggcatctctcaaccgcgatccccaacaccattcttcccccacccctggaaaaacttccaaaagtagagaaaataaaggactcatttcac

SEQ ID NO: 6664 - DNA, 3161 bp, Homo sapiens
caacggttcagaacagcaaccaaataaaactgaacttggcaaaaaagaactttgccgagaaaattgtgtacctgccagaaccaggagaagtgtgttcctgtttcttcacgagcagactcgcatcacaaagcatgaatgttaacccacagaatccaaggagcatggctggcccgtggggcaggtggagggagcagtcttcgttcttcctcccctcagtggcagtttggtcttcacctgtttttaagctaccttaaacgcacttttccttcctgcacagctaacttctacatcactgaaatgcccattccttcctccgtcccacctccagccgaatagaaggtctgctcccggatcaccctcagccttggtgctcagtggtcccgaggccctagacccccaccccccgccagttgctttgtctggtagctcaagagaaggcagagccccagcacctctgtgccccccagagctctgtgcagggagttggccagctgccgcatcatcggccaccaagggcacaagaggcggaggctccagtccctgctgggctgcctcagtcttcagtgctgattgtgtcacgggtcagcgtgcgctgctgagccctgtactgttaacagtgcaaagctagtgagtagctgtcaggttccctgggcctgccatcagggatcactaaatttaaggcttccagatccctggcaggaacagattccagtcctgcttactcagtacatttgctccaaacttttcaacttgagggcaatactaaacttaaaaataagagtttttttattacaaaattatttttatggtccctttaacgaggaccctatggcaaatgcacaattattcagaattacattttatcgttttcacattgaaaacagcaaatgttgacttagtaatttttatatcgatatctatatgtatatgtatatttaatcaaccagcagttttgaaactagtcatcctggtacaaaagttttgcagcattgcctaaattatagtgctcaacacaagaactgtttttggggccagtttagcatttgtgccgcctccttttgctactcaaaacagcaatgcttggcggcagccttccatgaggcagaaggggtcgtcgttctctgaaaacagtgactctgaaatgttgggacaggggaaggggtgggaaacatgaacatgctcaaataactcgaggctcacgtgccaaagtgtgtgtgtgtgtgtgtgtgtgtgtgtgtgtgtatgatgttttgtttttttaaatgttttaaaagcttaataggttggcatcagttgtagcccacaaacatggctagggctttggggatttggcatttttctggtggtttacaagacttactccgaatacaagaggaaaagctttaaaaacaagattgcatcataacccccaggagcaaagcaacctggaggctgcatatccatgggcgggcagcataagagaatgtgaagcccttcagtgagacgagacgagcaatgggaaaccttttctgttcttaagaagtgactttaattttattgacatatgtactgtatgttactgagattgaatgttaggggaagccttaaggtagaggtatttgggaaagtagccagtgggcacttgtgatatctaaaatctgttatcccaggactgtgtacagaggggcaacctacccattcaggaaggtcagggctttggaaccctaaaaagttggcccgatgacttaaagggaaaaataattcattcccagagatgagtcagaacagtctcctcaatcctgaaattcaacaaggcatcagaagggctggctgtggtcaagcccagctgctgtcatgtgaggagatgctcactgtggtcttgttgagctgatggccttggttgagctgatggacaagtgaaggaggccatggggctgtgctgtccttcctgccgtacgtgccattccactctcttcagctctcccctcaacagcatgcgagcccataccttctgcatttttccaggcctgtgagggatataggcctccccttggagcactgagtccggaggtcatccctgagctcatccacggctcatgctgtggctccgagtagtggtttgagtgggcaggaagggccatttgcaaacactgctgtgttctagacaaacaacccaagtcctatggcaggatttcttccttccttccttttttacccaggtgatgaagtgcacccattgtactgggaagaatgaagaggtgatacctttactagatccttcagacacatctatgagaagatttgttcatttaaaagtctgcccactgaggatagggaaaggattaaggatttttccacctcctcttagtaactcctgaattaccaacatcaacttctttctctccgttcctgaaggaactttggggaatcatcttcatccgtagttacgctttcctgaaccttctcagtggtttacatgcctctgaaactatgtgcaatatttttggttgacacttgtatccatccttaagaaattagtgcagattgcagatgttctgtcttccatcccaaacaagcctgccatgaggtaggatcctaggggtttggctgttcttactccactgctcagaaagcttccattctgctgtcctcagcctcgaccctcttctgtgctggacttccacccacccacccttttcaagtttagatagtgtttcagctgctgtcccaaagtaacaaaacaatacctactgttaagtaggaagtcaatctgtgtgctggttttgttggttatgtggaaatcacaaactccagaggagcaaaggggtttttcaatgtcttttgctttcagaaacagagaatataatattctcactaaggccttgaattgatttttttctcataaaatagtctgataagctaatttttaaaaagaaatgccattaactgtgttgtatcgtggtttaaaattactaacaagttgtgggaaagaaaaataatatttgattttgaatcttaaatgtttttaaaaattagacttgaatgggcacaaagtataaatattttgtttctttatggaggacatgtggaaggagtttgagggtttgggatgggagaagtattttgcagagctatcaatgtccaaataatttaaaaaaaaaaataaaggtatttaagcagtg

SEQ ID NO: 6665 - DNA, 738 bp, Homo sapiens
cggcgcctgccgggcctcccgcccacctgcctcgtctccctggggaggtggtcccactgggacacacaaacacccaaacagaaaaatacaaatacacgtaccccaggaaggggtccctcaagtctctgctatttacagaagtttcttcagtaggcagacgaagagtgtgttggggcaaaggggctcggttggaggcatttcccataagactgagccctctcatgggggttttgagtttgtagtgctgagcctgcatctgtgcctcccagccccctgcactgagggagcaagttgcccacatgcccgccagccagggcctaaagcagatggcatgctcagtgccaggctggtagctgggcctgtttgggtccctggaggctgtggctgctgtcatggcacctcactccctcagctcttgccagcttctctgacacttgggttgggggcccttccaggaggaaacccccttgggtgccccacacagggctctccatgatgggaaccagtggttagtggcttcaaaggcccagctgacaccctccacagcctaaggggtgtcctaaagtgcctccccctgtattccccctcccagggcagcccctgcccagcacaaaaccccaggaccctggctctgcacgcctggggcagggacttttgagtttaggatctgtattttctaagtccccagttctcctggctctcctttctgaaataaaggattgaaaacggttcctgttc

SEQ ID NO: 6666 - DNA, 931 bp, Homo sapiens
cccagcccccagccctccagtaccttctgccagaagactcactgtgtggcctcagagaaatcactgaacctctcaggatcaatgacccctgtaaggggccagagccttggaggacactaagaggaggcaggaggagcaactcaaatccccaagaacacaagaagacccatcctgaactgggatggaatggcagcatgcaaacttggatcagatagcaggaggaactttcaaaagtctggcccactgtgcagtggagcagaaggcaggaccatgaggcctcctgccatgtacccattgcagaccctgcccctaactcctgcctatgacacagaagccccacaccagttgcccagatgaactggcctctgcctttggtttactcagggtctgatgttggaatctgctccaactccacaccctagcccttacatgtcctcctaaggggcccctccttgtgctgccagtcagcctggatttctggtctttggttatttctgtgcaaacaaaaggtgtgcctggcagccatttctccatggagttgctaagtggccggaaaacaagcctgagggaggaggcaggagttggagttaccttaggcccctgattcactgcctatgaacagaccatcccccactccttgggtatccccaaccccagacccccatcacttgatgggccacacaagtttgagagtggtacaagggagaagtttgggaaaagccttcttggaaaatgggacattagcattgagttttgaaagatgagtaggagtttgctaagaatagatggaagacagcaggataaacattccagagaaaatcatgtttattccctgctgtatcttccagaacctaggaggatgcctaacagagagtaagcacttaaaaaatatttgtcatatgaatgaaaaaataaacgagtgaatgttgat

SEQ ID NO: 6667 - DNA, 1557 bp, Homo sapiens
gtctacccgccgccctcctgggaactctggctcatccttacgtagttgcccctccttttgttttgagggttttgtttttgttcattggggggtttttgttttttgttttttgttttttttgattctatatatttttccttggttttgttgcctgttagggctgaagaatagaattggccaggacctaggttctcatattcttggtattcctcctggatggaaaggctgttggcatcaataggggacagaggctgatgctggagtggccagtagaggtggtggagcagagcagccatcttttaagtggggctgtatcaggctgggtttatttaaaagcaacaaaatgttttggttaagaaaattattttgctttcagtgtaaatcttcgcagtgttctaaacaaagttcagtcttctgctcgcccctttccctcactgatgtctgcacttggttgaggtctcctggagcctcacaggctctgctgttctccacttctcacctgccatccacgccctgcaagctcatgcaaacaccctttcttcctcctgcggcagagttgttcaggttgcctgggcaggggcttaaacagtgccagcccctgccatcccaaagctattgttaagccccccaggcgtcctccacccacgcccactagcctgccatgtccacagttccttgggctgctgaggggctagtgcagtggtcctgacctctcttatcaagagcacacttctttgctggttgctccttttgagcatatgcgtgtgattatttggaacagttagacttgccacgttgggtcagttttagaaattgtttctagctagagggactggtgtccttccaagtctagcatttggggtatggaaaattgttgtggtgtgtggtagggtttttgttttcttttttgagttttttttccccctttagtctcctggctttttcctttcccttcccttctccactggccagcttgggcctcatcctcatgtcatccttctaggaaggcgcctgccccatcttgtctgccggcagcatgcatccaaggccagagctcaggcctgcagactgggctggtgcctcctccgcttcagggtatgggagttggtgaaggggctttcaaaaaataataaggaaaaaaaggtaaagtctttggtagcttctatccactcagatcctggaaggcagcaaggttttgtggatctagattcattaggaatgtcttcttgtcagccaggccaggacccgggcttgccaagagcagaggccctcccagcaaccaggataccaccactttgggggctttgtgtacagaggtccgggtctgagacctcataggctgcagaaatctggggcagccaccatcaagaagcccctctcaggggccagaactcctttgccagcgtggatttctcaagtcgggactgcataattaaagcagttgcagttttattttttttacagcttttttcccaaaaatgatttgtagttgtgtgtgcagcacttcgccctgatatgtgtgctctacaataaaaaccaaatctaatatattttgaa

SEQ ID NO: 6668 - DNA, 965 bp, Homo sapiens
gaaggccagaactatcccgacctccacctgccctgctcggagctggagtgctggatccctggcacctgcctggccccttaacatagaaccacgcctgctaacctgtaggctccactgggacctgctgtcctgtcccgcctgaccctgggccctggagcagcaccagccccagggtgtgggcctgggacctgggccagaactgagccctcctgcaggcatttggctgccctgggggcccactgcctagggaagaggacaggtggggcccagcacctgtgccacctccccccctccacacaccatccttccccctcactttgcagagtatttttccttttttttttttttcttaaagacggagtcttgctctgtcgcccaggctggagtgcagtggccccatctctgctcactgcaagccccgccttctgggttcccgccattcttctgcctcagcctcccaagtagctgggactacaggcgcccaccaccacgcccagctaattttttctgtatttttagtagagatggggtttcaccatgttagccaggatggtctcgatctcctgacctcgtgatccacccacctcagcctcccaaagtgctgggattacaggcgtgagccaccatgcccagccctgcaaagagtatttttctagcgcctgggctggacagttgtttctaaaactaaactattttggtacctgcttctgggccagtccccagcctgtcatgagtgtgtgtgtgcgggcatggatgtgactgggagctctgctgggcacccacatctggggcctagtcaggtgtgtgtgtccggcggggggggggggcaggggggggggtcaagatgagtttccctgtagattgtaccttggggtttttttctgtcgttttgttaaaattagcgccattttaatattaaaaatactgatttttaatattgaaaataaaagcatttaatatctctt

SEQ ID NO: 6669 - DNA, 1015 bp, Homo sapiens
gtgggtggaaacgggtggttgccatgttttctaatgctggggagctgcacccacctcccttccagggatttgaatagtggtttttctctagctttttgccagaacaaaggagggtacattacttaaacccagggcatcaggatgtgcttgggctatggtggccataaaccctgagcccagagagcttgggtcactgtcacctgagtgcagctgggctgcctcaggcagcttggagtgccagccattcctgcaagcaccgtttcagctcttggggccaaccccaggacctttggctctgtccatcaccagcaaccaatccaccaacagaatgtggtttctgccatcctgggcagaagctgaaggccagcttcacatttctgctgagagaaggtgacttaacgccttttccggccctagctccaggcgttttgaggcgtctggtgcctgatggtaggtatggtgtgtttgttctgtcccccaggggctggagtcacctggtgcccctgaaggacagatttttggctgttaaaggatggcattttcctgctgtcttctgtgcgtttagttttcttgctgagcgggagctcagtatgacttgccacccacctgatacctcagggcaaggccctttttccctccagccaggtgagtgttttcttcaggcagctgagggtcctgggggagctgaggctctgtgctgcacccccagcccacagctggggcatctcactggagctgttccaggccccactggagagcagaggacctgatcccccactagagaggtccggtgtgcacagccggcctcccagtgtgccaaaatgaactgctctcagctgatggctgtattctgactttgaagcctgttaagaggtagcaagggggctagaggagggagattccacctcccctcccaagtgaccctcctcctgcctctggtatccttccttttgaaacgaagctcagcttcgaagatgtgaacaagaataaaaggaaaaaattctaatgtatatat

SEQ ID NO: 6670 - DNA, 4986 bp, Homo sapiens
ggtcggtcccagacactgtgaccaagacctgtgactcagggtatggggaggggaggggttggcatgaccaaacagttgcctgagctggactgtttaagtttctggtgtctggcagcatggttcccacgtggctcctagtagtttttaagttggacatgggcagaagtggagcctggctccctctaaaggcgtctggagggatggtgacagctacatttggctccctggtgaagagtggcccctggatatggagggggccttggttttctgaggactggcagccagggcagaagggaagccaccagtcccttggtggggcagggtgagggcaggaaggccaaagcctgatgggaggagcacactggctgtattcagcattgccggacacttgagtggcaaaatgaacgagggtgacagccaggtaactgttgtggtttggtggaaaacaggagggcagaacacccatcgcctccttcagacccagatgcagccctttatttgcttcctggagcccactgtcctaggggaggccctggaccagccagtgggggtgagaaaggctgccaccctctgggtcgtgggaaacatgcgaccttggcctcagggccacagagcgtgagcagcaccctgtccgctgtcctcgccacctttacctgggagagaagtgcctgtgagcgggccttgggactcactccccatactctttcaccaggaacgagcagagtgttcactagtcctagtgtgaagcgggcacaagtgaccaaagccaatggtgaggaccaccttgggggctggagagcacagcaggcagagcagggctgaggcgccatgaggccatcaccaccatgcaagggaggagcagccagcagctctcctgggtggcccactggctcctgccggccagagcgcatgagcactgaccttcctcgtggggaaggtctgcagacccgtgtgaacatggcagaggccacactccagctcccacccacataaacctttgcaaccacttcactacctctcactgggtctcgtgggcttgggacagcaacggttctgtttagtcagctggtgcaggtggttggcccagccgatgagaactcaaatagcacggatttcctggatgagctaccacgtggcgctcttcaggttctgcctctgggaggctgtgtgcacctcagtcaccacagctcacggccgtccccagttgagtcccccttctgaggacaagtttgaaactgggaaggagacaccccctggttccgccagcacctatcccactgatagtgatcccctggcctccccgagcctccttaggcaatggccactggtttgtagacagagagtttcttgcagccttgaaaattttattccctaagtggggacagctctggtattactgcttctttaatttgttccacaaaaattatgctgaaatggacctgaatcagccctgggtgtgcttctgttggcgcctgctgctgaggcccggcctgcccatcggcctgtagtacgccatcgaggtcatcatggagccagccagcttctcttctcatcaaggaggcagagacccctggtggaagccaagagtgaccgaagagggcttgcatcacgtcactccagtggttccctccttgtccaagtcctcgttttaagggcatggcccgttggctccagccgttggcttctgttcagggtccttgctcccatcagaggtgtttgattttgctcctggggctgcgatggagaaccttttgtggcagatggtgctgcctacatctcattggttctctgtacctgtgcccgttgcgcatgttcacagacaggagagtcgccagcaataccttggcagcctttaaatgtgaaacgtctgttacttgcgctggaggcagaggctgtgcagggagcctgcttctaatcgtgggctcccttatctgttacggttccctcccctcctgttctagatgctgattcgttttctcactggctggttaattgctgtctacttaggcctccaaggccataactgtgcaacattttatctgagaaggaaggaaggtcagaaagtgatcactggcaccaccactgtggcattcctgtcacaccaacacagaaattcacagctcatactgttctcacctgggaaacttgggaagggctgatgagtttggggcagatcctgaattgcagccacacttggccttctagaagctgaagttgtgccctcaagtggtcctaagtagaagtccacttgaggtatttgctggcacacaccctcaagggtggttcagaaggtcctgaaacctaaggcaaaaggctgctggggcatgaacagaacagaccgtctcaggggcagccatgtaagtggcaagcagggctggtctccctcaaggtggttcttcattaagtaaagatggcttcgtgactagtgtttagctcccagatttatatttgggttaaaaactaacttttcaatgtggcagtttcaaaggattacttgatgcaaagtatgtttcctttcaaagggatcttgacgtggtaccaggactgagtcatgatttgggcagaggcagttaacactgggaagccctgcccctccctatgcccccttcactccggggaactgaaacctactctgagtctcacatctctaaacctcagtgctgagacctatgcagtgggactaatctcatcaagaattttcagttgaggccgggcgcagtggctcacgcctgtaatcccaacactttgggaggccgaggtgggcggatcacctgaggtcaggagttggagaccagcctggccaacatggtgaaaccccatctctactaaaaatacaaagaaagttagccaggtctggtggtgcgtgcctgtaatcccacttactcgggaggctgaggcaggagaatcacttgaacccaggaggcagaggttacagtgagccgagatcgcgccactgcactccaccctgggcaacaagagcgaaaactgtctcaaaaaaaaaaaatttttcatttgaggtattcttccagtagaaggttagtaagtttttaatgaaaccattaaaaattacacttcccagaaaatagatgacatcagtgccccttgctactttctcagtcctcactattgctttgagggcccaggtactgaaactggttgtcttgagttttgtgtcagctttttctccagtccattatccccctcccttgcttctgaagcagtctaggttaaactagccaggcaggtagttgtggactggtgattttcaaaagccccactttagagatcaggccacagctttttatatcgcacaggacacatcagcctgagctgctgcctcatgcctgtttccccaggaacctcactcctttggtagaaccttgggattttagaaattgtggcttttccataactcatttactccaacagttgaagttacacacattgctcccaaatttggaaatagaccacagtaccttacctttcattccccatctggcctttaccttctttgcttcagtggttgaaaacagttgccatattcaaagtatagtagatttcaacctcacacaaatgacaagtcccattttacaatcctaggaaggcccaccaatttcatttcacgcgccagggcggctgcagttggaggccgagggcagccctctgctcactgaatgtcttgcatgtgctgactgctgcccgcagtgctgaacatgccccaccgcccaggcccagcactgcttgttgggtcagcatctagtgctgctgtcacatctttgtctgcacagccagtaggattgcctcagccagggggtttatcagaaggtgtgcaaggcctttgggggaactgagcccctatagtgggcagtctcctttaccttcccacctccctgaaaagcacagaagacagtgccttggtttgtgttttgaagcaaacaagtcagctttctggctttgccccaaaactgtgatggaacataataaaactggagatatggtttttaacactgcaaaaaggaaaaagcatcaagtttctacttctggctggaaagcaaaaccaatctcagctgacaaggctgggcaaactaagttttcctgagcccattttcctttgagccctgacctagcctggccttacctcattaaggtttggttaaagcagtggaaaggaggaggaggcaggggtggatgggggtgtggggaggggatgagcactctgcagccgattaatctgttggtaggggcccagcttcttgggagtgcttattcagcccaagagtggaggctgtttacagcgagccctggagatggcagcttgtctccagctggggaggggtcaggcccctaaattgaagaccactttggtagcagaactgtagggactggtgagtcaactcacagattctgcagcagctgctccacccacaataaagcaaacgccgacaggctagaccccagattgcaggggctgccacctacaaggtgggaccacaggctgcctcaccgggattgtctgccactaaatagctggagtcacagattgagataaatgccaccttcaaggttgcagtgaaaagcataatcctatgtgatgaatttatatgtgttattttttaaaaagctattttattactgcatgttcccgtcccgtcttgtgaatgtgagtccccgccaccacgtgaggtgcagtcgttgcagcggctggtgcaggagtgcagctggcgcgtgtgtgatagcatctcgtaggtgttgctgcacaagagttaaccagagtcaatgccaaacacatagtatgagaagtgtactttttaagaaattaatttatttgagttcaaatatttttgaaatataaaaattggttgtattttttaaagctataattcttgtagacattctgtggttaaaaatttgattgtgcttattaaaaatggtcatctatgttttgcacttcagctacgtgaaaataaaatttctttgggaaggtga

SEQ ID NO: 6671 - DNA, 658 bp, Homo sapiens
actccaggagccatatcccagacctttgccagctacagtgatgggatttgcattttagggtgatttgggggcaaaaataactgctgatggtagctggcttttgaaatcctatggggtctctgaatgaaaacattctccagctgctctcttttgctccatatggtgctgttctctatgtgtttgcagtaattctttttttttttttttttgagacggagtctcgcactgttgcccaggctggagtgcagtggcgtgatcttggctcactgcaagctccgcctcccgagttcaagcaattctcctgcctcagcctcccgagtagctgggattacaggtgcctgccaccacacccagctaacgttttgtatttttagtagagatggggtttcaccatgttggccaggcagatctcaaacttctgacctcgtgatgcactcacctcggcctcccaaagtgctgggattacaggcgtgagccactgcgccctgcctgtttgtagtaatttttaggcaccaaatctccctcatcttctagtgccattctcctctctgttcaggtaaatgtcacactgtgcccagaatggatgaccaggaaccttcaagagtggctgaaaagattgcagagttatcataataaattgctaacttgcgtatttcct

SEQ ID NO: 6672 - DNA, 50 bp, Homo sapiens
accagccttgggaaattacaatgttttacaataaacagaaagccaagcgg

SEQ ID NO: 6673 - DNA, 1146 bp, Homo sapiens
atagagaaagcttatgtgctttgttacattggggaacaactgaagagattcttgactcaaccttttagagcttagtccatgttgcaacgaggagtgttggctttgtttttccacttaaaaactttatttataaaaaggaaaagtagttttcatattaagtttttatttcctttccagcagttggggctagaaagtatgtgttggcactagaaacattgtcaagatttgttctgtggtgtaggtatgcacattccataggtatgcacacggccatgtaatatcagtatatcccaagttaatgaaagtgttcatttacataggtaatggagacctttgcattttgatccatagaacataggaggatgttcttagtctgtctcaaagctctatatgtttacatattatttctgtagattgttttcaggagaaagttttgcttctatggtaagagtgagcactttggcttatgtataagttagaaataattgttagtttttaatatgcacttcgtggggaaatttcttagacgtatgcaagcaagtgaaaacaattagggccagtggtattaactactttataaaattttatttttgtttgtaagaagtcatctatttaaggcccagttaatataagtggaatcatcatagtttaaggaatacccagagattgctgctgttctatttattttacagaaaggatagctagattgaaagctcttcagtggaccttgagctaatagatcttttaccactaaaagagcattattctcatgtcataatgagaataataatttacatacttggcataataaatgcctaaaagacattttattttctgaatctatttttttcttgctataatggggatattgtaaattatgcatttgtattaatggtatttcttaaagcaatctatgtaactgtaaattaaaccaatctacaaactattgtaggcatctgtaaattctgttgtaggtattataaactttgttgaagtcttaatcagcagattatgttgtgaatatatttgtacattgttaaaatagtttttaagattatttgtttaattgaataagtgtcttattggagtgatagctttgaaggtgcaaaactttatatttgtataaaattctactatttacaaggc

SEQ ID NO: 6674 - DNA, 569 bp, Homo sapiens
gttttcctttaggaaaactcccgagggccaaactggaaacataagagtgactgctcggtgggatggatttcacaggaaccgtcatgcttgttcctccctctcccctgtaacctcacttcttattgattcctaagaagatagaccaactttttatgtcggtttgggtgtttgtgagtttggggagcaatttttataaaagaaaaactttattctcctcttttgaaaaggtaagacctcgttttagttgtaactgtttaaaaaataacacttggaataagatttgtaagctcacaaagccttcttccaaagttgcttgagccaagtgcttaaaaagttaataaaataaaatgatctgtatgatacctgcaattgaaaagccgaaaagattatactgtcaagtccagtaaatgacatttttagagatgcttttgtagacaagcatatggaatatgtgattgtatttattttctgcaactaaaaaaggaataaaaacttgtgtttgtgtgtttttctaaaactttgtgttttggcaatcgttttataactaaaataaaatgaaagctaaatct

SEQ ID NO: 6675 - DNA, 259 bp, Homo sapiens
cactgccatcctggacagaaaggcaggagctctgagtcctcaggtccacccatttccctcatggggatcccgaggccccaagaggggcagattcccctcacagctgcacagcagctcggtgcccaagaactggccaagccagcaaagcgggagccctgaaaaattaggggggaaatgggagaaaataatgtgacatttcaaaaacagcaccaaagcagtcagcattggaaggaaaattagatttctgacggacatcctg

SEQ ID NO: 6676 - DNA, 2460 bp, Homo sapiens
tgcctgggcctgggacccacccagagcacctgtgctggaggatgccgagcagggactctcgtctgtgggacgggatccaagagtttggggattaggggtattagggcttttcagctccagcttcctgatgaaagggctgtctttacagccccaaccctcagaccctcgccttccaaggcaggcccctcagcctggcctgctctcaccacctcctccaaagcactgaggtcctggcagggctcctctgaggccttggacgaggacgtggagtcatcagtgttgcccttgcccctaacctcagcccgagggtctccaggatgttgcctggcccaggacttgggacagtggccttgtctttgtcctccccaccccccagccctagggacaccccaggcagtcctgggtgtggacacgatgaagcaccggctccataagacaccttttggggaagtggttgtgcatattttatttttctttgactcgtgtgagttcaaagtaaacaccaccaccgtggacaactcttgaattaaatccactagagcgagctttaaaactaatctgagcataacccccaacgtggctctatgcttgtgtacctttgcacatattttgtttagtacagtttcatatttgagtttgcagaattatctaatagtctttttttggctaatatttttataacgtggttcttatttaactgtctagttttgatagaatttaccaggtctggctgaatgaagatgttggcacgtgtcattttagtggtttaaatcctcttatttatggttttaactctaagaaaattttaaaaggaagagatgtttggatgacaaaaaaatgccttattgaaaaactaaagcaaattctttataggaagaaaatatgggaatttgattacacatagatgatgatgtttatttaaaaaaaaaacaacagcaacaaaaaatcctagcctccagttgccttttcctttctttagctcctgtttttggtgaattactaaactgattgactttcagcctttttggctagatcctgagaggctatttttcttacgaatataccaacatcctgaaagttaaagaaaaaaatctaatgtatgaatgtgactcaccaatttttatcaactaattccttttttttattaaaggcatgcagggattaacaggacttctgtttacaatggaaatctgaaatggaagaaacatctttaaccttgtgtgtctgtgatctcctctgtcttaatccacgctcaggctaaagatggggataatgtggaaatggcagttgtcccgagggcgtggggtggggggtgcttctgtgcccacgggtccctgggcaacagtccctaggctaagacaggggtggggggctaagggaccagggctggccctgatccacctacctgctaactccagatattatttttaagttggagacctaaaaataattctcttgtattttggagatgaagaaaaaagtcattcacctgggagggatttttaacaaacatgcactaatattacctccctcttccaaactcctactgtcctcacctcacccaccactgtaaaagtattacgtcgtgcattaaagaccagaaaagacttgcttttacccagggaggggacattcccccaatcctgtgtctgggcagcttgcctggtggatgtttctggccctttttccaccatgggaatttctcacctctagctctaagggcagctgaccacctgccagcccctctctggttccagaagattacccttcgcaccggcacaggagagatcttaaatggtctctgggctgctgggacatgcaggctctgagtggggactgcacccactcatgctgttcctgaggccgccctctccagtcccaggagccgtgtctagagttcctgaccagccaccttctgccagaactgcaggcctgcggctgggtcttaggctcccgctgccatttgggtaagccggtggctggtctcgtctgccgggggaagggtggggaggtgcaatgggatgggaggcaggatgcttgcccagaaaggtgctttccttcagacggtgcagggcctgggccagccttacaggtcagtagactagactcgactacttggggtcagtgattcttttgtaacgagtctttcatgatgtgactttgaggccccaacatgacagccactgggccaccgggacccaagaagacagccccctgccccatcttctggcacaggccatcccgagtgcatgtccctgttgcccactgcactgatcatgaagccaccggccactgccacgcatgttgcacctgtgccatcgtgctccctcctgatgggcaccgtggtggaggaagtcacccagctgtttctcagtcccagaggccggtggctggttttgaacttgtgttgactgttgatacttatttactgtataaatataatttatcatttgtaccatg

SEQ ID NO: 6677 - DNA, 307 bp, Homo sapiens
ggcccccagcctgtgccttgctgccacagtagacctagttccaggatccatgggagcattctcaaaggctttagccctggacccagcaggtgaggctcggcttggattattctgcaggttcatctcagacccacctttcagccttaagcagccacctgagccaccaccgagccatggcaggatcgggagaccccaactccccctgaacaatccttttcagtattatatttttattattattatgttattattacactgtctttttgccatcaaaatgaggcctgtgaaatacaaggttcccttctgc

SEQ ID NO: 6678 - DNA, 1099 bp, Homo sapiens
cagccccaggaggtattgaaggacaggagagatgtcaggtggggatgaagaagaggggcaggtcgggggagggtgatgccagggattccaaggcaccgccatgtactgcactgccctggtcgaatgctcggtgtctgggtggcagctgagctgggactcaaggtggctcttggaacctgggaggcagcatctgggggcagtggatagaacacccggcctgtttctggttgcagatggttgccgatctgcccttgtcacagataggctacatcccagggtttctggctgcaagtgagactccaccctccccacctggctcatttccccgatgaccctggattgtaggaaagttaagcaggcaccatcctggaagtctacccctaggtggtcgagagacctgttctttcacagatgtgagaagccccaggatgattgaccatggtgttcaggagcggggagcactgatgaggtgctggggatgacaggaaggaaggaacactgggcagaaccagagagatgggacatggtagactgtggcccagaccccagagcagagaaacttgttcccatgacccttcccaaatctgctccagcaggactaaggtggctttcccactcctggcccacagccccagagagcctgtctgtgcatcctgaaccactctttgctgggcctccgcaagggcctctcttgggtctgtgtcctttttcaagcctgtttagatgggggagtgcccatgccctctgtgaagtgcccaaatgcgaaagaataacaccttttcttgcattctgagctaagccagacagcctttatactagattctatcaaaatcttgcaaaggaaaacaaaatgaacaacttctacccttaaacacatcctttctcccctgggcttgtaagaagatgcagcttgatgcagctcctcaaacaccaggccccctgggaactgggggtgcgggagttctccctctgggggacagaaaatctgactactaggaagacttctaggctatgaaactgacttctaggctatgaaacttacagggtatgggtgggcacattatcctttattttatgaaaaataaaatgtgtgtatgtg

SEQ ID NO: 6679 - DNA, 1480 bp, Homo sapiens
cgtggtaggaaagaaagtcaggtcaagtgatgcttttgagcttacacacaattcacaggcccaccagtgacaatttactgtgagttaatgtcattcaggtgtgcccatggattttgagggctggaaatgcaaagacacatttttctataaaaagaaaaagcaactaaggttaaaagctatattgtggcccaagacactgtctgaaagatgacatgagtagtaattcaccactatctgaaccaagcaaggatcaatgtgctgactgcattggccaatggctttgatacttctgctatttttttagacacaaacccataaactaactgcttaagaattcatactgcttgaattatgtaaaatatattttacagtatatctttccttgggccttagattactattcactgggcaaatggtatttgtttttgttttaattttttttttaatagacggaagtcttgctctgtcatgcaggctggagtgcggtggtgcgatcatagctcactgcagcctcgaactcttgggcttcaagcaatcctcctgtgtcagccaccagagtagctgagactacaggggtatgccaccatgcccagctggcatttgttaatcttcatttgaggtctagatctaggcactgtggacactgaaaaacagttgggaaatctttcgagctgtggaaatccaaacaaagactgataattcctggtaggggtgtgtgcgtgacgtactgcagcctcaacctcctgggctcaagtgatcctcccacctcagcctcctgagtagctgagaccacaggcgtgtgccaccacgcctagctaattttttataccagggtctaccctttgtttcccaggctggtcttgaattcctgggatcaagcaatccttccaccttgccctcccaaagtgttgggattataggcatgagccaccacgactggccagaggacaaaattttaataaaggtcttagcttaagcagtaatcctacttcattaagccttcctggggtgcggtacacaccgttaattcagcaaccctcagtacatactaagtatgctcagtgctgtgaaagtggattacaccaaattaagtcattcttatcacacccaatcaaaagtcaagaagccagggataaaagcacctcaggcacataacattaatctagtaatgtaattctctgcacatccagctggtgaaactgcgtgctgtaagctgggaccagctttgtccataactgctgagagaacttgctgaagctctaggaataattttgcctgcccggttgctcaccagttgtagcttgccagctcccaacacccttcctggtgccaataaactttctcaaagagcaatactgacatttcttttgataaaacctccagccttctctgtgttgttccgacataccgaggaccaactggtctacatggatgccctgaacatgcaattctttcttccaaaataaaacattaaatagag

SEQ ID NO: 6680 - DNA, 2038 bp, Homo sapiens
gcagaatattactgaagaatgatcctgttcaacctcctagtgcctctactgaattattcctcttttaaatggttaatgaaccaataatttttaaatcataccaaaaatagtaagaaaatatgcaaacactctgtgatcaaacttaaaagtcattgccattcatcattaataaaagttgccatttcaactacgtcccaacattccctaatagggtattcagggaacctgtcttaaattgtgcttatctaaatcttggaactttgagctaggggaggagaatgtattagactaaatacaaactgcggggttgtaagggagtctcagaacctcactgaatccttcactccagttaatggcactgctcacttcctgcctctgctgccaccatcactgtgtgaagctttcaagagcttggtacttcccagggctaccggcagtcctctgtagtccagagaggtgagattagatcttcttggttccctgtgaggtttcaggcactaaaactctatgtggggaagggaggggttactcctcctccaatgggactcaaggacttgacctccaggagtaggcccctggtcagaagtgccatctcaccagtggtcttcattcttcctcattcattctttatcatcctgtgttctgtttagttgcaacaatctcttgtgactaatgtcactcaaagcatcttgtaaatcctagggcttcctggaagttagttgccaaagtcatgcaagcatcacctgtcattcttgtgttggagttatagaattctacatcttataaaacctaactggcatttaaaaaatactgtggccgggcgtggtggctcatgcctgtaatcccagcactttgggaggccgaggtgggaggattgcttgagtccaggaatttgagaccagcctggacaacacagtgagacctcatctctatcaaaaaataaaaattagctagatgtggtggcatgagcctgtgttcccagctgcttaggaggctgaagcaggaggattgattgagcctgcgaggccaaggctgcagcaggctgtgattgcaccactgcacttcagcttgggcaacagagcaagaccctgtctccgaaacaaataaaaaatactgtaataaaagtacttataaacatactaatcctctttcaggaccctaaagttgcaggttagtaggtcttcaaggacaaatctgtaagtttcttatttctgtagtgcaagtaaaatttcactttttgaaactatagagagatccctttctgattagcctacagaacttaaagtgagggaaccatttcctctcacagacaaagaggcctgggatattaggactttggggtttgagagcatcatggggcagacagatggtggatggtctggacaagaagcgagtaagccactgcggttggtcatactgaagggaattgatggcaagaggatcccctgagcaagtcagaagttactctcatcagtcgttcatggtcacaacctgaggtactctgctgagtgggcaaggctgaagaagaggcctgtggaatgcagcattacctgctggacagagcagggcaggcagttctatgccttggagctcctgactgcagggactctgtccccacactcaaaaagactcagctcactcaatgagagaatgtgatttactttatagaacgtataatcaactttgttgaataatttgttctattaaggctgtctaaagtatgtgatgtcttcatcatagtatgaagtgttgaaaattaataacgagcctagtttaggaaaaagctgcttaaaactgtggctctaagagagtaatcataaaataccttagataaaattgcactatggaattttcattgagtatgtttaaattattggcttgtctactaatacacatctgcttcaaaatgaacatatttcataaaattggcatcaattttaatgacgctcctggtatggaacctcagatataccctattggagacaatcctttgatcataaattctccccaactataaatcattttatgtctttatcat

SEQ ID NO: 6681 - DNA, 687 bp, Homo sapiens
ccctggagggcctggggcagccaccattgccacctactgcagcttttcctggaagcgcctgattactgtccactgaccctgctctgcccaccacccagctgcctagacttcaaagacaggctcaatccaagtggaccaacacccaaataagaaacagagtgggtcccacgatgtacctgtctgaaatgcaaatgcagctggactgtaaattggggactctttgatctcttgtgggatgcttctaaagagggcagcctccctccttccagaccaagaccccacacccaggcttgttttgctgattatattgggtggctgaacgaacacattatctgcagaaattcagacaaagaacatctccaaatcagtcttttggttgctgttgttaaaaatatcccggctttgcctttatgaaacctttgcccttggctgggtgtggtagctcgtggctgtaatcccagcactttaggaagccaaggcagtaggatcgtttgagcccaggagttcgaggctgcagtgagctatgagcataccactgcactccagcctgtgtgaaagagccagaccctgtctcaaaaaaatgataaaacccaaaactttgcccttgtgaaccctcccttcccccctccccccccaaaaaaaaacaacaaaacacaaaaaataaacatttgttccagggcaacctgg

SEQ ID NO: 6682 - DNA, 287 bp, Homo sapiens
cagagcatttggtggaagaaagacagcccagctcttgccatgattgggagccgcagccatctctagatgaaagggggaatgtgtagaggagaaattgcctctttataaagagcccagttgtctccttgtgacattctctgtttctcagagtcattgccgtcgagtctctgctttttgtccacattttgggatcagcttactgcatgatcaaagatgatgtttccctctttttacttttcctcagaagattgagctgtcttttatttggagaataaaatgaagttctg

SEQ ID NO: 6683 - DNA, 369 bp, Homo sapiens
tactctgaccagccagggccagggcagagaagcagcactcttaggcttgcttactctacaagggacagttgcatttgttgagactttaatggagatttgtctcacaagtgggaaagactgaagaaacacatctcgtgcagatctgctggcagaggacaatcaaaaacgacaacaagcttcttcccagggtgaggggaaacacttaaggaataaatatggagctggggtttaacactaaaaactagaaataaacatctcaaacagtaagagttgtagtcttccaggactagaaccttgtgtcctttgaattctcgccctgccagctcctagaaatagtttcaatcttggaatcagatgttatgtcacctg

SEQ ID NO: 6684 - DNA, 1007 bp, Homo sapiens
gggctgggcctcggaccccactccggccctccagagccccacagccccatctgcgggggcagtgctcacccacaccataagctactgccatcctggcccagggcatctgggaggaaccgagggggctgctcccacctggctctgtggcgagccatttgtcccaagtgccaaagaagcagaccattggggctcccagccaggcccttgtcggccccaccagtgcctctccctgctgctcctaggacccgtctccagctgctgagatcctggactgagggggcctggatgccccctgtggatgctgctgcccctgcacagcaggctgccagtgcctgggtggatgggccaccgccttgcccagcctggatgccatccaagttgtatatttttttaatctctcgactgaatggactttgcacactttggcccagggtggccacacctctatcccggctttggtgcggggtacacaagaggggatgagttgtgtgaataccccaagactcccatgagggagatgccatgagccgcccaaggccttcccctggcactggcaaacagggcctctgcggagcacactggctcacccagtcctgcccgccaccgttatcggtgtcattcacctttcgtgttttttttaatttatcctctgttgattttttcttttgctttatgggtttggcttgtttttcttgcatggtttggagctgatcgcttctcccccaccccctagggtaccagcaggcagagccttgccctctgctcaggctggggtccagtgggaggggcccaagatctctgctcagagaagtgcagggggagccttccagctcactctccctgaggactggcttgacaggggctatgggtttgctttggtgttgtttttaaaaaaagaaaatatatttttttgaaaaaacgactgcccatcccgggtcctttccctgatgggttggggcagttacctggttgctgttttaattaaaaaaaaaaaaaaaaaaaggact

SEQ ID NO: 6685 - DNA, 3223 bp, Homo sapiens
gccaaccttggccgacatgcagcatccacccccggctggggagaggccccgcggtcgctcaggggccccgggtttgagcagaacgggcccagtgccctgggttgcagactcagtagcgttttagtcgttttatgtttctttgcaacggcctcagaagtttggccggagagggggcagccagagcggcagcccccggcctcagaggctatcacaggctcagggcaaagaagtggcctcctggggggccaggccacgagggccagggcttctgcctgaagatggagctgcagcctgcggggaagcagctcagctcgatggtgggcccagcctctgctgtccaaggctggctagctgcggtgctccttgctggtttttaacttggggagaaacaccgggtttcagctttcttgaccttagcttgggtgagactgtttacaaaaaaaaaaaattaccatgcaattgaaaaaatttttttttaattcacagggggcaaaaagaacaattagaattccatgggtctgccaggatgcagcagctggctgaaggctccagagggttccccgaggtgggactggcctctccccgtgtgtgtgggcaccacagtccctgggcaagcagggtgctctgggaccgcacttcatcgagctcacgagccagctaggctctgtttgtgatagaaaaatcaagaccatgttaatgatcgtaataaaagctttctactgtcgttggggtggtgggtggggctgggaagaaactggtttgagcttttagagtttgcctttgtaccttagagatgtgtctcagggccaggcatgggacctgccatcgagggttcctccccgcaccctcgattttcctgttttgcttctctctccatttctgtccaggcctccgcccaattccacagtgaggggtggttaggagctataggccgggatggctccttgggaagggaagtcgggatcccaggctaggaggaagctggcagccccgtccccactgggcccacagtgtgagtcgtgccttagagactccgggttgtcctgttctttctgggcttgctcatctccccccaaccctgtcccaccccacccctcccatacctccactgctgaagttcctccagcccctctgtctgccttgtgaaggtggcaggggccaggtctgcctgacataggaccacatcctgtccctccctcacctggagcagcacagcagagttcaggcagggcacagccaggccctggtcagcgctgaatggcagaggaaagatcttaggaaaggagaggaatcgccaccccctcctgccaactgggatgactggggagggccacgctcattcaaagctgaatcagaaaccagccgtggaacagaattcctgccgagtcttccagggccgctcctccaccaccctcccccaggttgaggcactatggcaccctcatcaggaagaggtttggggtccccttgttgtcactgctggctctgccaccccatcttgttcatggcagctggttgggtcaggtccatggtagagccaggcccttcccagggctgcggagaaaacctgctctcttctagtcgggcttctccagaagccagtaatcagaaaggatgtgtctcctgctccaactctgcccccgagacagctcagagccagaaggcaccccgagacagctcagagccagaaggcaccccgagacagctcagagccagaaggcaccgaggactctggcccaagtggggaagctgaggcagagagcagagggggtcatgcagtgagtgggtggggtgcaggagacagagaggggctgggggcgtggggtgggggtgtctgcctcttccctccacctcctcccctccttagcagctgaagactcagccctgaggtctggggcaatggaagtcaagacacccgacccctacatcctggggtaggcccgactcagcatcctgtcccagcttcagccccacactcatttctggcatagaagattccgccgaggcagctctttcctctcggggtctgccaggggtgcctcagctggttcctgctcccaggcctagccccgaagccttaggggccttctcagccttagccctgggtactggggtgaagttggcaggggagagcttgacacttcgcctccctgatggccatgctgagggacagtggtgaccctggtcacttggtgctggtgtaggggcctgtgcccttccagggccagtgagacagccttctactcccccgacccagagctgagtccgaggaccccaggcccacctcctggccctcttggaggtctgtgctcttacctcccagcccccaccctgcgggagagcagccccagcgcctcatctccccaaaggcggcagatgcttgattctcctgccctctttcttccttccctcgtatttatttatttatttattgcttgtgctaaagaccaaaatagtctccctctttagtgcacttgaagcgggagggcggatgggatgagccaggagcgaggaagacttggcccctggggagtgtgtgtgtggaggcgtgtgcctgtgtgagcctgcatgcatacatgtgtggtgcacacatgcacactcggctcttcatgtgtatgactgggttagtaatacagatacgtgatctatacgtgtgtgtgtgtgtgtgtgtgtgtgtgtgtgtgtatgcaggcggttatgtgtctgtctacccccaggtgtttccgtgtacaagtttcctgtgagggagggcacccacccatcaggttgggcactggcacaggtgaaccccacagtccccgaccctctgccctgattatgcacgtctgctcctgagtggagcttgtgttccaggatgagacatctggaggtgagcgtgtgcgtccggctcgtgtgtaggaggctgtgtgtgtgcccatgtgaaaccgtgtacttgagtgtgtgtctgtgtgcagcctatgcctgctgctcagagcacggtggccaccccctgagcctctgctggtgctgtgctgcgtggtccccacccagagggtcctggggggcggggaggagccaccgttgggaggcccctgtacggggtgtctgccctgcgtgagggcatagaatgtcaaattattttaaatggtgaaactggagagttttcatgttattttcaatacatagcagtatctaaagacgtaggcgatgagactagaccacattaaatgcattttgatctctt

SEQ ID NO: 6686 - DNA, 203 bp, Homo sapiens
acaagttacccttttggcacccctccccttatgcccgtggcggtggcacagtgctgtatcctgcctgggctctggcccctgctctgtcctccctcttactctgtctcccttgtttctgaggggcctagatgcttctaggtctggctgaatgtcttcaaaaaagatcacttcccagtccatcagggagacagttggtggacatc

SEQ ID NO: 6687 - DNA, 1250 bp, Homo sapiens
aagattctgccttccctagtagtagggactgacagaatacacttaacacaaacctcaagctttactgacttcaattatctgtttttaaagacgtagaagatttatttaatttgatatgttcttgtactgcattttgatcagttgagcttttaaaatattatttatagacaatagaagtatttctgaacatatcaaatataaatttttttaaagatctaactgtgaaaacatacatacctgtacatatttagatataagctgctatatgttgaatggacccttttgcttttctgatttttagttctgacatgtatatattgcttcagtagagccacaatatgtatctttgctgtaaagtgcaaggaaattttaaattctgggacactgagttagatggtaaatactgacttacgaaagttgaattgggtgaggcgggcaaatcacctgaggtcagcagtttgagactagcctggcaaacatgatgaaaccctgtctctactaaaaatacaaaaaaaaaaaaaattagccaggcgtggtggtgcacacctgtagtcctagctacttgggaggctgaggcaggagaattgcttgaacccaggaggtggaggttgcagtaagccaagatcacaccactgcactccaacctggacaacagagcgagactccatctcaaaaaaaaaaaaaaattgtgttgcctcatacgaaatgtatttggttttgttggagagtgtcagactgatctggaagtgaaacacagtttatgtacagggaaaaggattttattatccttaggaatgtcatccaagacgtagagcttgaatgtgacgttatttaaaaacaacaacaaagaaggcagagccaggatataactagaaaaaggatgtctttttttttttttttactccccctctaaacactgctgctgccttaattttagaaagcagcttactagtttacccttgtggtataaagtattataaattgttgtgaatttgaagaatccgtctactgtattattgctaaatattttgtttatactaagggacaattattttaagaccatggatttaaaaaaaaaaaaaaaaactctgtttctgcaggggatgatattggtgagttgccaaagaagcaatacagcatatctgcttttgccttctgttgtttatcttacctgcagatattaagaatgtatgcattatgtaaaatgctcaattatatatttttgttgagttttttaattaaagacttgt

SEQ ID NO: 6688 - DNA, 1756 bp, Homo sapiens
gcctggctgccttgcatgcaccaggggctttcttcctcctaatcaacaactcagcaccgtgacttctgctaaaatgcaaaatgagatgcgggcactaacccaggggatgccacctctgctgctccagtcgtctctctcgaggctacttcttttgctttgttttaaaaactggccctctgccctctccacgtggcctgcatatgcccaagtaactgctctcagaggatcccactaactgagctccctccaaggcagtctgggcagcttctaactaccttcctggacatgactgattgctcccgtgttcttctgagggctggtcttgtttttgtttgggtggctctgtctcactgctaacaccttagtgagatgccttccaccctcctgagcacaccagcctcccactgggtgtgtgcctagtgcggggcgggcggaggttgggagggtgttggcttggcttttaacctgtggggattttgtccaacaaggagtggaatgatttcagagctgccctgaggctggcaccctggtcacaggaaccctctgcgctggctcctgtctcagtcccctctgtagagttagatcagaagacacagaaagttctgtggccatgaaagataccagcttggaagggttgtgtcttcagtggcaccctcagaaaaattgtcttaaagcaaagaggtacctggctccagacaatttttctgatgaaaacaaagtctctgccccgtccccaccctgccaccctggcaaagttacttcctttacagctgcccagtgtaccatagaccagaccccaggtcagcatttgtcaagagcatggctgctgagtcccctgtggcagtcaatgcactgtttaccaaatgcaggtttctgttctccctccccagcaagacctgctgaacccagatctctggaatggggccctaggaatttgcatttcaacctgcttcccaggtggccctgatgcaccccagtattagagtttattgctaaaaggaacatgccctgtcactcctggtatcctgggagtcatgtttctcttctctctcagttctacttggagcaagagctttcctgggctgcaaatgagaaaacaattcctaggaacccacagcagtactgagcatgctgggagcttgggacttggagatgaatgagccaccgttgctgctccaagtaggactacttggagtgtagctgaggccttggacgcagtatgaccaggggcagctctgccagggctgttggccaatcagtcattttcatttcttgttggaggccaggtcctctgctgaactcatttcctagctagtgttaccctaattctgatgaagatcaatggggctataattcttgtttttgttcctctttgcagcattaacagcagcaaagttgtaccccggtttgaaaggtttggcttgggcgtcctggagtccagtaatccaaagatgtagccagccatatggtttttcgctgctgatctctttctttttaaaatgtgtttctgaaacatcccaacaaccaccacgacaaaaaaacactgcctgcccagcgctgcaaaccaggagcacacgtcctagattcagactgttggccataaaccccactcgggagatggagctgcacctgctatttcttaaaatgacaccaccaacaaccaaacctgtcatgacagacagcaaatgtttacacgtatatttctcctgagtgaacctgatgttttacaataggtaataataaaaacagtctgtgc

SEQ ID NO: 6689 - DNA, 577 bp, Homo sapiens
gcggcttcctggccctggggccgggggctggggtgtggggcagtctgggtcctctcatcatccccacttcccaggcccagcctttccaaccctgcctgggatctgggctttaatgcagaggccatgtccttgtctggtcctgcttctggctacagccaccctggaacggagaaggcagctgacggggattgccttcctcagccgcagcagcacctggggctccagctgctggaatcctaccatcccaggaggcaggcacagccagggagaggggaggagtgggcagtgaagatgaagccccatgctcagtcccctcccatcccccacgcagctccaccccagtcccaagccaccagctgtctgctcctggtgggaggtggcctcctcagcccctcctctctgacctttaacctcactctcaccttgcaccgtgcaccaacccttcacccctcctggaaagcaggcctgatggcttcccactggcctccaccacctgaccagagtgttctcttcagaggactggctcctttcccagtgtccttaaaataaagaaatgaaaatgcttgttggcacattc

SEQ ID NO: 6690 - DNA, 1742 bp, Homo sapiens
tggtggaagataatgtactactgaagatgtaatgtagctttccactggagtctgggatttgcaattctggaggttaatcatgcttgtactgtaattttactaatgaagttttaaattaacaaccactacttgtatgatatgaataatatttagaaatgttactagacttttaatcttgtaaagtggttgtgcttttagaagaaaaatattttacccagagttgcacatgttttatgaatttagtgcagctgttatggctcacctcagaacaaaagagaattgaaccaaatttgggagtttggggttttatgttttgtttttcttttctaaaatgaagtgagattgttcacacacacacacacacacacacacacacacaaacacaaaggacagtcatacattttgatatttgagccattcctaaagatttggggttttctaaaactaaagaatctaggaaccttgcctgcgaccaatcatggagccacgtgagctgatcgtggctgcacctggggggagggtagggaggaggggcatgccacctaatgatcaagccctataattagcttctcattagagccgtgatggtgatgtgtgctgtctaaaatccaatgttgtgggtagagagaatgagtttgtgactaggagagactaaacttttgttttccttacccagtataaatatatatatatatatttaatctatttttattagaagtttttctgctctttcttacataaaagaaccccaagcatgcatctttcatgtgtgtaaataattcatttctgggctaatttcaaaagaatcccaatattgctgtatagaaagagaactagcttgcacattttaggtctgtgaaattttgtgagacttttcctgcactggacagtaaaaaaataataaaagacaaaaacaaatttaaaaaaaaatttaagccacaaaaaaaggcacatagggaattatgtcaaatgtgtttgtgtccttaggcaaagctgtgggagtcttgaaatgtcacagtagtaaataacttattactttttgacaagttctttttttctgttggaacactgaattcttctgtgcatatgtacatatgaatacaaatcgaaggcctctacctcctggagttatacaacttggcttgtttacctccacatgctgatgatgactattttttttttttgagttcagtgtggagacttgaaacttgaatgtcccttccaacttttatattaaaaataaaaagacaagaaaattgaagatcatttttcacctgtacaaggaatactaatggatcgtcttaaaattggtctaggaaaaaaccttggtgtgtgttatggacaattaactgttaaagttattgtaagttatctgtatttagcagagtattttcaacttgagtgatctgagctgaatttgaagactattaataagttatgtttggaagttttaacttcaatgaagtaattatttgctgtgaaagaaacaaacattgaattactaaacaaagatggtgcaatatctttgttttttttttatgaggctcctgagaatcaacccaactgaagcatttcaattcacttgaatgagaaacgtgtttagtatcaaaagagcccaagaagacactggtgtgaaaggtacaatctcagaggttggtcaattaccgtggcacactttctggtcactttgtacaatgtagatttgaagtacagtggtgaaaacattaaatgtgacatttgaa

SEQ ID NO: 6691 - DNA, 1891 bp, Homo sapiens
aggaaacaaccactggcccagggtagagatgcctacagggtggttgcttgttggatacaatacaaggaacactgctcagaacccacgtcttcagcagcatttgaaacactggcagcaatgcacaagagcaagatggtgtcaggaaccatgtcaaaccctcaccttcttccattttttttttttttttaagacagtctcactctgttgcccaggctggagtaaagggcagtggcatgatctcggctcactgcaacctccgcctcctgggctcaagccatcttccttagcctcccaagtagctagaactacaggtgtgtaccaacacgtatggctaatttgttttgttttttttgtgtgtgtggagacagggttttgccatgttgcccaggttggtctcgaacgcctaggctcaagtgatctgcccacctcagtctccctaagtgctgggattacagacgtgaaccactgggcccagcccaaaccttcaccttctaagggcactgggatgaacagaccgatcggcttgagggtgggcaaaggggtgtgggctaggttataaggaagtggtaccaaataactgtgtgcctgagttccaccgcaagattactaaaagcaggaccagaccagaaactgctaaagaacatggcctgtttgacatgttcatgagtcacctgacccacagcatatatgcttatgactaaaccctccactcctgattctcaagagtgtatcacctgtcagcaaaatgaatagtgggatattttgggccattttaaatgtgaaattttgcctctttaatgttaattcaaaactatatcaatgttttcttgttcccacctctaacccaaggaaaaaagagaaaacatactatgcaaaggaagtttaaacttaagttttccttaagggtcagcccaacaatgactttcagtcaaatggattaaactggaaaatgtttttgtttctgttgtaaacagatcatcctaggcgaaagttttttttgtttgtttgcttttaaattagtttatttctaaatcttagtcttccacatttctagaggccacctgacacaagtccctgtatctgaagtctagcatctcaaggctgatctggaagtgtgctagtatgctccctagtggataacttaatcttttaatacagttccgtcattcccatcttgttttcagaagagaaggtggctacagccaggcataacatatccactgtgtgcatagagggtctcttcacgttgatgcttggcattccatcagctttctctaagtctttgctcaagttcaaccttaaaatgatgttagacaacaggtcccagtcagttccctctattttcacccattttgctcacaagccatattggcccgattagtggtactgtctgactcacgtgtgtgatccaaataaaggtagctgctgaccactgcctggtttgttttgtggactaggggatagagaatccagggttctctcatgaggagttaaacatatttcaagagcaacaggaaaaaaggtacatcaagccatttgaaaacaaaaatttattgcttctccttccaaagctttgtgaatttacaaaaaaaaggatgaaagtttacaaactgcttagttccaactaagcataagaggtgagaacgtacactgcagggccaccagcagcagctgtgcactgatgttaaaactggctcccccagacttgtagtgctgtcttcagggggctgcattccttacacgccacctcttgtgacataggtcattggtcaagccgctggaatgctacagaggtttttttggttttgagaggcttttttttgttttgccttcctactataaaagcgaaattttcagttcatttctgaaaaataaattggtcaataaattc

SEQ ID NO: 6692 - DNA, 2407 bp, Homo sapiens
ccagaccctcagggagtcagggcacgggaggccctatctcccatcctgtggaacccgccccattggccaccccatgctgctgctgcctgggtctctgctctagcacccagaggcatgacaggccctgctcagaggtcagagggtctgggcagaggagggaccacattcccctgccttgcccctgagcacttctggagactgcgtcctgtcctatctgctcaccatcacccttcctgcccgacggagctgcttctgctccctggggcatatggactgacccacctcctgctgagaaccttcccctaggccctgtgcagaaggctactgccccttaggcctcagctgggggaaaggcagttctggtgctgtagaggccctggtgcagaaagtgggacgtcttttttcctaaggtgtttaagcacaggcttgataagtttggtttttaaaaaataatctaggaaatgaataattctaaatctagtaatgaggaaactgagcatttcttttgccctccagggtgccaagaccctacatatgacagaacccttggcccttctccatgcctgtgggatctgtttctttaaagcactttgtactgttattcaggaggttgataatctccttgacccatgtctttctaccctaatccccacttccctgcagaatcaatctgagggaggggataaagaggaagcaataaaaaaaaaacatccgacagagcagctctggctttgcagcctggccagcagctcagagtgcaccgaggagggaaggatggctaagctgggaccggcagtcctcacagggtgcctgtgagaaaggacattttacccccacatcatagtcacatcactgactcctaggtctagcacgactgctctttgtgattctcttgagtacccttggcttccagccatgctgtcctcacatacggtaaagccaaagagctgtcacatgggccagaaacatgagccacggcaggaagaccgtggagcccgtgggcactgcatggtgttggctggcatgcccatcagctgaggacagcaaactcccagcagcccctacagaggtggcacatgcttggccacacatctactccctgcccacaccatctatgctcttggttggtgctggctgggatggcggttctgcccagtggtgtctctgagcgcgggatgacaggagcaaccgaagcaccctgaaggccttcactccttgttgggtaactcagccatggagatgccaagcactagccaggaggtgagttcctctttagggctttggttttcattcctttttgtttggcttggccaaaccagaattcagcttatctgaattattttccaaaggaatgctgtcagggagggactgttctgccagcctaacaaagcaacgtagccacgtatagtacccactttctgctctttggagagaacacaggttatcaagttcatctctcttgactactcttatgatagctgatgccacagagcctatgggcaaatgccagacccagggttagacacaaggacctgaagtgacatgacggcgggacaggggaaatgtgactttctaattaggcattttatgttagtcacagtcttgaatgtataaacagcactaagactctcaggtcaggtaccttggtgatcagctactagttcttccagccctcattgaggtaacaagataaagacaaatccacttctttggccaaattcaggctttggctttatgactttcccacagagactggaatgcgtcagcctgagaccactggcctattttctcagctgccctcttgaggtcctttaacactcaaattcccagctccccactgaggtgttgtgatgcttgccttttgacctccccatcccctttagtccctgcttactactttgacattcacatcctcagtgtctcagtcttttttgccgagaaagcacagtagtctgggactgggcatttatcttctctgactgaaaatctctccttggtcttaaggaaaatactaacattgaactcactgacatgatcttagcttctttaatcagactttgtgacttaaaagtttgggggttttctttgaaagtttccagccctattcagaaagcaactcttggctgtgtgcatttttcaactccaagcagcccaggggtaagtaaacaaagtatggatgaaggtcagattttcttgtcagtttctgagaaacctggcagcctgctgttaacaacacaggccagtattgggttttattgaatttggtatgtgaccaaggtcggcctaaaggatggcgcaggtcctgggcaggaaagaatttttcctttatcacataactgtaatatttggttgctcagcataagtgatggaagcaaacactaatttctaataaaattgtgttaaactc

SEQ ID NO: 6693 - DNA, 814 bp, Homo sapiens
ctggtgcttcatcatcaagtctagagaagactttgggggcttcaggctccaattggcagtcaccgactcagtcaacccatcagactttttgtattcagctccagttagtcagaagaccagcccaggccagctgctgtttctgtggggagccctaatcttctgtgaatttccaaagggagcattggaggagattgagataacacatctttaaaacagaaagaactggtcttggtctatcagtacctcttcctgaatctggtacccatctgccttctccagttcattctaaacactgctgggactagggtttttccatcaggagcaaatggaatccaggccttcccagaagtagaccatactgccttgaacttgtccatatgtacaaactgatcaccagctttctccatacatttttaatgcagacctgtaattgagttcagaagcctccaagaaaacagaaaggatcccctttctccagtttgtgctggaagaggagctgatcagagacatcaaataagagaaagatgggttgctagaggatggtagaactggaagcaaggcagctacctttttgcaaaaggaaatggtgttaggccccttttccagaagataagacagactcatagagattaaatgatcactatggtccttcttctgttaaatggagccaaagacgcctatgttgttctgaagtcttgtaatgtttaacttctgagaacttagattagtggtgtgatgatagagtctgtataacgcattgaaaagggtatcaggcttagttatttatccaataaatatttattgtatgcagggt

SEQ ID NO: 6694 - DNA, 4760 bp, Homo sapiens
ccagtccccagttccccagccctgctgtgacttccatttccatcgtcctttctgaaggaacagctcctgaaaccagtctccctgggctgagacaacctgggctcttcttaggaaatggctctccctccccctgtcccccaccctcatggcccacctccaacccactttcctcagtatctggagagggaagggaagtcaggcttgggcacgggaggttagaactcccccaggccctgccattgggttgtctgtctccgtcatggggagggtccctgctcagttctggagacactggagttggggtgggggtggttctgcattcccttctcctgctgatagcagtcagcttgaggaggatgaaggaaggcagcctcagacaggaattaaggcaatgcccaggcgggcctgggcactgtattctgagcaaaggcctgggcccaggagccagccagggatgagtgccatcatggctctccactcagactgtgcctggcccctgcacttacaacttcctgccgctctgtggccttgccctgtaatcactcagtgcccttagctagcctgactaagtcccagatcccctacagcttccttcggtgtggtatcttttgccacatccagggcgagggttgaggcaaaccagccctccctctgacttccttgtcactgcagccagctttgctgcacttgctggtgcacaggagcctcctgtttgggcctgggtctgggcatggggaggccgtgcctcaaagcccaccctaccccatgccttggtgctgtgcctcaggctccttcctggtctggcccagctggcttccccagcccctcagccatccagggctacccactgcttactcagggaccaggcagcccccatggcagtaaaagcagcctagacagaacctgcagctctgtggaaagaggcaaagtcctgaaaaggcaaagggttgtcacttagggcagcttctccaactttaacatgcatccaagtcacctgggaatgttgttaaaatcaggagatctggggtggggcctaggactctgcatttcttacagattcccaggtgagctgatgctggtggttaagggtagcaaatctctaaagcacgaagccctcacaaatctttgccatttcccaaacactccgctccatggtctccagtcatcagagcaactctacctggtattatcatccccattttacagataatgacactgaggctcagaaaggttgaggataagcccactttcctgtcattagtggcagccccagatccagacctaggcctcctggcacccagtccactggcagtggaattgctttcctgagaatcattctgaggctgggctattgcttctcccttgcttcaaagaatctagcagcgggggataggattttgcaacaaaaagctgacccagaggccatacagagcaggaatatcccattgccccctcctccactgggttcagagggtaagaaagcaccctccaataaacccaggctccaggccgtgggggctgctgaaggctctttccccgcaagggccaggtgttgacaccttaaagctggcgcccccagccccactcttggctgtgctggccaggtgactcctagttcttggccacatcatcagaaagtcaaaggtctcactccaggtttggggctccttccttccactcccctccctgccagagtctgtcttggccagtgccagcctcgatgctttggttttgaccccacctgatcctcctttcctcatgcagcacaagtgctcaccggggccagagccagggcatggatatgacaagcagggcagcctggacactgccctcacaggacagcgccaataacaatacagtgtctgagtatctccaggggatgatttctggctctttgtctccaatcagtcccactccctcctgaggtccccaagggcagtattcagagaggtttcctgcgttttatttctatttggtataccctccactgttgtccactgccctgtgtggccttctggttgacctctgcccgatcttctgtctctctgagggaatcagagtccagcatccagccccagctggaacagctgaagtcacaagcctcctctaagccaaggccagtgtgttcagaggtgactgccacccatactaggacaaacacagctcagatcaccaggtcaagcacctaggcctggcttctcctgagacagaggactcagaagtggcctttcctccaaagcctgctcagacacaggtctgtagggccagggtgttctgcttggctgggctgcagctgctacccctcggttggggctgagtcagccagatcctccccctacttctccccaagggccaagaactgctcagggacattaaaggtcaaaagtccagccacactcattcatcctttccccaggcccatgaagagaggcatctcattgtagaatgtatgaggaagtgggaagtatctcagagaatcagctaagtttcctaacttgtccatccaaatgtgatcaccacgattcaacaatttggggcattgctgatctagccgttcctagtggggcttgctcaaggttgcacagcgagtcagtagaagccctggctggccccacttggtaccaatccaccaggcagctcagggctcctgcccagcccagcagcttctgttgtctaacgtatggcaggcagactgggagcaggaaaacagagggccccaaagcccaaggcaccagaaggtttgtttcagtttgctgaagctgatttgtaatgattggcactcttcagccaggggagtgggtaggccatagccaaggatcgattccccaaccacagcaaaggcaacactcttcctccagagatcaccaagcccctcttacctccctccctccttcccaaggctggcactaaccaggtaccacattcattgttaaggaatggctgatgactgctacacgtgttgggaacctggttggggctgtgcagtttgggctggaaggagagatgccagccctcgtgctgcctctggtccctgaagtgtcacctctctcaggacctctcctctggcctgtggggttataagtgatggatagcagaaagggagaactgactcctgtcccaaatagctcctctgccacctgtcctgcagtgggcctgtgtgggttatgattctagatcctagacagaggctgggtcagctgtggatggggtggtgccttggtctctcttgactacctcgtccaaagagagcactgcccttagacaagagttgcttgtcctgctgtgggctgggcttccagctgcagacctccagttgcttggtgttcactttgctcctcttgccctctgtcttctggtccaggcagatcaggggctctggggaaactgctggaactcgaggtgaggatcagccttttccagcatcctgtgagagaccagagagagagtttggatttcatgtggggaaccctcaaggcctgtctggagaagtgacacaggatttactggggtgggctggtccaggtagctctcctgaacctcctccttccccaagctgagaagctgagagctggaggacaatatccagggacatggctctggaaaataacttttttttttttaagagacagggtcttgctctgttgtccaggctggagggcagtgacataatcatagctcactgtacccttgaactcctgggctcaagtgatcctcctgcctcagcctccttagtagctgggactaccagtgcataccaccatgcctgggtgattttttaaattttttatacagacaaggtcttgctatgttgcccaggctgatcttgaattcccgggctcaagtggtcctcctgcctcagcctcccacaggatcgggattacaggcaagagcctccacgcccggccatgaaatataattcttaatatcatacaggaaaaagtcagcgggtcaagctagcctgtggcccagccacaactagctgacaaagcttcctggccttccctttaacacagttctgctgccatagttccatctataaaatgggaatggagggaaataggggaactgggatagagaacacagccttgccaagcagcaatgttagcctgatccttcctccacctagctcgccatctcgcccttggaaaatggctcctggaggattaggcagccatctgcaaggagaggggcaacctgggacaagacacccagagggtaaggattccaggaatgaagctgccatttctggttgggaggagaagaggaaacttttaagagaaagggctccattatgagcatgggttcagggccctgcattacccaatcagaacagccgggatgagcaggaggccagctcccaggaggaaggggaaccccttcataaagttcagagtggctgggtagagtgagttgaagaatgccggaggccgtcagcatggccaggctattcacacaggccacagcagaaaagagagcacctgtgaagaaataaataccatactctggagtccgaaagggccatattccaactctggcaccaccacctcacagctgtgtgaccgggagtagtcacttaacctatgtctccccttcctcaccagtaaatcctgctacatcatgtactgtgacaaggattcagtaaggtcatatgtggacagtagctggcacagaggggctactaaacaaatggctgctattaaatccacattaaaagtacatgtgatctgacagaacccagcacataaaagaaaaaaaaaagt

SEQ ID NO: 6695 - DNA, 100 bp, Homo sapiens
gctggggcacagcctggccatgcccaggaagacccaccccattcccactcctctgagcccggaggggacaccccaagctccaagctccaagctccaggcc

SEQ ID NO: 6696 - DNA, 719 bp, Homo sapiens
gctgtgcccagcttcgtcagctccagcgtttgcctggtctggaagtcctggccggccgcccacatcgggctcaccttaaaggtcaaggaaggaaaatactacctgtcccctatgccactaagccaacgtgtgtgtcagctggtagctgggggcgcagaggacatcacctggggtgctgcctctcacacatttctgccacgtggtggcccagctcctcacccagggcccccaaagagcaagcgtctgggcaagaggaaaatgccctgtccctagctcacactcatccacacttaagccctcgtgcacacacacaaattattcagatgtacacccacccacatatcttacagccagaggaaccagcactccatcactgagagcccgacttcgtttctggggcaactgagagctgagcgctttgcttaccaaaagctcagggccctgtgccaggccaaagatccccccagacccccattctgacatccacatgctctgcagtcctggccccctcgtcattttctttcccagaagcgccctgtatttattcccccatcttcatcccaacagcccagcaagaaggaggagacagagagctcctccctgggttgtctgtggacccccccaggagctgctaattggcagcacccactcagccattctctacccatccttagtacatgctctgtccagctttccccagggtgacatacagaaggggc

SEQ ID NO: 6697 - DNA, 605 bp, Homo sapiens
ggggcctgctcctcggactctggttacctctgaggctgggaaaggcctggctgcccactgcctccctccctgcccctccttttatgtccataaagtggcgtgaagtgagacgttctctttggtggtcaacccggatgggtgacaggctggatggccttgtgaacttgagctcagtgtatgctaggcaacaattctcccgctccagaccctcaccgaccacctgtcctgggaccaggctgggaggggagtgtggcagggaggaggaagaggaaggtgagaatgagtagaacagttttgtattctactccctacaagccattttgaacttctgccctcaccggactctgggctgtgactggggcaccaaactcagcacatgagtctcccctagctctcgtggggagagggatgctatttattcagtttggggcaggagggagaggagggaaagtatttctgaccctgatgccaacagccgggtggctgtccaagcaggattgcaggggacacagggaagcactgcccagcccctgcctggctgccctttcccccctgctgctgccaccgcttcctgcctgtcatttgaataaacagtgtttctattg

SEQ ID NO: 6698 - DNA, 474 bp, Homo sapiens
actgagtccagctgcctaattctgaatatatatatatatatatcttttcaccatatacatgcctgtctgtcaatttctggttgggctgggaggccacacacacacactgacatgacagggcttgggcaagactcctgttctacttatccttttgaaatacctcaccctgccactccaccatgtatgatcattccagagatctttgtgactagagttagtgtcctaggaaaaccagaactcagaacttgcctccatggttgagtaacaagctgtacaagaaccccttttatccctggaagaggctgtgtatgaaaccaatgcccagggtttgaagggtgttagcatccatttcaggggagtgtggattggctggctctctggtagcattttgtcctcacacacccatctactatgtccaaccggtctgtctgcttccctcaccccttgcccaataaaggacaaggacttcagagg

SEQ ID NO: 6699 - DNA, 777 bp, Homo sapiens
ggcacccggattcacctctggaccaccctgatattgcttctcctctgaatgctctgaaaagtgcaggtgcccaaggcatgacttgcagctgtctcctggattgtgtcatcatggggtatcagggctggcaaaacccctgctctgcttttggccttggatatggaaacctcaaccactttgttctcctaccacctctttgcccttcctaccccttcctcccttcagtcagtgtccccagggtccagcctggctagagttagaaggcagacctagcctttggaagcagggtggcctccagagccttgccataaaaaggctgaaggcagccgggcgcagtggctcacgcctgtaatcccagcactttgggaggctgaggcgggcggatcacgaggtcaggagatcgagaccatcctggctaacgtggtgaaaccccatctctactaaaaatacaaaaaaattagctgggcgtggtggcacgcgcctgtagtcccagctgctcaggaggctgaggcaggagaatggcgtaaacccctccagcctgggcgacagaaccagactccgtctcaaaaaaaaaaaaaaaacaaaaaaggctgaaggcagctgtagctccacacagaccctaccctttcccctagcccagttagaaaataagtctgggccggcggcggtggctcacacctgcataggcagtgctttggccaggaggatcccttgatcccttgtggccaggagttgggagaccagcctggggaccatagcgagaccgctgtctccacc

SEQ ID NO: 6700 - DNA, 1380 bp, Homo sapiens
gtgcaggtggggttcgaggggaaaggacgatggggcatgacctcagtcaggcactggctgaacttggagagggggccggacccccgtcagctgcttctgctgcctaggttctgttaccccatcctccctcccccagccaccaccctcaggtgcctccaattggtgcttcagccctggcccctgtggggaacaggtcttggggtcatgaagggctggaaacaagtgaccccagggcctgtctcccttcttgggtagggcagacatgccttggtgccggtcacactctacacggactgaggtgcctgctcaggtgctatgtcccaagagccataagggggtgggaattggggagggagaaagggtagttcaaagagtctgtcttgagatctgattttttccccctttacctagctgtgccccctctggttatttatttccttagtgccaggagggcacagcaggggagccctgatttttaataaatccggaattgtatttattaatttgcttccagcctgacttacctgggttggttaggtccctgggaggctcaaccaaactgaaggcaaagaaaggaccagtcagagaagggccgctgcctgggtctggccccaggatccagcttacctgctggctcgccctctgatggacgccgggaaaactgcatcgggctttgtgtggaagacggtccctgccactgccctctgccgatgaaatgcgggaagtgtatggcctagatgtttcataaggctggagtccctggtcagccccaccagattagtgcttctaccctaggcagggctttcttggtctaatggtaataagcaccgacactgctaagcactttacgtgcattattatttcattgaaaagaactgtcaagtgaaatactttttagcacagtaactggctttgtgggctctagagaagagttaatgaggcagtgcatgttcttggcccagagtaagtgcttagtgaatgctttctaactccgaaccccagccacatccagggactgggtgttgagcaaaaggggccttcaagatgttcaaggcacttggattttctcctgtctctcatcggcttttcttaacgggcctcagtgggtgcatgtgattatccacgtttcacctatgaaacatgaacagaggagactgacttatcagtgattcttccgcgggttcggacagggcctcgattctgttttaaactccagtagtccctagaaattgtagctccctctagttgtggcaataggtgtgggtccttgtgcttgcttttggcaagtttctgagctacacagggcctccattaccgtcactggtgaaatgcggctcacctcccagatttgttgtaaagattaaatgaactggtcagcac

SEQ ID NO: 6701 - DNA, 501 bp, Homo sapiens
ccaccctctactgaccctcccagggcattccagctcaagctgctggcaggaactgaccagttctgtccttggctggggaccctccaggcactggtgagagacatgaacactgactggccactagctggcctggccctgttgagtctgcacagtccctgcccagctgtgtcttctgttggaagaaggaacctgccttagctcagtttccaggtggttcctctgcctggcaccacagctacaaaggtgtagctaagaagatggcccattggtgggagcaatgtcaccctgcctccagctagctatgggcccagagtttctccctgagtcgctgttgctagcagggagatttctcttcctgccctcacttctttcaccttgaacttggataagaactcgtgtctcctgagtgaggtagcgcctcccatctgctccccaattcttgatctctcccaccccatccctctccccagtcttggatactaataaaatataagcattctg

SEQ ID NO: 6702 - DNA, 913 bp, Homo sapiens
cctctggccagaagcctcccttctgtgcacaggagccagtttcacagatggagaagatgtctcagatgaagggagtgtccctgagatatcatccttttcttctgcctcgcctgaatcccccataaacaccagatgattgagtctaccttctttccttggcccgctccctttttcttctgcctcacttgaatcccccgtaaacaccagacgattgagtctaccttcttttcttggccacctccccattcacaactactttctcgctcccagaaggttgatcagatattctacaatcacagagtagcaaggacgtttgagatgggtatatcagtaagaagagggcacaagaactggctctggagaccaaagcagttgttaaaaattctctttgctgggggccgggtgtggtggctcacacctgtaatctcggcactttggggggctgagacaggcggatcacctgaggccaggaattcaagaccagcctggccaacatggtgaaaccctatctccactaaaaatacaaaattagctgggtgtggtggcgcatgcctgtaatcccagctacttgggagactgaggcaagagaatcacttgaacccgggaggtggaggtggcagtgagccgagattgcgccattgcactccagcctgggcaaaaagagtgagactctgtctcaaaaaaaaaacaaaacaaaaaaaacctctttgctggtatatttgaagagcttgggatggatttgactaaatctgccccgaggagggtgaacaaggtgatctcagagatcactactgctcttggagttccttctcctaaagctaaggccagcctccatcacaaatgcccataaaatctggctcgtctttgatgaacaataaatatttgttgaacaaataaataactgccctgcatt

SEQ ID NO: 6703 - DNA, 133 bp, Homo sapiens
ctgattaaaagctccaagtacgataattcctcaagcatgagaccttgctaagcactctagaataagttttatgttctgctcacagacattgctttcaaatgttagctgctgaaatccacaataaacgtcattt

SEQ ID NO: 6704 - DNA, 1462 bp, Homo sapiens
cttaataattgagagtggcaattccgctggagctgtctgccaaaagaaactgcctacagacatcatcacagcagcctcctcacttgggtactacagtgtggaagctgagtgcatatggtatattttattcatttttgtaaagcgttctgttttgtgtttactaattgggatgtcatagtacttggctgccgggtttgtttgtttttggggaaattttgaaaagtggagttgatattaaaaataaatgtgtatgtgtgtacatatatatacacacacatacacatatattatgcatgtggtgaaaagaattggctagataggggatttttctgaacactgcaaaaatagaacgtagcaaaatggcttcagttatcacttttgggtgtctgtatcctaagaagtttctgaaaagatctaaagcctttttatcccatatcccaaattcttatgagccactcacagcaggcagcatatgttgaaataagttattactggtacacacctgcattgcctcaccagtgtatttatttgttattaaattgatctgacttctcagcctcatttggactaaaaaaagaaagcagaaatccatgaacacattgcttctcggccttttggctaagatcaagtgtagaaatccatgaacactaaaggacttcattgattttttcagagagtagaaaacaacttagtttttcttttttcctgaatgcgtcataggcttgtgagtgatttttgtccattcaattgtgccttctttgtattatgataagatgggggtacttaaggagatcacaagttgtgtgaggattgcattaacaaacctatgagccttcaatggggaagaccagaagggtgagaggggccctgaaagttcatatggtgggtatgtcccgcagcagagtgaggagatgaagcttacgtgtcctgacgttttgttgcttatactgtgatatctcatcctagctaagctctataatgcccaagaccccaaacagtacttttactttgtttgtacaaaaacaaagacatatagccaatacaaatcaaatgccggaggtgtttgatgccatatttgcaaattgccatctattgaaattctcgtcacactacatagacataattgttatctccttttggcttatgtgattttctgtttacaagtagaatagccaattatttaaatgtttagttgccacagtgaaccaggagtcactgagccaatgactttaccagctgctgactaatcttcatcaccactgtagattttgctgcatgtgcaggtcctctatttttaattgctgttttcgttgctgcagtactttacaaacttctagttcgttgagacttagtgaccatttggcatcaagttaacatcacacaataggaaacaccacttccacaagtctcaagcctcagtgctaaagtactactgaaaaggaactaggaagtttggccaatt

SEQ ID NO: 6705 - DNA, 232 bp, Homo sapiens
cggcctgggacctgccactgtggcgtgcggctcctccccgcgccgcgaggccgcgacctctgccacgtggaccgcgcgcggggcgctccctggtggcgatggcgcggcactggccgagcactgcgggggctttcctccttgttggttgctgagtgggcggccaaggggagaaaaggagccgcttctgcctcccttgccaaaactccgtttctaattaaattatttttagtag

SEQ ID NO: 6706 - DNA, 1179 bp, Homo sapiens
cgccccctgccgggaccctcgccagcgccacgcgcgccacgcccagggccaggagccagacaaaccccggcctgcgcgcctgcagagcggcggctggagactggagccaccgcctcgcgggtgcagcagcacagcaggcacggttcggggagggattcggcatggccgcggggtaccttcccaggccagggccctggaggcaactggcacggcctggtccccctgctttgctgtattctgattccccaacccgctcccctgggctcagatctgtcctgtcctagggcggagccaggcggtcctgagggggagatgaatccttagaggagcgctgtccctatcccttgctccttctggccggtccgcatttctgttcactaaccccactccaggacactgcccctgaagcctttgcatctctgctcttcactcctggggggcagctgagctccccgcgtgctgtgtcactgctttgttccagacacaaaccagcacgtctagggcccagcccctcccccaccccggcatttcagcgtcaagtgcacttagcggggtacccggctcccccagcccccacacccgtcctgggtctcagggtggttccagcttctccttgggcagccagaagttggagtcccatcccccaaggcacatttttttttttttttttttgtgatcagggagtgtgtccaacgtagccccctggcctgtgcaagccctgactccctcatggtgcctcggagagtggggagcatattgggctggggtaagcactagacccaagtagactggacacaaagggctcgcccagggccctggcgccacccccaccccttcccaccagctgctgctagcctctgtggttgtacatcccacttgcccccacacggagactgactctaaaacccttcatccaatggtgctaacccccggctctcccctgccccacctcacccacccagagaagcacagaccccgccaggggcaggggcccaccgcacacccttgtcccgggcctgtctgggactggccttcccggctcagccagtgaggctcagaagggacacaaagagggatggaagaaaagaacaaagagaaactgttcctcccacccccttccctgatgccaggggcaccagactgattctgaggcacaaataaaagaggcttcataccgga

SEQ ID NO: 6707 - DNA, 427 bp, Homo sapiens
taatggatgataatggaattgatactgtatttaggatcctttgtttgttatcagttttgtttgttaactataaaatattttccattggaaaggggtacctataaatgtcttctgctgctaatatttatctcagcactttctaaacccaaaagtgctacctaagaagaaatttagccaaaaaatacccagctaaggtagccatagccaagtgtatttaagtatgttatagaatatatttgaaagcttcctttcagtttgagctttgtatctgctgtggaactgttatggttgattgggtagttatttttcattcttataaggttcaaagtaacagctgaggatttagaaaacaagaataccaaatagaatacgaaataataaagataaaccaaaagaataccaaataataaagatttttaagaaatgg

SEQ ID NO: 6708 - DNA, 793 bp, Homo sapiens
tggctaccccaagagaaagatttaaggaagcacagaaaactgtaattcctggaacctgctgcgtaaaaccataaaggagtgtgttaccagtagtttggagggcatttttaaatttattttcaaaattttaagttaaaagtcagtcttacagcttggatgtttggatgtggatgtttggctgaatttatatatagtgtgtactcatcaataccacattctttgttgtattcaagaaccgttaagagtgtgctaattccctgtaggtacataatgaggaaaatttgctccactacaaccattaaaaaataattttggccagatacggtagctcgtgcctgtaataccaacattttgggaggccaaggcagaaggatattgaggctaggcattcaagaccagcctaggcaggataataagaccttgtctctatttaaaaaacaaaaagcctagcatggtagtccatgcctgtagtcccagctgttcgagaggctgaggcaagaagatcacttgagcctaggaatttgatgttacagtgaggtatgatcatgccactgcactccaacctgggcaacagaatgagaccctgtctctaaaaaattttttttaaataaataatttaactcttctaataatgttttgttgcaggaaatgtatttcagataaaatatggatttgaaaaacagaaaatatactttatgttctgaaatttgtatttaagtataaaatgtgaatcatcttgtctaaatagcttacagcatagttggcttaaatgaaaataaaatgatatgcttat

SEQ ID NO: 6709 - DNA, 3867 bp, Homo sapiens
aaaacacattttgcatatctcccagcataagtaccaagcaaaattacagttcctcttgggagaacactgcattaagaagagagactctcttgcttcttcaaagagctttgggaaattaaattgctaaatttgtattctctgtgaatttcactggcagttttgaacttcccttccttaaagtactctaaacctttaaaaaaaaatctgatttatgcagcagagatgggacagccactttttctttttaatttaagatgagctatttggagcttatgtaataatggcataaagccaactagaggatgttgtattttgcacatcagatgtttactagtggctttagtatttttctttgttttaaatggccaaaagaatccagaaacattaaggcagggacagcagtcagaatcgacataaagctttaaaaactcaaggttttttcaacctactgaggagtacttttctctagttgttaaatagctggagtttttcttattcaggtttaatggaggttgaattgatttttaaacacatataacagtaggaaatgaataaatgggcttctgcatttggctttctacctgttccaaggctagatcggaactggtagactacgctgtaagcaggatttcactacctctcttaaggtttagcaaacttctaaatagcccattttaagggagaacttactaactttattgtgaaaggtctaaatgcccacttgaatgaagctgagagagagatctagcaaaagctaaaactcatgttgtctatctttgaacttggtaaaaacccacaggtgctgctgcttatatctgtgaagcactagcttattctaggaatgcctgattctttaatattgcctaaatcggaacctttttctatgttgcacacatggttttcagatgacccagccatctacaagatctgaattctactgaaaatatctagaaatgtggaagagacctacttgcacattcttaacctgtatttgaacacaaaatatctatacttcatgctccagcccaagcctataccctgtaatagcatactattattgaaatcgcttgaccggtcttgttcacataggcctctgggagtgatttggttctttgccctaatgtttcatttgacggtctctttttgatcaaccaatttttctaaaagttcagtcgaaagcttttaagtatagcttcctcccttgaaaaaaaatgtaaactatgactgctgagtgataaaacactgtggtgtgaaagtgtcatcttcactgccaatcaggcaaagaccggaaagatttgcattttattatgtctgtcttatcatgcaatggaaatgatgctttttgtaagtatgcatcttaccaatgatgtaacggtttaatacctttgaatgttttaataaccaagttgctgctgaacttatactaaatcaggggaccaaaaaacttgctcttatcttctcaaattgtattctatatccattaatgtatcagttatcccaaagccttcaggtggaggggtttaccaccttcctaggtcgttcaaccaggttttgtgaggaatgcattcaaagtggctttataaaagaagattttctttagcaagaataatgaggtcatgtcatttgttaataagtatctgtgataaatccgtggttcaaggttaagccattctggtattctggtattagcaactgtaaattctgccacctcatacatggaacagagcttgtgggatgctaatagttagtgaagtatacatgatttaatttctaataatctttatgttttctttaaggatggtggtgtattgctctttttcagctttatttttaagagtacagtcaggaaaccaacaaggggcctaagagtggctgcccctgcttgggacattacagcaagtgaaacaaagttaatgtgacaagctttgctttgttatcattggtcttcactagaggataccttttacatgtacttctctcttggatcaaatatgtctttaactgtacatctcagtggctggaggccatgccttttaagcatgtgtaaaatttttaaagaaatgaacatacacatagttattttagtaatatttcctgaaagaaaaaccaaattctgctataagtcttgatcttcaatgaacttttaaataatgcatttagctggaaaacaagactttcccagcttgtattacctagaagcgtgaatgtataggatacctgactactaagactatattctcagccctgccctgtcttttatttgcgggtctaatctaatattagaatatattaaccgcttaaggcattgaagccatatgggatggggaatgcatttcttcagtgtttctccgagagactttccatttccttggagttatggcggcaagtaagtatcatagtattaagaaatttgcctaaatctgagttgtgcctttctttactcacaaggcatgggctttgtcctggtgatcagtttgtaagccttcttccttcccagctccttaataaaagcaaagtgattgagtaggtaatgttcaaagtgtctgcctgtgtacatgtacttgtattgattatgtagttcagtaagatgtgcccaagtcatttcagaaagaaagacccttcagttttgatgcattttgctgaacacttgggtagtgagtgggatcctatccagttgaggaatgcttgcaatgctcattgaagggatttgctttgggactttgtcatcttccagaaaggaaacatattgtatatttggcccagtgtgattgattgctttatctttggtaacttttacttgaatgggatttgctgaattaatgactattgaatttaaaactaattatgagttgacaaataaataaaaggtagtgtttatgtctgagcttattgtgtttgagctaacaccaggttactcagtaaccatgacctgctcctccatttccatttattctcaacattaaatagttttatcttgttgttgccagaaatgcacttgtgccaggtattgtccctgctgtatgaaaagcttcttggcaatgaattctgtaatagtgccctacattatggttttctggtggaattgttttaacagtgacaacccaggatttccaatatatttttgttttattgttattaccaaaaattccactatgattgatgttcagtgattttctatagcaacttttttggtaactctttgggtttctgatttgttttagctaaaattttggggatatgatttgggtctttgattaatgtcagctgaacttggatttctagttcatgaagaaatctctcccaatacccatttatcctatttttagcaataattcgttaatgattccacttgattttcagaatattgtcctggttgattttgatttgacagcatacattatgaaatttgaaagtaggttaccattttgaggcagttggatataaattatgtaaatatgtatgattatgatttttataaatggcataacatgagtgtactaactaccttctatgctggccatgctacagattttctggaggtatgacaatagtatttttttatgctcagattaaaaatcagcttttcacctctccagtttttccaagtgatactcccagttctagagcaatctacagctgtttatgtgaggtgcccaacacccattcatctcaagtgcttcagtctttggtttatttcatgcactgtgccttcaaaatgaaatttttaaaagggactttaaatgaagttgaatagtagtttttaaaagtcaatttgtaatttatgtgaaatctaactgtaatgaggtcctttctgttttttatatgtaaacagatctactaatcctgtataaaagttattttacgatg

SEQ ID NO: 6710 - DNA, 4435 bp, Homo sapiens
tgggacatcttcagggactcttgacagccaccgctttcacaccctggtctggaataaggaaacatcggagggagaagttgactgtcttgataattagcctgaccagcaggatgaatgcaagactgacagtgatggactctgtgacatggtcaggttgagctgaagccacagtttctctgtgctgtgttttctaacacatttttctgtttttaattaaaaaaaaaaaaaaaaggttttcagttgcttttgtctccctaggaggcaggtaaaccaatcaaaaacagagttttctgtgtttccatgatagtgttgaagcctaatgacaagccaggtcttacagctgggctcttcagaaaaccaggtttctacatccaaagactgcttttcttttagctgccagattggattgtgaataaaaataattcttccctctccctctccctctccccacggtctccctctttccacggtctccctctgatgccgagccgaagctggactgtactgctgccatctcggctcactgcaacctccctgcctgattctcctgcctcagcctgccgagtgcctgcaattgcaggcgagcgccgccacgcctgactgcctcggcctcccgaggtgccgggattgcagacggagtctcgttcactcagtgctcaatggtgcccaggctggagtgcagtggcgtgatctcggctcactacaacctccacctcccagccacctgccttggcctcccaaagtgccgagattgcagcctctgcccggccgccaccccgtctggaaagtgaggagcgcctctgcccggccgccatcccatctaggaagtgaggagcgcctcttcccagccgccatcccatctaggaagtgaggagcgtctctgcccggccgcccatcgtctgagatgtggggagcgcctctgccccgccgccccgtctgggatgtgaggagctcctctgcccggccgcgaccccgtctgggaggtgaggagcgtctctgtctggccaccccgtctgagaagtgaggagacctccgcccggcagccgccctgtctgagaagtgaggagcccctccgcccggcagccaccccatctgggaagtgaggagcgtctacgcccgggcagctgccccgtccgggagggaggtgggggggtcagccccccgcccggccagccgccccgtccgggagggaggtgggggggatcagccccccgcccggccagccgccccgtccgggagggaggtggggggcgcctctgcccggccgcccctgcccggccgcccctactgggaagtgaggagcccctctgcctggccaccaccccatctgggaggtgtgcccagcagctcattgagaacgggccatgatgacaatggcggttttgtggaatagaaaaggcggaaaggtggggaaaagattgagaaattggatggttgccgtgtctgtgtagaaagaagtagacatgggagacttttcattttgttctgtactaagaaaaattcttctgccttgggatcctgttgatctatgaccttacccccaacctggtgctctctgaaacatgtgctgtgtccactcagggttaaatggattaagggtggtgcaagatgtgctttgttaaacagatgcttgaaggcagcatgctccttaagagtcatcaccactccctaatctcaagtacccagggacacaaacactgcggaaggcggcagggtcctctgcctaggaaaaccagagacctttgttcacttgttgatctgctgaccttccctccactattgtcctatgaccctgccaaatccccctctgcgagaaacacccaagaatgatcaattaaaaaaaaaataatataataataattcttgtcctcttattttacactcataatgagaaatcacaagttctttcttgatgatctgtgctatagatttctactctgtctcctcaactctgttgatatttggggaaaattctgtttttcatagattctttgagatgctgatggaccagcttcagcatgtttgaggttgtctgaaatggagatcactgtaaaactgtctttttcttttaaattacaagtacactggggttaactgtattgctggaaaaacatcaagaatgacagtcttatatttaaggcaccagtcattgtttccattttttttttaattcttcccttggattaatattttctactgaaaagaaatgaaatctcagttccactatgataaaagaaacgaatcaccagtgtctgtcagtgcccccactgctcctcctcataccagcattgacactggtagctgaggaaggggactgctcaatttctaatgtgatctattcaagaagccacatataaaaaggcattgagggctcactgtccagagaattgcttttgtaaatgctccacaacgtatgggcaaaagtttaaggactactgcctgatgtaccaggaatcctgagttctgtgaaaatctgttcattccaaatctgttaagcatttccaaacatccagagaatggtttcactgttgagggtgcatgtggcagaatctgtctctctctgcacctgtcttctgttaccatccctggacagtgacagattttaagccagccaccagaattcttttcgagttaaccatttcttagtttctgtaaattcatgacttgtcttactgaactacagcctggtttgtagacttccaacatctacactgctgctcttcaccattggaattcactgtggtatttatagtattggcttcagtccgagccacaggcaataaaaggatatcagctgtagttctcagctacatcatggtgtatagatgctgttattcaggcgaacttgctcatgggtggactaacacctggtttggtacagagactgagaagtttttcattctggtgtcaaagttttgttacattatgggtgtgaagggcatttgatatatttttcttaactatggggtttatttttctaaatgtgggttgattgactgttaattgattcagggtacccttaaaagaaaagaagttttcccattgtgaaccttaaatgatcagagaagtaagttcattgattaaattctctgttgggagaacaaaacttttctcccttgacactttattatctttgatttttcaaagggccttgattggtggttgtgtctcggttaaaatttatgggactttgctatgtagttggcatttataaaatctgaagtatcataaataaagttatttatttaattatactaccagtcttttttactggtctgattcttttgtgcattcattaaagctgattgtgtgagagtgaactgggacacaagctagtctagctcactgcagccaagcaaaccctgttgatggctgatgggcctttccattagggttttgcttatgtgaagtaatggaattatgttggttattttctttatgaaaataaaccagttcttccaaggaagttaaaaggcttggtatggatgttggtgtcagataggtctgactaacctctccgtgctgcagcctatactaaggtgacccagggccacatgtagacagctaggccagtgctttttcctcttagggtttctttgcagaaagaaacctccagcaagggaagagaggtgtgtgtccacaggaaggggctccgtggggatcccatgaagggatttgagctctttcagctccatgtcatttaacttttttgtttaaccaccttggctttctctccttttttgctgtcctccttacggaccagttaccagattcagaggctaacagttagttacttgttaatgctagtcacagccaggaggtcagaaggaattttctacttctggatccaaatgttacctcttaggggaagttatgccccctcaactattgtcttattataatgaatctttcctttttggtccttttaagtaaccactcaaaacttttcatttcactgaaaaaatatgaaaaaccatgacaatagggctgggtgcagtggctcacgcctgtaatcttagcactttgggagaccaaggcaggcggatcgtttgaggccaggagtttgagaccagcctgggcaatgtagcaagactctgtctctgcaaaaaaaattaaaagatacctgagagctcactttaatatcaaggtatttgcatccattcccaccctgttagctcttaagggaggagggaaatcaattccaaccatactttcctgtgatggaagatgtttcctcttgaaaaaatgccaatacagatttttaaaacctattgttttccaaatgcactttgtaagtttttgcttttaaaatagcttcttggaaccaattttattgtatttgtacttaatttttgttctcatctaaatgtgcattttctgactgtatagaagaagctttggtatgtaatttaataataaattagaaatctaaatg

SEQ ID NO: 6711 - DNA, 64 bp, Homo sapiens
tagtggggtgagggtcagcaggaaaacatgaacaaatgtctctgtgtcataaacaaggttaagg

SEQ ID NO: 6712 - DNA, 364 bp, Homo sapiens
tgttccatactaacaatgctttgtatagattatcatgtggtccttaagatacatttttatattatgtggatcttcatggaaaagtatatttctcgatgtacattttaaacaaacaatttgtatatttttttattggcgggtaaatatttaaaatatttgagttacaaattttatatatgattgtaattttttttctgaattttttgtattatctgatttagctttgttggagtattttttgtatgtgagtgaactgtttctggaaggtagagttcattaagatgaactccctatttcaagtgtttatattatatattagcttaatattcagatacattatcttggctgctaacattagtgtcac

SEQ ID NO: 6713 - DNA, 1322 bp, Homo sapiens
cccattaactgaggaactggctgccactgaacacctggaactccttgtgggaagaagtttgcacctcggccctggctgcccaccatcagtgccccgcagtcagcagccattcctggcagtgaactctgccaggactgaagctgtggctttatccatcagctccctgggccttccccgcaacccacctcggggatctgaggatctggtgcatagatgaacatctatcccctcctcccccatacacacctaggcttgaaatgccctacaggcccagaactttctcacatctgaaatggaggcattgcaatgaaaaggcacccacagcatcatgcaagtggcatcttgtaaaaaaaaaaaaaaagtttaatctgaatctaaccatgaggaaataatcagacaaatccacattaggggcattctgctaaacatctgacccagactcttcaaaaatgaagagtgaaagataaagtagtcaatggccgggcgcagtgagattgcgccattgcattccagcctgggtgacagagcgagactccgtatcagaaagaaaaagaggaactgaatgaaatctcagatggctgaaatgttagagaaacagagcaccaagtcccctgctctgtgactcgttgttcctttcctctgtcttcaagcaccacgcagaaatacactggatgttctctctttgcttcaatggagacccaaggagctgggaggtctcttaagagactctctgattctccgtggctgggtgtgatggctcatgcccataatcccagccctttgggaagctgaggcaggaggattgagaccaggagttcgagaagagcctgggcaacatagtgagaccccatctctacaaagaaaaaaaaattagctggacatggtaatgaatgcctgtagtcccagctactccggacactgatgtgagaggatcacttgagccagggaggtcatggctacagtgacccctcattgcaccactttacttagcctgggtgacagagtgagaccctatctcaaaaaaaaaaaaaatctatgcattgtatgggactttcctttggatcccccaatcaaaggataagcaatgcgtaagcctgtgtccttcctgaagcttctcgactgcccagatagggaggtgagtcctctctatctcctctggctctggaagcaccttgaaaatgtgcattttcaaggacacttgctgggttgtgcattaagggccagtttacttgtctgcctctttgaccacctgtgaactctgttgggtgtactctgctaagttctggggatgaggaaattaataaaggtacagtcttgccttc

SEQ ID NO: 6714 - DNA, 1219 bp, Homo sapiens
agagcctttcctgcagcctggaggtgtccaaggattcccgtacagtgactgtgtctcaccgcccacaaccctatcgctggagctgtgagaggttttctaccagccaggtcttatgttcccaggccctgtcttctggaaagcattactgggaagtggacactaggaattgcagccactgggcagttggggtggcttcctgggagatgagccgcgaccaggtcctgggaaggactatggactcttgttgtgtggaatggaaggggactagccagctctctgcatggcacatggtcaaggaaactgtccttggctcagacagacctggggtggtgggcatctggctgaaccttgaggagggaaagcttgccttctattcagtggacaatcaggagaagcttctgtatgagtgtaccatctctgcctcctctcctttgtaccctgccttctggctgtatggcttacatcctggaaattacctgataataaagcaagtaaaggtgtaaggtttcctaagggattacaacacagtggtttcctggtctctctccctgtcatcaatcagggtagtaacttgacttaagaataccactttttagaaaaattacgatagagatgggatctcactaggttgcccaggctggtgtcgaattcctggtctcaagcagtcctcccacctcagcctcccaaggtgctgggattacaggtgtgagccaccacacctggccaagaataccacttttgaagttaatccttttgtgtgatacaggatgaacttgggatgtttgaaccctggacattccaaataaagaataggcccctgcctggctcctgggagataacctctaagccattagaatatcttgcctgataagagtgtttttgtttacctgtgggccttgggccatgcagtatcagcttgaccttgcaaggtcaagctgaggagactaagttagccatgtgggcagtgaagcatgccaatgtgatcaatccctagtaaaagccctggacacctaggcatgggtgagctactctggttggtaatactctgtgcacacatcattgtagccacacatcattgctgggagaattaagcattatcctgaagactctgccaggagaggataattggaagttctcttggaccttaccttatgtgcctttcttcattgctgattttaatctgtatcctttcactgtaataaactgtaactatgagtgc

SEQ ID NO: 6715 - DNA, 3521 bp, Homo sapiens
agcttgcttgctttcttttttaaaatcaacttaacatgggctcttcactagtgaccccttccctgtccttgccctttccccccatgttgtaatgctgcacttcctgttttataatgaacccatccggtttgccatgttgccagatgatcaactcttcgaagccttgcctaaatttaatgctgccttttctttaactttttttcttctacttttggcgtgtatctggtatatgtaagtgttcagaacaactgcaaagaaagtgggaggtcaggaaacttttaactgagaaatctcaattgtaagagaggatgaattcttgaatactgctactactggccagtgatgaaagccatttgcacagagctctgccttctgtggttttcccttcttcatcctacagagtaaagtgttagtcctatttatacatttttcaagatacaagtttatgagagaaatagtattataaccccagtatgtttaatcttttagctgtggactttttttttaaccgtacaaaactgaaagaaccatagaggtcaagcctcagtgacttgacaccataaagccacagacaaggtacttgggggggagggcagggaaatttcatattttatagtggattcttaagaaatactaacacttgagtattagcaataattacaggaaaataagtgcgaccacatatatcttaacattactgaattaaaactatggcttctaagtccttatccaaactcagtcatccaaactagtttatttttttctccagttgattatcttttaatttttaattttgctaaaggtggtttttttgtgttttgttttttgtaaaccaaaactatactaagtatagtaattatatatatatatatattttttcccctccccctcttctttcctaactaattctgagcagggtaatcagtgaacaaagtgttgaaaattgttcccagaaggtaattttcatagatgtttgcattagctccatagcaaaatggaatggtacgtgacatttagggtagctgatatttttattttgttaaataatttccaagaatagagtatggtgtatattataaatttctttgataagatgtattttgaatgtcttttaatcttcctcctcctctccaaaaaaatcagaaacctctttaagaaaacatgtaggttatatatgctagaattgcatttaatcactgtgaaaagactggtcagcctgcattagtatgacagtaggggggctgttagaattgctgctatactggtggtatggattatcatggcattggaattttcatagtaatgcagatccaatttctttgtggtacctgcagtttacaaaataatttgacttcagtgagcatattggtatctggatgttccaatttagaactaaaccatatttattacaaaaagatattaatccctctactcccaggttccctttatatgttaagatataatggctttgaggggggaaaaaataaacctaggggagaggggagtttcctgtagtgctgtttcattagaggatttcagtaaattaaattccacagctaattcaataaataatggtacatttaagtgttctgattttaataatatatttcacatttatccacacagtaacaatgtaatatgttaatgtaaataaaattggttttgatactcagaaataacaagaatttaattttttaaatttgtttacagtcctgggaaaagtaagaattatttgccaaaataagaggaaagaaaaccttagtattattaatgagtttaccatagaattgttggaaatactgaagacaggtgcaatttactaaacttttgtttttaaactattgtagaggctgcattagaagaaaatgtttataatgacagagcaactatgactatataaaaaagctgaaattagaactgtgtttagaaatagatcagtaacccagtgccaaggatgccaagctgccaccatggtcttggctctcccacaacccagtgtttctggggtaagtttcacagtttctaggccctggaatagcaggcagtgtaagcctttgataactttagttcgatgtttttcttgtttttgtttgttggtttggtgcatatgatagtgggtgttatgctattttgctcttcccatcaaaataaagaaacttccagaggtttactgttaaaaatactgatatttccataaacgggtttaccaagggtgtagtatttcataccgcctgaaatgatcagcattggcacaaatcaaaattcagccgcctttgaaatgcaaaaatacctttgactagtaagtacatcctaggagtttgaaaacttaactaaggtttaaaatttaccttgtttaaagaacttctgacttttgaggaaaatctagctttccaagtaactaaaatgtacatgagataaacctctcaccactatgtgtcccttgagaaatgcaacacttttttagtcttcatacttgtaatctataaaagaaattctgaagtttagaccaagttgcccatttctgcgtaattgacataagttctgttaaaaatattataagtaattcgtttcggtttgtagatgtttcccctgacttgttaaagaggaaaccaggaactcagtcatgtttttgtcctggataatctacctgttatgccagtactcccatccgaggggcatgcccttagttgcccagatggagatgcagttcagtagatttggggcaaagtggctacagctctgtcttccattcactcaacacctgttcatgactgagccaggtgcccaggacacatcctaaacagtcagcttctatcctgtgtcctagttggggagacagagtgccagccagcaaccctcccaggtttgtaggttttaggggttttcagttttgtttgggttttttgttttttgtttttgtttctacatccttccccgactcccaggcataatgaggcatgtcttactcaatgttatgcaatggatttaggcaaaaattcattcttagtgtcagccacacaattttttttaatgcagtatattcacctgtaaatagtttgtgtaaaatttgacaaaaaaagtatatttactatactgtaaatatatgtgatgatatattgtattattttgcttttttgtaaagcagttagttgctgcacatggataacaacaaaaatttgattattctcgtgttagtattgttaacttctttttgcgactgcgttacatcatttaaagaaaatgctgtgtattgtaaacttaaattgtatatgataacttactgtcctttccatccgggcctaaactttggcagttcctttgtctacaaccttgttaatactgtaaacagttgtacgccagcaggaaaaatactgcccaacagacaaaatcgatcattgtaggggaaaatcatagaaatccatttcagatctttattgttcctcaccccattttcctccttgtgtatgtacttcccccacccccctttttttaagtaaaatgtaaattcaatctgctctaag

SEQ ID NO: 6716 - DNA, 6482 bp, Homo sapiens
ggcacggggctggctgcagagcagccttaggaccctgggaccaagggcagaccctgcccaaggatgcaggcctaagccgggcctcacactcacactgtaaatgtctctctggccaccatgcgttacgtgtacccgtgtatatgtggggaggctgtgcacacgagcgaggggtgagtggccgtggctgtgggcagcatccacacggttagccgtgcatgcactttgtggcccctttgcaaggggcagagggtactggaagtgggaggaggcaaggtctgctatcaggagttactgtaaaaacaagaactggaagctcgtgtttccggtactgggtaaaatgattctacctctggggataaggattcacattcgctctagtacgatgggctctttcaccccactcctagtccccttgggagtgggagcaaaattgtgatctttcctaggagtttgaatgccccatatttgtgtcctcgccagctctttggccacctttcaagccccagtgttcaagctcagagaggatgaaggggcatctggagggtccatgagatggggccctcaccaaatgccttggccaccggccagcagccctctgtgatgtgtgtgcagagtgaacagaggactcaggtttcatagcagctagtgcggggcatcctcatcctgtacctatagagttcgtgcactcccccatccatgctacctacctccccgtttctgtttcagttttaagacaatgaagcagcattcactgcgtcattgtaacatgaagggataaaaatgaaggagaaggagggtttgggatgggtgtctaaggcaggagttgacatcgggcaaccaaagaaatgagttttggggaggaacacaactcccatcccagtcagtttccttcccatggctgcatcttaagatggatgcacggagaaaccgtctgcctggctccctgtcttcattctccacgcagcctggtgatggcaggcctgggtttggatttcagaatcctagctccgggctccactcgtgtggcagcaagactgcttcgttccagcgtttagaaacacacctgtatttgattctcagccaggggagcactcgctgcactggtgggaggcggttgggaaagttgcaggaaaaccttagtcttccatccttctgacccatggtggaaattcacaccatggatttttaatggatctttgttctaggcagctgggaatagacatggtacttaccttagagttttccaatttatctcaattttatatggcttgtgattcattttcttaatccaaatatatataaacgtgtgtggtcttattcttccccctgcagtttcttgctttcttcagcacatcttatagtatgagaaggaaggtttgggcatgttgggaagggcggtggagggggagttgcagaaagagagggcagtgagggtgaggagaggggatctggggacttgggtgtgacacctgcttgacagaggcagggctgtggccaggaccaaccttcaattccattccaatcagcctttgcatttgttggatctcgtggcttctttttaatcttttgttggggattagtttcatgctgcacataatggggttgcactggtctgacccaggactttggagccacccacactgggaagactaggctaggcagtcggtcttctaggagtttctcagccccttaggacgcgggtctccttgggctcccccaagggttctgcgaagaggcagtggaagaaggcatgaggagagggtctcttgagaatttgccaataggaaggagtggccacggctgaaaggaacaagacagatcctgacatagctttggcctgggtgttaggtcagaaggagtactggtgcgtgggggccttaccccagggttgagtattttatctgtaaaatgttatctgccctttggctgcattggaatttcagagaaggctgcagaggcctgggttacacagcctgagtcacaacgtgggaaggaatctctgccacgggaaaggtgggcggaagcagctggcagcctggggcgtgcttcaggctcctccctctaaggggcgccatgggaacaggctccggagggagccggcgtctgaaaggcccccgggacctgctgcagtgccagaggggcctctggagcaggcctggcttttaaatggggggctgaattccagctcacacacacctcaagtccaaccttactttcttcagccagaatacatttcttgtaaaacctggcttgttgcttggcttttaaagatggtgtatgtttgtaaaaatattcttctgggctcaaaagctagcttgagggggcagatgccccaggtgtcccagctccacagcccctggcagatcccagaccccttggtggcaggtcccagagcctaggtggtaggagcttgatctttgtttctgcccttacccctcagtagtggggctgcgaggtagtagacaggatgcccagttaagtttgaatttcagatagaaaataattttagaataaatatgttctatctaatacatgggacagatgttatttttagagataggatcttgctctgttgcccaggctggagtgtagtggtatgatcatagctcaccacaaccttgaactcccaggctcaagcgatcctcccgccttaactgcctgagtagctgggactacaggcatgcaccaccacgcccagctaatttttcttattttttgtagagacagggtctcactgtgttgcctcactcgagctgctgacctcaagtgatcctcccacctcagcctgccaaagcactgggattacaggcatgagccaccatgcctggccaggacatatttgaaatggggagattttaaaaattctgatgattagactgaatcctcagacgttctggtttgattgttgtgggtgtagcccaggcatgggattttttaaagagctgctcaggtaattccaatttaattgcgtgtcctacttgggttttttgtttgtttttattgtttttgctaaacctggcaaccctaccgagtagggattagcagtaacttatctgaaatttagaggtgttttgggggtggggcgagggtttctgtagtagactcagattttacatggccctgagctgcccttgcgttcagttggaagccacgcaaaatgaactgaaccaggagtgagcttcgtgtacattatctattagaaaatgaagtaccttctggttcagctagtccctgtgcgttgagaggctttaagaaacttctagtaaaaatgtttttttcttttagctttgaattggccagagtttatcctagattattttattttaaattggtagaattctttgcgaactgtcacagagaaattccttttcatgactttatttctgacctattaaaacatgaacaggccaggcatggtggctcacgcctgtaatcctagcacttgggaggcagtggcaggcggatcacttgagctcaggagtcctaaaccagcctgggcaacatagtgataccttgtctctaccaaaagttaaaaaaaaaaaaaaaaaagctcaagaacctgcacgagggcctaaaacagtgggctcagctttggctgtgcattggaatcacctggggagatttgtaagcttctgctgtctgggctgaacccccagaggttcggattgaattggtgtggggtgtggtccaggcatcgagatgtgtaaagacctccccaggtgatgatatgcagtccgaggttgagactgccctgtcctgcaaggtcgttggccagaggtagaggaaactggtcaaagtggctgttgggcttgtcaagcccgtggctgaatgacagtgagctctcttgctgggagggttccttttcctgttgttgaatggtcctggcctgcaggatgggaggccagatgccttcaggagctggtggatccagctgttctcaccagcctggaggttagcagaccagagtgggtgggcaggaccttggcctggtgcccctggaatcagtgggtggcatgtgttgggatatactggctacaggctcatctcaaagagcaggtagaacagagtcagcagggaactgacaggtggggctgtccccctgaaagcagccgcagaaacagctgccacctatttgcatagctgagcaggaggacatactgtctttgtgggttttgcttctggtctgtttcctgactgggttgataaagggagtcccagctcgttccctgttagccaaaccagcatcctactcacacaccggacactccaggtgctagtccactggtgctggtgttcaggggagttggggggggggggcgcggggacagaagcgcgggttcttggttccaatgagggacttagcagaagcctccaggggccagcagggccaggtgaaactgggagaaatgaagccctctgtgtcctgtgtgtgtggtggggtttaatgcattagcaaatttaaacttaaaaactaactctaggccgggcacggtggctcacacctgtaatcccagcactttgggaggccaaggcaggtggattgcctgagctcaggagttcgagaccagcctggacaacatggtgaaactcttgtctttatttttttaaaaaaacaaaaagtaactttcgatgtgatcataccaggaaagttttgcgtggtcaccatgccaagaaaatgactttggttgcccagcagatccacagcgactctttctcaagggctactgtggattctagattgaggaaaggggccacttaggactcagtgctggtatcctccacagtcctttctcccagactctggccctccctttgggacccaggaaatcccctctagggtgacgctgctggctaggaagactgaggtctgctgcgccaaggggcctcaagttagaagggccatgccgttcagtggatgactttgagcgctgatcctagggacctgccaggtcctcacttcctgccctgggtgcacacatgaatggggcagccagcaggaagcgggagaggctggaaccaggagcctgccctacctgcatggcaggacaactctgaggcccttctgccatattctctgctacccaccagagaaaataggctgccttctagaaagatttgtttctaaaagcgtagaccctggggaagtataatgtcaccatgctcaccaggcgaggtttcccatatgacctccctgccccgacctcgtaggttgctcctttccccatctgtaaggtagagatgtctgccccggagctaccagctggggatggcatccaggccatgtctcctgcaggatccaagtgctgttgtccccagggtgaccctgcctcctgctggggcccatccgctttgctgtgctgcacaggctgttttcatctgcatggtttggggtctttgtccttgtgccttttcttccccatcgccactgtacaggattttccacattgcccactgcctccttttctacatcgtctcatctccctggcctttcccgagccctgtaaatgtgtactttttcaacgtgcctcccccaggtgaggccagctctcccgggcacattcgtccacaaggatcaggccccacttacccttggctcgctcagcctgtagacttggtaactttgtacagaatctttcattattgtcttaagcatggggggctaggacccacttagtccctcctccagcctgcagctaatttaggagccttgcattccagaaaagggcaactttgtgtaaagcagcttctcccacagagctttccctgcattgttagtgatgtcgggcaaagcatcactctttaacctggggcattggccccagcagggatatcatgggaccgcagccgctccgtgcactgtctctgcccccagaggaagccctgtccatggttcctggtgcacggccacaggcctgccttgaggccaccacatctggtgtctagaacagctgcgggccccacttgggcagaaggaagaggtgctagctgctgcccctgcctgctgtgaacacctgcccagcccttccttgtctgctgaggtgctcagaccagagtgccattaaataccaactgatgtcacggagcggacggtgcattgccaaggactcacagctgtgggctcccttccagctcctcccactttcttggctgggtcttctgaggcctacgtggaatgaactacacatgtggcctcatgcccaagggtttgttagatggcctctgactctgtgggattcaacttgacttttttgccccaggaggctctgtctggaaacaggcttagctttagtgctggggtgggacctgccctgtgggccccagggaggggacagtgggggtgaggccctgaggctgtccagggtctgagctctttgcctccaacctgcttctgccccaaaaggaacaggctgttggtggcaggctcctcccggggagctgtactgtacagaccaaggtgtaaataaacagtttgctcttctcgc

SEQ ID NO: 6717 - DNA, 2027 bp, Homo sapiens
aaagctctaaccccatgttatggacaaacactgaaattacattttagggaattcatcctctaagaattatgtttttgtttttaatcatatgttccaaacaggcactgttagatgaagtaaatgatttcaacaaggatatttgtatcagggttctacttcacttcattatgcagcattacatgtatatcacttttattgatgtcattaaaacattctgtactttaagcatgaaaagcaatatttcaaagtatttttaaactcaacaaatgtcatcaaatatgttgaattgatctagaaattatttcatatataaatcagaatttttttgcatttatgaacggctgtttttctactttgtaattgtgagacattttcttggggagggaaaattggaatggttcccttttttagaaattgaagtggtcttcatatgtcaactacagaaaaggaaaaaaatagaaattgaaggatttttatgaaattatattgcattactatttgcagtcaaactttgatccttgtttttgaaatcatttgtcaattcggaatgaaaaattataatgtaattttacattacataagttccttttacaattaaaaaatagcacttcttcatcttatgcctgtttgagaagatattaaattttcacattgttgacagtgaaatgctatgttggtttataagattacagaccatttgttttcatgtggataattttagtgcattgctcacccggtatgttttttttttttaacttgaacattttgcttgttttgtttttcttttttaattagataatcacacggaaaattaagctgttcatatctttaaattaggattgcaaaccaaggaaagaacgcatttgagattttaagatgtcacttataaggggagaagtgttcttaaaaagtcaaccagaaaactgttatgccttttatttgtttgcaaggatgtctttgtaatgtgtttcatgaatagaatatccaatagagataagctgacttgaatcattttgagcaattttgccctgtgttatatgtgtttcacgcacatatttgcagttggattttctccaacagaaagtggattcactactggcacattaacaagcaccaataggtttttattccaactccgagcactgtggttgagtaacatcacctcaattttttattatccttaaagatattgcattttcatattctttatttataaaggatcaatgctgctgtaaatacaggtatttttaattttaaaatttcattccaccaccatcagatgcagttccctattttgtttaatgaagggatatataagctttctaatggtgtcttcagaaatttataaaatgtaaatactgatttgactggtctttaagatgtgtttaactgtgaggctatttaacgaatagtgtggatgtgatttgtcatccagtattaagttcttagtcattgatttttgtgtttaaaaaaaaataggaaagagggaaactgcagctttcattacagattccttgattggtaagctctccaaatgatgagttctagtaaactctgatttttgcctctggatagtagatctcgagcgtttatctcgggctttaatttgctaaagctgtgcacatatgtaaaaaaaaaaaaaaaaagattattttaggggagatgtaggtgtagaattattgcttatgtcatttcttaagcagttatgctcttaatgcttaaaagaaggctagcattgtttgcacaaaaagttggtgattcccaccccaaatagtaataaaattacttctgttgagtaaactttttatgtcatcgtaaaagctgaaaaaatccctttgtttctatttataaaaaaagtgcttttctatatgtacccttgataacagattttgaagaaatcctgtaagatgataaagcatttgaatggtacagtagatgtaaaaaaaattcagtttaaaagaacatttgtttttacattaaatgtttatttgaaatcaaatgattttgtacataaagttcaataatat

SEQ ID NO: 6718 - DNA, 170 bp, Homo sapiens
gcatgagttaaagcatgtggatggcctggagctatgtttttaaaattgttattaaatattggttttttacttaaatcaatgaaaactttctttactttgtggttgtgttcctcaaaatgagaatttttaacaataataaaaataaagcttgttagatcatttttaatggt

SEQ ID NO: 6719 - DNA, 993 bp, Homo sapiens
tataaaaagaaatactgtccctaccaaaaacaaatacttttatgtacattctgaatgctttaagttctgctagaattattgagatatttatacatgcagagttactttattaatatttgtaattcatgcataagagtattttaatgatagttataactgcagtattggctagcatatggaaagaaaacagctaacagccaaactaaaatggctaaattccagaggccaaaagggaatattttgtaaatatatgtacatattcaggcaagatatggtctcccaagctgagttctagaaatgatgtttctagacatttctaagtggtattgttagtgctcacttggctcactcttctaggtttaagttagcccagagattgtatttactcatggatcactttatttatttcacatttactcagaatgatcctttgggttctataaggacataaggtacaatttgccattgtctctccatttttaaaaacatacaagtcagtgtcagcttaccaacatgacattttttcagtcagttgtggtaggccagccttgaagccatcgcacagtctagaaacttgtgtagctgagtgtgcagctcacctttaagggtgaagttaggtaaaagcaattagcagaggcgttatctatgtgattatgttgcttccttgtcagtatgttgaattttatagccctttcaatgaaataaaaaaaaaatttgtatattaccaatgtttttagtttaaataaagagtcacccttactactgttgaatttcatcccaagtgtaaatcattctataatggctgtgtctgttatagtatattacagtaactgcatgtgtcaccaagtgttctatatcaggctaggataacctagaggcagtaattttttaaatgataaaataaatctaatgaatataaactctcatgataaacctattttttccatcatcagccttttcaagtatttaaataaataactgctgtgtactgtg

SEQ ID NO: 6720 - DNA, 3432 bp, Homo sapiens
gggctggaggcccaaggtcggggaggggagggaaaagcagcacccacagggagcgcctgcgaggtttcttctcatcaccagctcagctaggccgggcagacaaggacagaagactctgggccactgtaatgtttgtgtttagatttggacacacagtggagacccttttctgaaaggcatctggcggaggagttgatgtggctgctgtcgtttttctcggctgctctgatgacatcgggccagggtgaaggtctggggtggggtgtgagagtggccctccctcacctgggctgggcttcttccatggggccagggggtgccccctcactgctgcggattgagcagcagcttcttcctcctcctctaccctcagagaccctaagagacatgggaaggctcgaaggttgttgcgtccaggcatggcccctctctagctcagaaataattgcaggccatgtggtgtctccttgacacctgctgtgtctggggctccagtaagaagagggcctactggacatgtcagctgtgacctggctgaaaccagggtgccctcctgggctggttggtgtgcaccggggcatgatctgttgtgcctgggttgggcagagcagggagcctgtaggctctaggacccctcttgtgctgggggtacccagtgagagggacccatgcagggggaataaacttcattccaagttccaccctggagaagacagacccaggaccagcttcagacttctccctccctttcttccaggatattggcatctcacacgggtgccccagcctccatgcccagccttgttttagggtctttttctttccttttgctgccctgacactactttgtgcctctctttggttatggagacagtgttttgaaacattcatgcgtgtgtgtgtgtgtgtgcgtatatgtgtgtatgtgatgggaaaggtaactgaggcacgacagcgcctgcagagaaggcatggaggatgcagggggcccatgtgggcatccgtgagaggtggcagaccgtggtgtgctgtggttgctgaatgtccttgctttgacaaagcctgcccccttccttcccatctcctgtcccttccacacctgcccctgagcatcactgaccggtggcagaatggccctgctggagggagagctcaagccctccaaggatccctggatgctgaggtttgccaggttcagctcttgtttccgtctgagatggccttcatatccaaaaaggttccatcctatctcccttaggagagaaagagctttgggggcgcaagagaggctggggtaggaatgttgaggccatgtgtccatttaagttagggggacaggaggctacaggaagaggaattccagtttagttggaaaactttgcctcaggagaattgttgggtgcatggatgaacctcagagggagggcagccagtagcctcggaggcttggatgcgggagagaacatggtggttatcaaatccaccccaccccattacacaggtgagaaaacaagatggagggaatgaccctcctaacaggagctggtgcaggccccgaatggagggcatgaggatgacctttgacaaaagatgacactccctttatcgtgctcttggaattctcaaccactgacagcccagaagaacaaagaacgccaggcctgggaggaggcaggggggctgggcgtgtccagaaacaggggcaggagtgtgggaacggtcttcctccagcctggtgcccatcctggcccttgagtgtagcagggtccagggtcagtcaggccaggcatttggggtcttgggccacagtggcttcccatcctggtgactacatgtaaatgggctcactcactcactggcaggcgaggcccagccataccgcatcttggcccactgctaaatagattgccctggcctcatccacatatgtagttccctaggtcctgctcccctgcaccagtgccatgctgagggccgcagcctgtggcactgtgggcccacgcctttggcggtgttgcgtcagcctggggcgtcttgtgtgtgccctgcccaccgttctctgccctagtgatagaaagatgtagatggaagtcagtgcctcagaggaggaggctctgaggctgtggagctgggctcagggaagaccaggggaggatgcagaaggagtcaggacattgctgcctctgcctgggctgcagccgcactaagctgagcgatgaggtcctttcctggagggatggagaatcccctccagattcctgtcctggcccctggggattctgtggtgtgggtggaatgagcagagtgccacctctgtctggtatgacctggagagggggcttcctctcttaggggtgagaaagcattgaactagaagattctagaaatccctcatagaagcactcagctccctcggggactcccagggaagcttgttactgagaaggacagtggaggcggaatcgtgtctcccaccatgttaagtgtgtcctctgctgccaaggaccctcgtctacaccttagaccaccagccccagctgttctctgtcagcacacccacctccatcccctctcccaaccatgacttccaagcggggccacagggtggggtcatagggtcacttcacctgacccaggcctctccccaggtcaggaggcagctgtctggtcagaggggttctctttgtggcatctggctttctcctcagcaggtcccaccaccctctcagcagcacttccccatggccaaggctggccgtgtcctctgtgcctctttccttgtctgaggtggctgccagcccagggggtggtgtgtaaatcttcaggctggtggaggtaggttggccttttatccacaggatacagaaactgaaagctggggaatccccaaacagcagccatagactcactggctctcattaaacgggagaggaatcacagaaactggggaagggaaaacaaaccttcaaaggagaaatttcgctttaatgacaccattcatcattcgttttttaattaggaaaagctccctaatgaggctcttttgccagctaataggactctcgatttccatgagaaccattcttgcccagaggattaggggagctgttgctcaccacaccaggatcttcccccagcgtccaatttaatttgcaaatacgtaatgcagattccctgggtgccgtgaaagcctttcctggcatcattcatgttgctccccgtgctggctggaaagcacggttctcctctgccttaaaaacagtgcccaacagtgaactgcccctccgaggacttgagtaagtggaaaaaacaaaacacagactgcaatgtttgtttctaagtatttttgtattgtgtacattctgtatatttttgttgtaacatattatttgagcacagattccattaaatattttttttctttttccaagc

SEQ ID NO: 6721 - DNA, 690 bp, Homo sapiens
tcttacttcatccagtctaataggtttggagattaaaccttttctcaacttgtgctgtttatatagccaagcttccgtcaataaggcttcattgtgactttaacaaacattatcttcccacataccaggaactattggacatttattttacatgggaaaaattatttggaataataaagcaggaacttttcctgaagttgcaatttatactgtatggcttctttttcatgtttcatctaggtttttagaagtgaagtatagtaaatttggttcgttaaattgtgaaggcgctggaattacatgaacataccaccctagtaaaggcaagttctgtaagcttacattgctatttgtaaagtttgccttcacagcatttcagatgctgttggacttcatgtccccaacctagcttggtgagggctgtaactgtttccaagtacttgtacattggaagtctgaatgtgtaacaatatttaatgtatttagagttcctcatgttgcagggtttaagaaatctgacccaccaaggtcatgtgacttttctgtactgttaaacttcattgtaataaaatgagagaaaaatttatgcctttttattcataacccagctgtggaccactgcctgaaaggtttgtacagatgcatgccacagtagatgtccacataataaaattcatagttaccaatgca

SEQ ID NO: 6722 - DNA, 271 bp, Homo sapiens
agttggatctgtagcggtcctttggagagtgtgtgtggcgggagagtgaaaccttgggggaaaatgctaggagattcttttttctttttgttctacttttcgctcggaaagtttttaaatcctcatttggtgcatctgtattccagccaataggtgtgccagttttcatgtaatctttactggcccaacttgggagtggggaaattgcttaaaaaaaaagaaaaagaaaaaaaaaaagattattctaaataaaaggaaaaaggcttacact

SEQ ID NO: 6723 - DNA, 2708 bp, Homo sapiens
gcactgtagcctgcgtcatggctcaaggattcaatgcatttttaagaatttattattaaatcagttttgtgtacagtatgtgtctagcaaagccaccaagggcctcacctttcccacagtctctccctggggtttttttcatccctgccaagaactctgggcacttttgaactcacgagccttgcgcaaaacccagaagatgtattcagagccacccaggccactgacctcccactttggggaactcaaaggactgacctgcccctgccgcctgtgcccttgctgggtccagggtaggcaaggctgccggctgcaccctgtatggagctagagaggggcctctggctgcctggcccagggaggaattggggtttctggttggaggcccttttctggctcctgtgtggagttattcactctcccagaggctcctggagccagccaccctaactgagctgccagtggggtcgtgaggcaagatccccgccacccggggacatcttcaatctaggcgaggcgaagctgagcgggtctagtggaaagattgtgtctggtcgtttgaccacacaccgccctgatttgctgttttctttttttagggagaagggcttttctttagtggagaaatggaactcgcccccctacccccttgtctgctgctcccagccacgttggtggtattggccgatgagctggtttgactcattaatttctctcaatttgggtcccagctaaagaggtggggtgaagctggggacagctttcctgggtgagtttttcttttgaataatgtagtgcagtcaccctgtggcaaatgccaggacagctgcaggtgcccattagcaacgcctgccttctgggcaaggtgagggatgccataccttgagaccaagccggtgcccacctaagggctaaggcctcttgctggtgcacatgacatttgtcctgcagagctggggggaaggcgatgtggtgaccccacccccacccgttaatttaaagctgtttctaaacagttgagtttcttctaaagaggaagccttgcccagcaaggaccagtgagacagccggatcttggagacaattacaagacggggagtgagactcctgattgctctggaagcctgctgatttctacaactgatcatttgcagctgctggttttggtttccaccttaccctactggctgtaaaaacacaaatgtgtactttattgattttctttctaattctcccgcattggtggcttgggacttgggagagggagcaagccttcctccatggcccatcactcggctgtggagaacaaagaccaatgtgaagacactacagaggattctgtcttccaggcccagtccactggggagtgctggaatggggacctggggtggggaggcagagggtcactttacataggattaagttcgaggtggctaccgatttcagcacatgcactactgaaatttacacaaaaagaaagctgtgaaattgaagtcccaatttaagagtcctgaggcagaacctggtggctggaggcattcccagaggtggggaagagagcctgcccggccggagaacatctgccttgctgcacctgaggcccagcagagccgttcctgggactgtcagataatcggtgcagcggtggaaggagcctgcggctgctggcacagacttcacacagcacctcctctctgctgggtttccacacagcctgtcttcagatcctgctgccgcgtgcgaccagaggtgggaggcccctggtggcatggaagagggagggtcagtgccaagtctcaggaggagggcgcatgtgtgtatcaccctcagctggcggaacctggctgcgaactgtgcagttacgttgcatccacaggattccagttgcgtgtctgtttccttctctttctccgtatttatttttttattcttcggaggaggtggacatttcggaagtggtggggactaagggaagaactctctagttccctcagtgtgaagcctgtcgtgttctctccccttgcactggtcatcagtattgtgtaaaggaacaactgatatacttgagtgtgcaagcaaagaacccatttgccatgctgctatgaagactacttttagatcaacaataaaaaaaaacctacaaaaaaacctttattctttaattgttgcttttacggtgatattgtgcatgcaaaccaggagcattttgtgtcttaagaaaaataatcttagaacagatggctgtgaaaattacacccatgcacagaacaagccacaggaataatagttcaggatttggtttttctctttttcttgtaaacctggagggttgatatattctttccatgcagttattagaacttagttttgttccaacagttaaacttgcaatgaaaagaaaatgtgccatttttttcactcagaattattcatagctgtatatttgaaactgctaattacacacgtgtgatgtatgttggttttttagtgcaatttcttctgtagctattctttgaccaaactgtgggtattgttaatattaatttatatttgtctcattttgtatgtatgtgtagtgtgtttgtgagtatgtgtggtttataatctgacaaagtcatgaagctcagtttggctgtaatttaattccccttcccttatttttatttatttttgtactgtgctgattcaataaaatgcactgaccatcc

SEQ ID NO: 6724 - DNA, 654 bp, Homo sapiens
tgcctacaggccagcagctagccatgaaggcccctgccgccatccctggatggctcagcttagccttctactttttcctatagagttagttgttctccacggctggagagttcagctgtgtgtgcatagtaaagcaggagatccccgtcagtttatgcctcttttgcagttgcaaactgtggctggtgagtggcagtctaatactacagttaggggagatgccattcactctctgcaagaggagtattgaaaactggtggactgtcagctttatttagctcacctagtgttttcaagaaaattgagccaccgtctaagaaatcaagaggtttcacattaaaattagaatttctggcctctctcgatcggtcagaatgtgtggcaattctgatctgcattttcagaagaggacaatcaattgaaactaagtaggggtttcttcttttggcaagacttgtactctctcacctggcctgtttcatttatttgtattatctgcctggtccctgaggcgtctgggtctctcctctcccttgcaggtttgggtttgaagctgaggaactacaaagttgatgatttcttttttatctttatgcctgcaattttacctagctaccactaggtggatagtaaatttatacttatgtttccctc

SEQ ID NO: 6725 - DNA, 96 bp, Homo sapiens
gatggacggaaccatgcacagcaggctgggaaatgtggtttggttcctgacctaggcttgggaagacaagccagcgaataaaggatggttgaacgt

SEQ ID NO: 6726 - DNA, 372 bp, Homo sapiens
acactcactccacaacccaagaatctgcagctaacttattttcccctagctttccccagacaccctgttttattttattataatgaattttgtttgttgatgtgaaacattatgccttaagtaatgttaattcttatttaagttattgatgttttaagtttatctttcatggtactagtgttttttagatacagagacttggggaaattgcttttcctcttgaaccacagttctacccctgggatgttttgagggtctttgcaagaatcattaatacaaagaattttttttaacattccaatgcattgctaaaatattattgtggaaatgaatattttgtaactattacaccaaataaatatatttttgtac

SEQ ID NO: 6727 - DNA, 434 bp, Homo sapiens
acattcatgactgaactgaaaacaagccatgacttgagaaacaaataatttgtataccctgtcctttctcagagtggttctgagattattttaatctaattctaaggaatatgagctttatgtaataatgtgaatcatggtttttcttagtagattttaaaagttattaatattttaatttaatcttccatggattttggtgggttttgaacataaagccttggatgtatatgtcatctcagtgctgtaaaaactgtgggatgctcctcccttctctacctcatgggggtattgtataagtccttgcaagaatcagtgcaaagatttgctttaattgttaagatatgatgtccctatggaagcatattgttattatataattacatatttgcatatgtatgactcccaaattttcacataaaatagatttttgt

SEQ ID NO: 6728 - DNA, 490 bp, Homo sapiens
ataatcaccatttttgaaaccaaaccagagcctgagtgttgcctaatttgttttcccttcttacaatgcattctgaggtaacctcattatcagtccaaagggcatgggttttattatatatatatatttttttttttaaaaaaaaaacgtattgcatttaatttattgaggctttaaaacttatcctccatgaatatcagttatttttaaactgtaaagctttgtgcagattctttaccccctgggagccccaattcgatcccctgtcacgtgtgggcaatgttccccctctcctctcttcctccctggaatcttgtaaaggtcctggcaaagatgatcagtatgaaaatgtcattgttcttgtgaacccaaagtgtgactcattaaatggaagtaaatgttgttttaggaatacataaagtatgtgcatattttattatagtcactagttgtaatttttttgtgggaaatccacactgagctgaggggg

SEQ ID NO: 6729 - DNA, 493 bp, Homo sapiens
gccttcatacatggactgagagtcagagcttgaagaaaagcttatttattttccccaacctcccccaggtgcagtgtgacattattttattataacatccacaaagagattatttttaaataatttaaagcataatatttcttaaaaagtatttaattatatttaagttgttgatgttttaactctatctgtcatacatcctagtgaatgtaaaatgcaaaatcctggtgatgtgttttttgtttttgttttcctgtgagctcaactaagttcacggcaaaatgtcattgttctccctcctacctgtctgtagtgttgtggggtcctcccatggatcatcaaggtgaaacactttggtattctttggcaatcagtgctcctgtaagtcaaatgtgtgctttgtactgctgttgttgaaattgatgttactgtatataactatggaattttgaaaaaaaatttcaaaaagaaaaaaatatatataatttaaaac

SEQ ID NO: 6730 - DNA, 478 bp, Homo sapiens
actctgctacccctactgaaatcaagctggagtacgtgaaatgacttttccattctcctctggcctcctcttctatgctttggaatacttctaccataattttcaaataggatgcattcggttttgtgattcaaaatgtactatgtgttaagtaatattggctattatttgacttgttgctggtttggagtttatttgagtattgctgatcttttctaaagcaaggccttgagcaagtaggttgctgtctctaagcccccttcccttccactatgagctgctggcagtgggtttgtattcggttcccaggggttgagagcatgcctgtgggagtcatggacatgaagggatgctgcaatgtaggaaggagagctctttgtgaatgtgaggtgttgctaaatatgttattgtggaaagatgaatgcaatagtaggactgctgacattttgcagaaaatacattttatttaaaatctcct

SEQ ID NO: 6731 - DNA, 1085 bp, Homo sapiens
aggcgccagccggagtagcagggacccccccccccaacggggtcagctcggggtaggacacagccgggaccccggttcacactgactctgggcggctgaattgattttgtactccctgcccctgcagcttggctccgtgcggagcgggccgcctcagtgtctgggccttccctcgcctcacgccattaccctcttctgccccctgcaggtggagggctcttcctccagtggctcgtaaggaggaaagcaaccccagcctctgttctgccctttccaaacctcctcccatcttaagcaaccccctgccccaagagtgaggcaaggaggtccagcttggggtcaggtgggcccacgctgtgtcccgggcccgcctcccgtcccccgtgtcgtccccctgtgcagggggttctgtgggggtcttgtgtcacaggctgcacaaagactttcctcaaactaatattcagggatttctgtcctgcagggtggggaggtggcagctgcctgccctgccaaggatcttgctgtggacgaaatatctgggggttagggggacagttgtagcatctgctggcattcgggtgcctcccaggacctgggagctgactctacagagaggtctggtgccaagccaggcaccttcctgagttctcaggactcccacctctgccccaagggctttgggcagggacctaaaggggaaagagtcctggatccatctctagccaaatcacaccccagagccagaggcctggggacctccttgccttccccgtcccccacagcaaggtcaacactactacgccttagccacccgtcaccctgctgactgcgacttccctctgcagcacagggcaggcagccacctatgccccacaagacggaacccgggaggggagtagagggcaccagggaatgctgtgagggacttcagggtgggcaaatgcagaagggagccagtgtcgcccctaccccatcccacagccatttttctctcgggttctacccaccactgtgtcggatttttcttaaataaatggaagcggtcagactggaggtgggggcagcagctcccatgaacagagagt

SEQ ID NO: 6732 - DNA, 501 bp, Homo sapiens
ggttttaaagacccaaggtttctaacagcctctgctgttgtataaaaagtgctgtctctcagtagtatagcggttacttcatgcctcaagatttgggtacctggattgctaaactggattgttgagataaaatgagccagtgagctacagcactttggaaaatttgtgtaacatgtttttgaggtaaagttgtttttgaaatttctgaagtgttatataccaaaatgccaacatttccacgacagacttaactgtataatttcgttgtaaaatctgtaagttgtaaatattgtacatagttaaatctgtattctgttttgaatttttttaattaatagaaagaccaaccggcaaactttcagatgaatgcttactgtggtatttggaatgtatgtatcttctgaaccctacatcaagttgaaaaggtttgttttcttgtttctttggtttttgtatggttttttagaacacttcataaacacataagtcattgtaggttaa

SEQ ID NO: 6733 - DNA, 563 bp, Homo sapiens
gtttgctgtcttccctctccctcaggccatactctcctttaccatactactggactggactcaggctggaggcagatagacacagtatagggggaatgggcttgcttctcccaaacccaccagttctccactgtctcttctggaccaggaattagttgctgtgggtgccacagctgaagtcagtttgtcttgctggtttaaatagatctttcagagctgggtgctgggtttgccatctttttgttttctttgaaaagcagcttagttaccctttttataaataaaatatcttgcagttatctttgtcctttccccacctacacccccaataatttccctagagattaaggagtaaaggctgggctatggcagctctgtccacaaagccttctctcccatccttgcctgttcctttgtacttccaggctcattttaaagttgtatttaaaggactgccctcggaaatgcttctgtttagcggaacttgtattcagcctgacacgctttgccaggaacaaacctcatgtgaaagaaaacaaaatgaatttttttactttcttctc

SEQ ID NO: 6734 - DNA, 99 bp, Homo sapiens
aacagcccggcctagccaggagagactgcagggactcactcagctgctggccccaagtcaaaatttacattaaagggaaaagaccagtctgggtgtggg

SEQ ID NO: 6735 - DNA, 297 bp, Homo sapiens
gggggagggccccaggacacccctcacctactttcagcttcaaccccaggccctcagaaaccagagccatgagacctaccataccaccagcaccctgcgggcccggggtctggcagagtggtatgggcaccccacccctgggctggggccaaggctacataggggccccattcacctggaggcatctcaggccaggccatgccaggctcagccactgcccacagctgctagactccctcctcctccaaatctgggctgggtctaggtccctcattaaagaactgcaggtcatccagc

SEQ ID NO: 6736 - DNA, 2785 bp, Homo sapiens
acagcgaccctcagggatgctgggagtggtcctgtactgtgcagagtcctgggttggttgggttctcctgaagagtcaggtcatctagggatcatagcagtgacaatgaagtctcaatataaaggaaagacttgattgttctctgagttgtgagtcttctcctttgtcctgacagagtttggatgtttcactctctctcttgcttcctgtctccttatatttgtcatgtttcagaaattcccagaataattttcacccatgattagaaataggttggatcattctttctgtacccattctgaaggccaggataataggttgaagttctttatattttggaaaatggattttgtggtaaggtaggaactaacgggtgtgtgcatataaaggttaatgctgttgtatttggatgctgatctgtgctgttttcatgacctctctcccacactatttgaatcagtctgttcagaactgtgtgtttcacctgcagtgctctgtcccagtcccatgcccattcccatcacttcactgtgatggaaatagagtttatgttcaacagtggggcatgacctctgcaatttgcttgggaaagtcttccaagcaagatggacatgatgaatacaaataagatctactcaaagtacttcaaacaaaaaataaataattcattggctcatgtatcttggccacccagggaaggtctgacattgttagttagatccagagtttcaaatgtcatcaccatggatgtgtctttttctctctctcatttcccctccccatatcttgtcttttatttattataggtttgtctcattccctggcaggctctctccctgtgataggaaagagagtccccagcagccccagggtgacatagttgttatagttcattatggaatagaagagagaagagcattctcaataacccggcaaagttcccagggatgactctgatatgtctatgtctcaggtcacatttccatctatgaaccaatcatattcagaggtggaatgctaattggccaggcctgggtcatatatacaagtctagggaagaaatgagcttcatccctgtccaattgacatggactgattaggggtattaatggaagaggtgtgccaccacaaaagaatgtaccctgggcagatcaaagaacatattctgtatgtcaggcttggccacaaaagaatgacacaagtaatatgctgtagatcagaacctctctgctaatattgcctttttagcatggttaagatagctaagatctagtactgtcactccagtatgtcccaattctacctacgtttattgaagggtcaacagttctgatctcagcattgggtaaagggtgggacattcagatttacggtccttgataaaaacaatttacaacgttccgttgtgtaataaatgtaagtgtacatatgcctgggacatcagctggaaaagggacagactatcagagagttgcactgttgcggtatgggccaaatccaacataatacccgctgtacctctagagaactaaaaccttaatttctcagatcttttctgcactaatggtctttacatacagcctacattttaactaactcttgcatgggcttgtttcacagcaggaaactatattcatcatatccttattatgatagagaatgacaacattcaaaagggtgtggtgcttctgaaaatatacacaataaatggcatgatttgacctctgtcaaattcttctttcctgctttcctcatatgtgggcttgagtgggtgtatttagctcctttaaaggaaactctttcacaggcagggccacactcttactcgttttgatctcatgaggttacatctgccagtggcgttcagggccagttagataaagttcatcttgtttggattggagagactttttttttttttttttttgagacagggtcttgctctgtaacctaggctcaagtgcagtgcagtggtgcagtcatggctcaccgcagccttggtctcctgggctcaagtgatctttctacttcagcctcctcaatagctgggactacaggcacacaccaccacccccaggtaattaaaaaatttttttttgtagagacagggtctcactatgttgcccagtctgggagaccacattctttaacatgaatattttgtaaatagtccaagaagatctagaggaaagctgaattccttcatctgatttttgccactgggctgcctcccattgtctggctaagtcttcatgggaggcctttaagaaaagctgtgacaaatacctttgtttcccactgcctaggttacataagtagttggcttttccagcctagactcttatattgttgcttgtaagagggcccttctttgcagatttcttttttttttcatctatgctttcaaataggcagatgctagcctgagatcatctctttattgaggtagtttgcccaaaaacagcaaggaacagccaatacctgccaactttctaggtttttccaaccaattctcttacagaaaatctataaatatcttagaggtatgtttcttagtttcccaacatataatgggaaaattcatcatttatattattacttttaactgaagtatgttgttatcagagaacttggtctgtgtcatattaatcctttgccatttgagaagcatacagttttaaagtttatatctccaaaaggatattttgtaaaaatttaacccctttgactcttagtcttctcatttgtgaaaggtaaataataaagaatttctgttcctagtaag

SEQ ID NO: 6737 - DNA, 1854 bp, Homo sapiens
caggaaacccaagcctaagaaacaattaagtggttctcatctctaattaactgtgaaaccatttaatccaaacatgtaagcacacactcacttattaagtcacatacttttctaggtgctggggattgagaacgaatcgatgtaagattcctcctttagggcagagacagaccactgacaaatacacagatagacaaggaatttcccatggtaaaaagggatatcagtaattagaggaccgtgagactcagagatgtgtgtgtgtgtgtgtgtgtgtgtgtgtgtgtgtgcgcgcgcgcacgtgcacatgtgtgtaggtagatggagggggtgattattttgggtggtcagggaagtgctcagtgagggaagaacttgtcatgagaatctctgagcgtgccaggcagactcggatatttttataaatttttaacatggccacttgcagaagagcttgaatgggacgtgcagcgagaatgtgaaggatggagcaggtagctcatctggccttgtaggtgccgggaacgggcaagacatgttttgaaatgtaagatcacagactgttttttgcaagaccacattatattactttattattttctgctttttcttttaacgacattagtgtttttgatcactatattttaaaatgctttttgtgagccttttggttatgtggaatctgttccttagctctgattttttattcttatggagcgtcttaggttactacatgaaggtaagactgccacagtcccccagggaggcacactgtgttttactgattgatttgaagatgatagagagcctagggggatgagtctattggactcaaaggttacattttgtttttccatttaatttaataatcaacaaaacgacaaagtcagtttaatatctttcttctgctgagtcttcaggatgttagctagtctttcaaaagccattgctacaaaagtgcaaatttctcatttcctgtgggtctctagaaactctctcaatatttaaagccaaacaaatccatcttttctgagagacagaaactaaaaaattcagagttaattcactattaaaaacagcaaggccctgctatttcccaagaataaagaaatttaaaattctcattgtaagaagtatgaacttgaagctagaattggtttatttctggcagctacttacaatattaagaactttactttttaaatttgagacaatttcacaggaaagcaagaaattagtctattgtgaaatgtttttacaactaacttggaatatactgcaaatcactagtaagtagagacacatttaagataaaatgattaataaaacaattggtaattctgaataaggatctgaataaatccagatcacagactgttcctttaccaatatgtaaaagaatgtgcaaaattagtaaaaatatacccaaaaatttaccagcaacagagaagcaaagaatggagttcaaccttacactataaacatctaatagatatgtatgaaaatttaaaaactagaaaaggttgggcatggtggctcatgcttgtgatcccaggactttaggaggccaaggtgggaggattgtttgagcccaggagttcaagaccagcttgagcaatatagtgagaccctgtctctacaaaaacaaacaaacaaacaaacaaataaataaataaataaaattagctgggaatggtgatgcacacctggagtcctagctactcagaaggctgaggcaggacgatcacttgacctcagaagtctgaggttacagtgagctatgatcataccagtgcactccagtctgggtgacagaacaagaccctgtctccaaaaattaaataaataaaacaa

SEQ ID NO: 6738 - DNA, 2715 bp, Homo sapiens
caagactggtccagtacccttcaaccatgctgtgatcggtgcaagtcaagaactcttaactggaagaaattgtattgctgcgtagaatctgaacacactgaggccacctagcaaggtagtaactagtctaacctgtgctaacattagggcacaacctgttggatagttttagcttcctgtgaacatttgtaaccactgcttcagtcacctcccacctcttgccacctgctgctgctatctgtccttacttgtgggcttctccatgctgtgccaatggctggctttttctacaccctcttttgagtgtagtttggtattttgtaattgagagctcatttcaaaagcagaaaaagacaacaaatattaaagcaaggaaaagtgtaactgaaacactgcactttactgttttatacttttgtacatatgagaaatcaagggattagtgcaaccagtagaaagcattgaaatgactgtcattaaccacacagtcctggaggcagagatgcagttacctaccctagcttttgatgggttctcttacctgtagtagccttatccctggtcatttggattttcagtttgcttttttctttttttcccctccaaactccttttccttggccaagccttcatgcttccccctttccatattataatctcatttgattgctctgcagttgggaacggtgatcttcttgaatgatgtttcagtgtgcaaaaactatagagcctgtcagcaccaaagctgacagaagttataccttactcctttcctttcccctgaacaaacctgctaatcccactaattcaggaatttgagtagagatggggaacaagaacccagatgctgtcccctcaccccctctcctgtatttctcaggtccagttcaaatctaaaattctacttttagagttgaaacagagtaataacttatctaaccctcttttcctacaaaggagaaagataaaaggcacaaaggttaccgccaaggcccgtcagctgtgtagtggcaaagccgagaccgagtctcctaagtccccgtcagtgtggttttcaccacaggactgtctcttgtcgttttcccctaatgccttctcctgccttttctgtgcctagtttttggctcttcacatattccatattgattttgacgctctgtatattggcatcaggtggcagctgaatatcttttgaattactcgaaggtaaagccagatgccagaatgaaggtgtagccagtgtttcccatatgcccctggagccccacttattgaggccagcagaataggtgcagagatgaagtgagcttagagatgttgcaaatgctctttatcccttcagctctctgatctgctctttcttcatgatacttagtctgcagggcatattaagatcatcccagaggttcaggcagttcctgtcatctctgaaaagactgggggatatgaaatcttccccctaccccacttaatgcgttggatatgatttttcaaagaatgcttcatgcccaaaataccagcctgtttagcagtgttacactgtttgatctgcgggcacttgttgcattgcctggcacccaatattcagggtccatgactaagactggtcttctcagatgccctgcttaaatcaggggcacttcaggctccacaggcgtcatgttggactgagacctaactcactggactcagaggaggaatcgtggaaaacaagagcaaaactaccccacacccctatttcatgtctgaaataaccctgtttcataccagttgcaaagcttgtggggagcggtcccacaaagcactttcttaaaccttgagaatctccaagagaaaaatatttggggaaggagggaggaaatatgtcccttgcacaccacccctgaagcacatggcagtaggaaacagcataggattgtatgtgggaggtggataggtcggtgatgtgtggagcggaaaagcaggttggtaaagttcccttcttgggacttattcctggagtcagtggatacaagtagtgcagaaggttcacactgcaaatagtgttctcatctcaaagcaaactatcattccagaaggaaaagtgtgtcagggcaagcagacaacacaatttcctatcagaatatgtccctcaacccccgaaacaaggcttctctcagcctccccaccagtgatggataacagctcctattctcagctgacctgactgagccaacccatgaactcttcactccttggggaagccacctcccatcacacccctgagcagagttagggaggaattctacttcccataaaaggacctctcctgagaggcaaaacctgttgcctccaccacggcttccctcttggctcattccaagcttggccaaattggggaagtgggatggaggttgccctgcatcccccctcctctgcctgagtgtgtctttgtaatgtcagctggcatcatacaaagagcaggagaagcaaacacccagaactcttttgctggtcagagattccctgagtgtctgtcctcacccaagcctgctctgtgtctgtgttgtgaagcttgagactctggaaagaaatggggagggggggcaggggaaatgttgccctaagaatgcttctcattcctctgttcttattgggtcctgtttttcgggagggtgggggttgggggaagcttgaccttgtgtcttcgtcaataaactcacatttacacaaaat

SEQ ID NO: 6739 - DNA, 2215 bp, Homo sapiens
cgcctgcgcgcccctcgggctgcaccggcactggccgagcggagggcggggccgtactgcggggctggggcggggagcgggcgggaaatggaactgtgacggtcccggcctgaggcccctgcagccacgcacctcccggtgagaagcagagcgcgagagggagccctccgtaactgcccagccctgccccttgcccccgtggcttcctgggacagccgccttcagtgctgtatttagtgcagtgcccggcccgacccgcgggggtgccacagccttttgggatgggggtgagcgtgcaatggaggctgggggtggcgaggtgccgccttggccgggcccccacgtgtcttctccagaatgtgtctgtctttgcctggtgtcttcctttcccgtgtccgcccaccccagcgtctgttggtacttacctgtctcacctaccctccagtcccctcccagctccgctcacagggctctcatttcgtccatccccttgtcgcagatcctggcagcttctttgtgaggccaggccttctgactgtcagcaccaccggcacagggcagagatgcgggtggcccaaggaccacgatcaaggggtccgggggaccgaggtcccagatcagtgaggggagaaggttgagctctccggcttccagggagacctccccgcccagcagcccccagagacacaacaacctaccttccagccttaactcgatggtccgtccctgccaggtgcccctcactcttcctgaccccaaagccagatcaccccctgggttaaaactttttttcttttttttttttggacagagtgtggaaagggagccccccaaaggatagcttctttttcatgatgccaggctccagtcctttattcccttctgcatactgcaatctgatctgtcagactggggaatgttgggttctggggtctggtcgtgggcaggatggtgcccagaagggggttaggttgtcccagtgaaaattctgttgccccgtctcaaccccatctgactaccccagactctgcctgcctcagatctcagactatcctgattaatctggggaagaacagagccagggaaagaatggtggggacccctgtacttgggggagacacacctgcatcttcctcctgccacagatggaggccctcaggatctgacaccctcttgtcccaacaccagtcagccctataccctaactcactccaccccattttctccggctgcctggccgggtttctacctctcgtcaccggagctgatcactgtcagttttgtaccgatttagaaataacaataataatgaagattctaggaatggcatgagggattgatgggggacttggagggagggacaagtggtgccctgtcccctgctcccctggccaaagaaagctgtccttgaggctgagccctcagccctggcctggtggggggacagcaaggtcccttgttataagaggggcagagaggacaactccgctttggccaacctagccaaggctgcagcatatagaccaggaaatcaggtagcccagactggtgatggagcagagtctgggggaagggtcgtgggtggggaatttatcaccaacatccattgtagggggaatctatgattctgcttccccagcggattcccactctgtccaccaagtggggggtagcacagcctcacagcaaccgccctgaccttgggcagtctagtgttcctgcattctagtccctgctgtgctgcaggactttgggcaagtgacctgccctctgtgagcctccctctgacacagaggaggtggctccccttccccacaccttagagtggctgggagggtaacaaagagggcctgcccctttagtctcctgcacccctgccccctggttcaccagagggagcggatgaaggatggcagcatctcacatgccccatcaccaactctgaggcacctggggtgggggggcggagcccaggcctctggctgctcccctgtgggagccattggaatgtatcccctgacaggcccccttccgcctccacctcaacccaggtcttggatttcaggtccctccacccccattctgagtctctgtccttctccttccacccgctcccagggtttcccaccacagggtctggaagtgtgtgtgacgcccattgagctgttacccgaagtcagattaaaaatcagggagtgttttccctcgtttctgt

SEQ ID NO: 6740 - DNA, 460 bp, Homo sapiens
gcgcccccgctcccagcctttgtgccctccatcatttcctggccccagaccccctaccgaccttctctcttggagcgcggagccctcttcgacgcattccgcaggaccgccccttctcagctgctgcccagagcgcccccatccgtcaagaaggcccactgttggtgcttggttcccatctgtcacctagcgcccccagtgcagagcccagcataacctagagcccgctgtcaacagcgcccaccgagggctccccgcccccacgcagcaccagcgccaccgcacacctgactctgtccgctcacacagcctcaccttcacctcttgggtatttcagatccgctctggcccagtgggcagaggcatcgcctagagaaaataacctcagggttccctcatccctctgacaaacctgcctctttccctgaaaccattcaataaaacctctgatcaaagtgtc

SEQ ID NO: 6741 - DNA, 288 bp, Homo sapiens
tgactgttttgaatgttcctttgtctctgacatgatccatagtgaaattgccagagttttgcctgctgctttcctcgtggcctcttcttgggtagtgaaattaagtgacatttggatttttatttgggtgggagggctgggacagtttttcttctagaaatgtctgttgagatttccccctttagtttccaaccttctccccaacccttggagctaaatgcgttgtaaaatattgccaaaatgaaaagtgttttgtaatactgcaataaaggctgcttgtttttgtgg

SEQ ID NO: 6742 - DNA, 439 bp, Homo sapiens
ggggcctggaagctgcgagggcccagtgaacttggtgggcccaggagggaacaggagcctgagccagggcaatggccctgccaccctggaggccacctcttctaagagtcccatctgctatgcccagccacattaactaactttaatcttagtttatgcatcatatttcattttgaaattgatttctattgttgagctgcattatgaaattagtattttctctgacatctcatgacattgtctttatcatcctttcccctttcccttcaactcttcgtacattcaatgcatggatcaatcagtgtgattagctttctcagcagacattgtgccatatgtatcaaatgacaaatctttattgaatggttttgctcagcaccaccttttaatatattggcagtacttattatataaaaggtaaaccagcattctcactgtg

SEQ ID NO: 6743 - DNA, 309 bp, Homo sapiens
gctgctcagagacaggaagtcttcagggaaggtcacctgagcccggatgcttctccatgagacacatctcctccatactcaggactcctctccgcagttcctgtcccttctcttaatttaatcttttttatgtgccgtgttattgtattaggtgtcatttccattatttatattagtttagccaaaggataagtgtcccctatggggatggtccactgtcactgtttctctgctgttgcaaatacatggataacacatttgattctgtgtgttttcataataaaactttaaaataaaatgcagacagtt

SEQ ID NO: 6744 - DNA, 301 bp, Homo sapiens
gctgctcagagacaggaagtcttcagggaaggtcacctgagcctggatgcttctccatgagccgcatctcctccatactcaggactcctctccgcagttcctgtctcttctcttaatgtaatctcttttatgtgctgtattattgtattaggtgttatttccattatttatattagtttagccaaaggataagtgtcccctatggggatggtccactctcactctttctctgctgttgcaaatacatggataacaccgttaattccatgtgttttcataataaaactttaaaataaaatgc

SEQ ID NO: 6745 - DNA, 301 bp, Homo sapiens; identical to SEQ ID NO: 6744

SEQ ID NO: 6746 - DNA, 414 bp, Homo sapiens
gatggattattgtgctgcttgctcaagcgtgtgcttgactcctggaacctgcctgctccctctcccagaccagctagtttggggctggggagctcaggcaaaagaggtttccaggatgcagattaggtcatgcaggcctttaccggcattgatgtggctcatgtttcaggcagacttggggtccttaaggtggcaagtcctttatggagagaaaacttgacattcagatgattgtttttaaatgttttacttttggtacagttgatagacatcataaacgatatcaagcttacacttcatatggagttaaacttggtcagtgttaataaaatcaaaacgtgattctactgtacattgcattattcataatttaattgtttgaaattacattaaataaatcaactaattaaatac

SEQ ID NO: 6747 - DNA, 685 bp, Homo sapiens
tcagcaggagtaggatatataagtatttgggcaatatttaatgaggaatattaattgtaaagaaattgtgcttttggcaacagtgttaaccatattttattataaaatagtttcagtcatctaaacagcagtgatgcttaattatttttttttttgagacagagtcttgctctgttacccaggctggagtgtagtggtgccatctcagctcactgcaacctccacctcccgggttcaagcaattctcctgcctcagcctcctgagtagctggcactgtaggcatgtaccaccatgcccagctaatttttatatttttagtagagatggggttttgccatattggccaggctggtctcaaactcctgaactcaagtgataacacccaccttggcctcccaaagtgctgggattacaggtgtgagccaccacactgggccaatgcttaatattttaatgtatctcaacaataaaaccaagaagaaacaaagccttttgacttgttagaatgtattaagtagtattttaaagaaactttatagttgtgacattgaaagactgttggggtggggggaggaaaatttttactttccatcttaatgtaaccttatgctattctgtatttttactgtatattgcttttacaataaatataaaatgaaatgtttatgttgacatttcagtgtg

SEQ ID NO: 6748 - DNA, 433 bp, Homo sapiens
ataaataaaatagctctgtctttcaatgaaacactcacgatgactactgcgccttctctttcgaaaaactcttaatttagtgacttatggcaaaattttatcttaaatcaatgtgattctttcttgttttgggagacggtggaggtatcctcattagttctttcttcaggcttgtgtctttagttgcgtggctgcgcaggcctgccatatgatttaagccatctcttttcattaaatgtttctcttcctgtgagacttactaaagcaacttagtggcaaaaagtaatgttgtacttataattctgtacagaaatgacaatgagctgaatatatggttttacaaagtagacatccacttgcaaaatgtttggatgtaatgttaaagcgcaatgtgcaaaatttaaaataaagaatatttattaatacgcacagt

SEQ ID NO: 6749 - DNA, 599 bp, Homo sapiens
tgactgtgggagctcctccttccctccccacccttcatggcttgcctcctgcctctggattttaggtgttgatttctggatcacgggataccacttcctgtccacaccccgaccaggggctagaaaatttgtttgagatttttatatcatcttgtcaaattgcttcagttgtaaatgtgaaaaatgggctggggaaaggaggtggtgtccctaattgttttacttgttaacttgttcttgtgcccctgggcacttggcctttgtctgctctcagtgtcttccctttgacatgggaaaggagttgtggccaaaatccccatcttcttgcacctcaacgtctgtggctcagggctggggtggcagagggaggccttcaccttatatctgtgttgttatccagggctccagacttcctcctctgcctgccccactgcaccctctcccccttatctatctccttctcggctccccagcccagtcttggcttcttgtcccctcctggggtcatccctccactctgactctgactatggcagcagaacaccagggcctggcccagtggatttcatggtgatcattaaaaaagaaaaatcgcaacc

SEQ ID NO: 6750 - DNA, 555 bp, Homo sapiens
cgtggactgtccacagtgttcatgtgctggagtcagggacggccgcacctgcctccgccggctccagtgtgcggggagcctctgcctgagtgtgcaccaggcccatgtttattgaccacagtctgagggggggggaaggggactgcggtggacaccagaggaagctgtttcctgttgtgatgttggacctgtagtaggacatggtgatttgttaatttccatgggaagccatgatggcctagcatggagggaatctgttcccaggccctgcctggaagttgagggaaagtttagacatctgcagagaggcaggcagcccagcccaggggacccgttcctcttgaaccagtcattgcctgtggcaaatgtgtgtatgagaatgtggggggtggagggcggggccctgatgtggagtagacagtgcgcacctcaggcccacacacggccccgccctggggccttgagcgcaggcctcatctttctgtgccgcgggactctgcacctacctcacagggttgttgtgaggctcaaataaaacatcactcagcacgtggg

SEQ ID NO: 6751 - DNA, 66 bp, Homo sapiens
cggggtctcgcacggtctgcggagttcgtggttgtacagaaatgaacctttatttaagaaaaatag

SEQ ID NO: 6752 - DNA, 206 bp, Homo sapiens
catcgcccacctccgacacccagtgggcgccttggctggtgcggctgctggtccagatggaggaaaccagtgactttatggggctgagctagtagggaagcccctggaaagatgctgcgttccgaacctgtgcctaatacacgcaagggcgctgtcccgcccaaccccgcctttaaacgccacaaataaagagcattgttaccgcc

SEQ ID NO: 6753 - DNA, 982 bp, Homo sapiens
aaagttctgctctatctcaaagactgaatgatactacacagtcctctccctattaatatgggcacattcttgccaatttcacacttgtatcttcagcagggacattacaatcaaacaccaattcctggttaatgaagggagagtgtgggcttagcagagttaccctcatgcccctatctgagccacaaccttctgtaattcacttcatacatccatctaaatggatacctttccatcccctcaaacgagaacaaaaagtattccctgcaagcactatgaatggaccttactactctctttgacagaagactcaaacacagcctctaagaaacaaggcagctgttagtgtgacatagcttccagctcctctgttatcttcacagctgacttcacactcactggccctcaatagcttagagtgggactcctgatctccctggttgacgtttataaggttttgtaatttagcttctggtactacatgtatctatccacacactgctgaagggaacttgaccctacgcattccaaaagccttcctcataagttatccccaaggggttcagggactacagaccattagtacccaagtgaagtcttctgacgatccagaattcctaaggtggctctgatattatatcatactttaatagagagttgcataccttttggacaaagattccagagcaaaataattatgataatgctgtttctcacaggagaatagctatgagtcaaatctaacctgcttaaataagagtttggtgagaaagtgaaaccacctgatcttgaatcaatgttgaggtgaaaaaggaaatgtcaggagggataagacagggtgaggccctgcttcttttcctaagagtctgaaaccattccatttcattttggtgaaatgtgtctgtttctaagaaattctgttttcttagttctctggttaaaaaaaaaaatacataaactgtatccttctttctttcacttc

SEQ ID NO: 6754 - DNA, 137 bp, Homo sapiens
ggctccaagagcttgggatcagaagtcagaagtttggaatgtggtgggtcaaaggacaatatgggtgggcattctggagagttgtttttcagctgaattctcatggtgaaaacaggggaaaggacaaaggaaacctt

SEQ ID NO: 6755 - DNA, 17 bp, Homo sapiens
ataaatggatatttctc

SEQ ID NO: 6756 - DNA, 617 bp, Homo sapiens
tgccactgaagcctgcgtcagcagcccgagcggggccggcatctgctccccgccgtctgctccctctccactctcttctcaaatggctgacttctggttctccctcaagtgttttttacactgggtgttcaaatttattttaagagatagggagggaggggacataaagggaatgcatacattgctagtcacatttttaaaattaacattttggaatagtgtttatggaaatctttagcttttaatcatttttaccaatttgaacagtttaataaactggttctgctctcttctgaatctcatgcctttggcaccttggtaggtgcaggaggagctcagtgcaaaaatcactttggggcctcattaaccctttagagacaagctttgccccaggctgcggaccagacagatgcttagggaaggttgataaccagcttcagtctctactggattagccctactctttcctttcccctccattatttagtgactctgtaagtaagttaaatacacccttattatttagctgttaagtaactataatgaaatctgctgcaaaatctctcttggaatccatgtgcccaggattatattagcattatttttaataaatctat

SEQ ID NO: 6757 - DNA, 314 bp, Homo sapiens
aagcatctgggccagggctcatggctggataatttccctaggcttaacaacccaagcaagcttcgcatcctcgttttatttttggttaaacttatgaaaatgtattaagaaagagtgcagctcgagagagattcagagatggaacacaccagaccccagatcacaaagccaaccatgcccggcccctcccagcacccccagccccacgaccatcgttctgaattctgacgacaccgtgagcctgcctttgtacttcaaactcatggaaggataaccaccttcatgttttgaaataaatgtttcctgttgaaatg

SEQ ID NO: 6758 - DNA, 622 bp, Homo sapiens
tgacaaaaatgacttctagggtgaagcctgggtgatgaggctgctggaagctttgaagtctcccattcccctcatgctataaaaagaactacctttgttctctcccatcctgctcaggtcttttcagcagtctcatcatcagcaaccatgactgatgactgggccctagcaggtggcaggtataacatggccatggacactcttcttttttaaattttatgtctagcttctgagtctagatgaaagacagtatgtttcagagaacattggatatcagtttttcccacagcagggactgtgagagacaaccagcagcatcctctttgtaatcacagggcagggatcagagtttgaaatgaaatgttgtcagggtgttggaaaaattttggtgagttctgcacatttcccctggttcaggctgggcatggaccagccttcagatggcagaagtggaagatgagcctacttgtgagcgatgtgactttaaggaaatgaagactggggaagaataattagtgtttataagacatttaagaggccctttttcatatactgactcactgatgaatcagcatttgcattttatggaaaaatataaatccaaagaaataatttatccctt

SEQ ID NO: 6759 - DNA, 252 bp, Homo sapiens
gcatttggttgccaagctccagctttgaagaaccaaattaagctaccatgaaaagaagaggaaaagtgagggaacaggaaggttgggattctctgtgcagagactttggttccccacgcagccctggggcttggaagaagcacatgaccgtactctgcgtggggctccacctcacacccacccctgggcatcttaggactggaggggctccttggaaaactggaagaagtctcaacactgtttctttttcag

SEQ ID NO: 6760 - DNA, 4205 bp, Homo sapiens
atccacccttacccctcctgacccccccaagtggagggaacagatcctggcctgaggggtcctagcctggagcaggcgcctgcgcccagaccctggagagccttgacccagagcctgtgctgaggtccagggagtgtggagagctcctggtgtcgaggactgagactgagaggggagccccctccatctggcccccttccctttccgcactgtccgctttgtgaggctcagaggaaggacagtctgcaagcccgcctaggaggtccatccccagcaaatgttttggaggtccccccagagagcagagtgggccatggcagaagtagggggttggttggacctgtcacatgaaatggatcagcacttgaatggggagaagtggagggagaggccctgggcctgtccctgcggggaaatcttttatggaagaagggctggacccactttacctgcagtttcttcccagctcgggcagatggcagaagggaccccttggactttttctcgccatccctccccccagcgcaggggcacaagctgagcttgtaaaagcccacagatgttgggggctggagaaggggcaggagagcatcacactcagccccagcctcctcaacctcttggggccccgtgatggggaggagagggcaggtgcggggaggctctggccttccttggtgccccgccctttgtttgcactattggacttaggagtgccgagggtggggagatggagctgcccgtctcagtgtgtgagtgtgtgtgtgcgtgcatgtgtgtgtgtgtgtgtgtgtgtgtgtgtgtctgtctgcctgtctctctcctcctggacccagggcagccaagggcagggataggcgcagtggtcagatgaagcagcgccagagaggggacctcccagctcttatttgcaccctccccacctcaccaactttggtccctctctgggggcatgaatggttaacaaacaccagagcagtactccaatattggagagtcgctgggggcacagggctttgaatcagggtagtatcctgccttccctcccctgaccccacatggtctcagggcccccttagggccccctaccccactgatagcttcctccttctctggcacaaggggagccccagggcttgggggagggcgtaaggtggggggaaatgccactgcttttagcaaaagcctccctcccagaattagccagcttgcctcctgcaccccacccccaccaaccaggggagccactaagctgactaacaactgtcccctcacccaccagctatttccccagggtagagtgggcaattctcaccttcaaagagtccccgcctgcccaggcctttggcacagaggctgagtggacagtcaggagagaggcgagaggcaaggcgaagcctgtgtccctgtttcagttgcactggggttggagcccagggtaggggtttccagcttccccaggctccggccttgtcagtctctttgcatgtgtggatttttctgtgtgtgtttctgtttgggtttttgttgttgggttttttttttttttttaataaagaaaagaagatgtgtatatttttggcaacgacagaaacgtagtgcagatatatttttgcctgtgctgctcaactgttttttttttctgatactgaaaataatattaatattcctgttgataagactttgtaagatgttagggagctgataatggaggggggtgggaatccttcaaaggcaatttcttaggcacttgcaagggcttgggggagggggaggcagttgtgatgacctcagaaatactcactttttattaatgctaaatatgttagaaagaaatgatagcattcagcattttattcttcttaatctattaagctgtgtaactccctgccccaaaccactgaaaagaaaagtaaccttcaggccaggcgcggtggctcacgcctgtaatcccaacactttgggaggctgaggcgggcggatcacttaaggtcaggagttcaagaccagcctggccaacatggtgaaaccccgtctctatcaaaaattagccgggcatggtggcacgtgcctgtaatcccagctacttgggaggctgaggcacgagaattgcttgaacccaggaggctgaggctgcagtgagccaagattgtgccactgcactccagcctgtgtgagagagtgagactctgtctcaaaagagaaaaaaaaagaaaagtaaccttcagagattcttagaagagttgctcattcacacccacgcccttgcccaaggctggcccacttagagcgaaacttaacttttgtctggatgggaagagaagtaagtctaccccgaggttgccatgttgaagagtgagaggtccaagtgattctgtgcattgaaaccaagacaccccacccagaacacttcttccctccctcagcccaaaccaaaggctggggttctcatctccaagtggctgttctccaactttcccaagccgcttgcattccccagactggactactgtggcggttaggttagatttgaagacggggcccaggctgggtatgaacgggtgcagccctcttctcctcttcccccccacatctctcatgagagaggtagtggcatttccttctcagggagcttcaatgggaaaggtctcgaaagcttcaggaggagcagaataccaacgcagggggatggctgtaacgatctcaccgtctcctaacctcagtcccttttttgagagtgaatggtggagggtgggaagggacccagatttgtagatctctttgtctgggggaggggaaggatgtggtttgcagagcggaagcagagtttggaaacgcatgagagcagagcttcgtgtgttcccaccctcagtgaggaggtgtgagtgggtgagcatgtggagttgggtgttcccaccctcagtgaggaggtgtgagtgggggtgcatatagaggcagtgcctgctgtggggtcacaactggtgcatgccagcgccaaagggacctgtctttaggggtcatttcagccagctcctcccatcacagatgacagctccaagcctagaaggggctcagtgacagggccaggacaagccctcaggactgtggcctcctggcccttggttcccctgccccacaacatggtctccacatggctggctggctggctgtccctgtgtgtgtgtgacacacggtgtgagtgcagggctgtgcccggggtgggagggtgtctatgtggcactgactgtcttagctcagagctggtggatcctctccatggacaatgacactttaaggattgtcttggtttgtttttcctatttgtggggtattttccccctcaggctcctgggtctgctgctgcctcaaggtgtcctgaccttgaggctgatgaggggacccctgcctgtttcccccatactgagttctagggaggtgctcaccccagactcttaggaagggtctagagaaatgagaggagcccaagccaggggccagctccgagaaagggtaacctccacgcttctctctcccaaattggaaatgaagacaggttttcaaaggcacaggctccccctgccagcttctaggatcttccttggtgtgcaatgggccagttaggggtaggcagcttgcacccagttctcctttatctcaacttattttcctggggagaggtgcctagagggattgaggtaacttcaactgggaattccaaggaaggtgggcaagtagccttggctctctcccaccatgtccatcaggattgagagtgtgtctagctcccgaccactttgtcttgacctactgaaaagttgggaactgaggggtgccttcattcccctttgttcactttctccagctcaacttgggacttgggtggtgggactggagacctcacccctgctcccgtcccgccccctttctatcccaacctgtttccatgtagcagacccttcctagggagcagggaggggaagccacagattgcaaacccaggggctcctttttcattctttctaaaaccttgatatcctcagcccaaaggcgatgcccccctgccacctccaagcctggaattgtgcataacccggatcttgtatctttgtataacggatgttatttgtacgaagggcagttcgtaaacagcacttgttcttttaataaaagaatgttttgcaaaaaaaaaaaaaaaaatccgaaga

SEQ ID NO: 6761 - DNA, 57 bp, Homo sapiens
ccctgttcccagagcccacttttttttctttttttgaaataaaatagcctgtctttc

SEQ ID NO: 6762 - DNA, 2983 bp, Homo sapiens
acccgcagcgcccccatctgtcttcagcacattccacggcatcgcatccgtcctgggcgtgacccgtccattcttcagtgtctctgttttttaaaacctgcgacagcttgtgattcctacccctcttccagcttcttttgccaactgaagccttcttctgccacttctgcgggctccctcctctggcaggcttcccccttgatcgacttcttggttttctctctggatggaacgggcatgggcctctctgggggaggcagggctggaatgggagacctgttggcctgtgggcctcacctgcccctctgttctctcccctcacatcctcctgcccagctcctcacatacccacacattccagggctggggtgagcctgactgccaggaccccaggtcaggggctccctacattccccagagtgggatccacttcttggttcctgggatggcgatggggactctgccgctgtgtagggaccagtgggatgggctctacctctctttctcaaagagggggctctgcccacctggggtctctctccctacctccctcctcaggggcaacaacaggagaatggggttcctgctgtggggcgaattcatcccctccccgcgcgttccttcgcacactgtgattttgccctcctgcccacgcagacctgcagcgggcaaagagctcccgaggaagcacagcttgggtcaggttcttgcctttcttaattttagggacagctaccggaaggaggggaacaaggagttctcttccgcagcccctttccccacgcccacccccagtctccagggacccttgcctgcctcctaggctggaagccatggtcccgaagtgtagggcaagggtgcctcaggaccttttggtcttcagcctccctcagcccccaggatctgggttaggtggccgctcctccctgctcctcatgggaagatgtctcagagccttccatgacctcccctccccagcccaatgccaagtggacttggagctgcacaaagtcagcagggaccactaaatctccaagacctggtgtgcggaggcaggagcatgtatgtctgcaggtgtctgacacgcaagtgtgtgagtgtgagtgtgagagatggggcgggggtgtgtctgtaggtgtctctgggcctgtgtgtgggtggggttatgtgagggtatgaagagctgtcttcccctgagagtttcctcagaacccacagtgagaggggagggctcctggggcagagaagttccttaggttttctttggaatgaaattcctccttccccccatctctgagtggaggaagcccaccaatctgccctttgcagtgtgcagggtggaaggtaagaggttggtgtggagttggggctgccatagggtctgcagcctgctggggctaagcggtggaggaaggctctgtcactccaggcatatgtttccccatctctgtctggggctacagaatagggtggcagaagtgtcaccctgtgggtgtctccctcgggggctcttcccctagacctccccctcacttacataaagctcccttgaagcaagaaagagggtcccagggctgcaaaactggaagcacagcctcggggatggggagggaaagacggtgctatatccagttcctgctctctgctcatgggtggctgtgacaaccctggcctcacttgattcatctctggttttcttgccaccctctgggagtccccatcccattttcatcctgagcccaaccaggccctgccattggcctcttgtcccttggcacacttgtacccacaggtgaggggcaggacctgaaggtattggcctgttcaacaatcagtcatcatgggtgtttttgtcaactgcttgttaattgatttggggatgtttgccccgaatgagaggttgaggaaaagactgtgggtggggaggccctgcctgacccatcccttttcctttctggccccagcctaggtggaggcaagtggaatatcttatattgggcgatttgggggctcggggaggcagagaatctcttgggagtcttgggtggcgctggtgcattctgtttcctcttgatctcaaagcacaatgtggatttggggaccaaaggtcagggacacatccccttagaggacctgagtttgggagagtggtgagtggaagggaggagcagcaagaagcagcctgttttcactcagcttaattctccttcccagataaggcaagccagtcatggaatcttgctgcaggccctccctctactcttcctgtcctaaaaataggggccgttttcttacacacccccagagagaggagggactgtcacactggtgctgagtgaccgggggctgctgggcgtctgttctttaccaaaaccatccatccctagaagagcacagagccctgaggggctgggctgggctgggctgagcccctggtcttctctacagttcacagaggtctttcagctcatttaatcccaggaaagaggcatcaaagctagaatgtgaatataacttttgtggaccaatactaagaataacaagaagcccagtggtgaggaaagtgcgttctcccagcactgcctcctgttttctccctctcatgtccctccagggaaaatgactttattgcttaatttctgcctttcccccctcacacatgcacttttgggcctttttttatagctggaaaaaacaaaataccaccctacaaacctgtatttaaaaagaaacagaaatgaccacgtgaaatttgcctctgtccaaacatttcatccgtgtgtatgtgtatgtgtgtgagtgtgtgaagccgccagttcatctttttatatggggttgttgtctcattttggtctgttttggtcccctccctcgtgggcttgtgctcgggatcaaacctttctggcctgttatgattctgaacatttgacttgaaccacaagtgaatctttctcctggtgactcaaataaaagtataattttt

SEQ ID NO: 6763 - DNA, 79 bp, Homo sapiens
aacctcccactttgtctgtacatactggcctctgtgattacatagatcagccattaaaataaaacaagccttaatctgc

SEQ ID NO: 6764 - DNA, 949 bp, Homo sapiens
cccagagacttcagtgtcctgaaagattcctttcctatccatccttccatccagttctctgaatctttaatgaaatcatttgccagagcgaggtaatcatctgcatttggctactgcaaagctgtccgttgtattccttgctcacttgctactagcaggcgacttacgaaataatgatgttggcaccagttccccctggatgggctatagccagaacatttacttcaactctaccttagtagatacaagtagagaatatggagaggatcattacattgaaaagtaaatgttttattagttcattgcctgcacttactgatcggaagagagaaagaacagtttcagtattgagatggctcaggagaggctctttgatttttaaagttttggggtgggggattgtgtgtggtttctttcttttgaattttaatttaggtgttttgggtttttttcctttaaagagaatagtgttcacaaaatttgagctgctctttggcttttgctataagggaaacagagtggcctggctgatttgaataaatgtttctttcctctccaccatctcacattttgcttttaagtgaacactttttccccattgagcatcttgaacatactttttttccaaataaattactcatccttaaagtttactccactttgacaaaagatacgcccttctccctgcacataaagcaggttgtagaacgtggcattcttgggcaagtaggtagactttacccagtctctttccttttttgctgatgtgtgctctctctctctctttctctctctctctctctctctctctctctctctctctctctgtctcgcttgctcgctctcgctgtttctctctctttgaggcatttgtttggaaaaaatcgttgagatgcccaagaacctgggataattctttactttttttgaaataaaggaaaggaaattc

SEQ ID NO: 6765 - DNA, 760 bp, Homo sapiens
gcacccagcctgcatctcccaggaggaagtggaggggacatcgctgttccccagaaacccactctatcctcaccctgttttgtgctcttcccctcgcctgctagggctgcggcttctgacttctagaagactaaggctggtctgtgtttgcttgtttgcccacctttggctgatacccagagaacctgggcacttgctgcctgatgcccacccctgccagtcattcctccattcacccagcgggaggtgggatgtgagacagcccacattggaaaatccagaaaaccgggaacagggatttgcccttcacaattctactccccagatcctctcccctggacacaggagacccacagggcaggaccctaagatctggggaaaggaggtcctgagaaccttgaggtacccttagatccttttctacccactttcctatggaggattccaagtcaccacttctctcaccggcttctaccagggtccaggactaaggcgtttttctccatagcctcaacattttgggaatcttcccttaatcacccttgctcctcctgggtgcctggaagatggactggcagagacctctttgttgcgttttgtgctttgatgccaggaatgccgcctagtttatgtccccggtggggcacacagcggggggcgccaggttttccttgtcccccagctgctctgcccctttccccttcttccctgactccaggcctgaacccctcccgtgctgtaataaatctttgtaaataac

SEQ ID NO: 6766 - DNA, 561 bp, Homo sapiens
ctgtgccccctcccaccctgcgggccagggtcctgtcgccaccacttccagagccagaaagggtgccagttgggctcgcactgcccacatgggacctggccccaggctgtcaccctccaccgagccacgcagtgcctggagttgactgactgagcaggctgtggggtggagcactggactccggggccccactggctggaggaagtggggtctggcctgttgatgtttacatggcgccctgcctcctggaggaccagattgctctgccccaccttgccagggcagggtctgggctgggcacctgacttggctggggaggaccagggccctgggcagggcagggcagcctgtcacccgtgtgaagatgaaggggctcttcatctgcctgcgctctcgtcggtttttttaggattattgaaagagtctgggacccttgttggggagtgggtggcaggtgggggtgggctgctggccatgaatctctgcctctcccaggctgtccccctcctcccagggcctcctgggggacctttgtattaagccaattaaaaacatgaattt

SEQ ID NO: 6767 - DNA, 444 bp, Homo sapiens
gagggactgtgacttgggctccgctgtgcccgccctgggctgggcccttcctggctaggactgtggaggggagctgctggccatggctgctttgtagtttgcccagagttgggggctaggggaggggggagccagaggccaggatgcctgagccccctgagttcccaaagggagggtggcagagacagtgggcactaagggtggagagttgggggccagcacagctgaggaccctcagccccaggagaagggacaaaaggtactggtgagggcaagaggtgcctgggaggagtggccctgatccaggaaaatgtgaggggaatctggaacgctctaggcagaagaagctgggagggagggggaggtgaaaagggcagaggcaaggatggtggggcccccagcaccctctgttagtgccgcaataaatgctcaatcatgtgccag

SEQ ID NO: 6768 - DNA, 86 bp, Homo sapiens
gggctgtacctggtgccctgtggcccccacccacctggattccctgttctttgaagtggcacctaataaagaaataataccctgcc

SEQ ID NO: 6769 - DNA, 617 bp, Homo sapiens
accagaaggccaagtccgcagaagccctgatgtgtcctcagggagcagggaaggcctgacttctgctggcatcaagaggtgggagggccctccgaccacttccaggggaacctgccatgccaggaacctgtcctaaggaaccttccttcctgcttgagttcccagatggctggaaggggtccagcctcgttggaagaggaacagcactggggagtctttgtggattctgaggccctgcccaatgagactctagggtccagtggatgccacagcccagcttggccctttccttccagatcctgggtactgaaagccttagggaagctggcctgagaggggaagcggccctaagggagtgtctaagaacaaaagcgacccattcagagactgtccctgaaacctagtactgccccccatgaggaaggaacagcaatggtgtcagtatccaggctttgtacagagtgcttttctgtttagtttttactttttttgttttgtttttttaaagatgaaataaagacccagggggagaatgggtgttgtatggggaggcaagtgtggggggtccttctccacacccactttgtccatttgcaaatatattttggaaaacagct

SEQ ID NO: 6770 - DNA, 387 bp, Homo sapiens
ccaggccgtggactggctcatgcctcagcccgccttcaggctgcccgccgcccctccacccatccagtggactctggggcgcggccacaggggacgggatgaggagcgggagggttccgccactccagttttctcctctgcttctttgcctccctcagatagaaaacagcccccactccagtccactcctgacccctctcctcaagggaaggccttgggtggccccctctccttctcctagctctggaggtgctgctctagggcagggaattatgggagaagtgggggcagcccaggcggtttcacgccccacactttgtacagaccgagaggccagttgatctgctctgttttatactagtgacaataaagattattttttgatac

SEQ ID NO: 6771 - DNA, 1082 bp, Homo sapiens
aggtgaaagcattgttacttacttgtggaagtcggggacataagatgattttcacatcccagagcatcatagatagttccattaagtaaaatcagtaagaccaaaccactggaaaacatgcattttggaaactttaaaataaatggttaacatggcatttctaagaaggcatttaatccagtatctctagtgtacaaaggaaacttgaagttttaatggattatttttaatgaaatgttttattgtttacaaacggtatgttgctgtgtacctaagagtatagtaaggtcaagaagagtatcaaagtataataaaataaaaattgtatactctccatatatttatttgtttggaatcactcttgtgtgatataaaggcgtgtatattatctttgtattagaaccaaaaaagttatttattttggtccctatgattttattttttaagataaattaatatactgtattttttaaagtataggtttaggtttacagaataatagagcagataatatatagagttccatacacccactgcaccccataccctcattcctccttacacaatttctcctattattaagatggtgcattagtgtggcacatttgttacaaatgatgaaccaatattaatttattattaattatagcccatagttcacattaagattcattgtgttgtaaggttatgtgggttttgacaaattcataatggcatgtgtgcaccattgcagtctcatacagaatagtttcaccaccctcaaaatcctgtgcttcacttatttatccctcccgccgtgccctggcaaccactgatctttttactgtctctacagttttgccttttccaaaatgtcatgtagttggttggagttatgcagtatgtagactttttagactggcttctttcacttagcaatatgcatttaaggttcctccatgtctttttgtgacttgatagctcattttttattgctgaataatgttcattgtatggatatagcatagtatgtttatccattcgcccattaaaggaaatcttgattgcttccagttttcagtgattaaaaataaagccgctat

SEQ ID NO: 6772 - DNA, 708 bp, Homo sapiens
tttgccttttacgtctgcttcatgactccctaatgccttcccaacctcgtggtgctgtgtccttaccacctaagggcatttcagagccatcagctgaagacatctgaaatctcagctggtcacccatgataaccaacttccacctgcccaaccatatatcaccccctacccctccagctccgcaacccactaagcccatctgctgatgcttaaattttctttacttttcttttctttttttttttttttttgagatggaggctcactctgtcacccaggctggagtgcagtggcttgatcttggctcactgcaacctccgcctcccaggttcaagcaattctcctgcctcagcctctcgagcagctggaattacaggcacgtgccacgacacccagctaatttttgtatttttagtagagacggggtttcaccatgttgcccaggttggtctcgaactcctggcctcaagtgatctgcccgcctcggcctcccaaagtgctgggattacaggcgtgagccaccgtgcccggcctgtgcttaaatattctaggagtagaagcactcagacttttaaaactatgagccgtttcagcaaaactgagaaaaaaagaagattaattaatttcctatcctaatccctcctacttatacttccccaaaaaacaagctttactggaattaatggaaaatattatgtcaatcttagg

SEQ ID NO: 6773 - DNA, 378 bp, Homo sapiens
gctggggggctggggaggggtagggggaatggggacaggctctttcccccttgggggtcccctgcccagggcactgtccccattttcccacacacagctcatatgctgcattcgtgcagggggtgggggtgctgggagccagccaccctgacctcccccagggctcctccccagccggtgacttactgtacagcaggcaggagggtgggcaggcaacctccccgggcagggtcctggccagcagtgtgggagcaggaggggaaggatagttctgtgtactcctttagggagtgggggactagaactgggatgtcttggcttgtatgttttttgaagcttcgattatgatttttaaacaataaaaagttctccacagtg

SEQ ID NO: 6774 - DNA, 853 bp, Homo sapiens
gccaagccctccccatcccatgtatttatctctatttaatatttatgtctatttaagcctcatatttaaagacagggaagagcagaacggagccccaggcctctgtgtccttccctgcatttctgagtttcattctcctgcctgtagcagtgagaaaaagctcctgtcctcccatcccctggactgggaggtagataggtaaataccaagtatttattactatgactgctccccagccctggctctgcaatgggcactgggatgagccgctgtgagcccctggtcctgagggtccccacctgggacccttgagagtatcaggtctcccacgtgggagacaagaaatccctgtttaatatttaaacagcagtgttccccatctgggtccttgcacccctcactctggcctcagccgactgcacagcggcccctgcatccccttggctgtgaggcccctggacaagcagaggtggccagagctgggaggcatggccctggggtcccacgaatttgctggggaatctcgtttttcttcttaagacttttgggacatggtttgactcccgaacatcaccgacgcgtctcctgtttttctgggtggcctcgggacacctgccctgcccccacgagggtcaggactgtgactctttttagggccaggcaggtgcctggacatttgccttgctggacggggactggggatgtgggagggagcagacaggaggaatcatgtcaggcctgtgtgtgaaaggaagctccactgtcaccctccacctcttcaccccccactcaccagtgtcccctccactgtcacattgtaactgaacttcaggataataaagtgtttgcctcc

SEQ ID NO: 6775 - DNA, 580 bp, Homo sapiens
agcctcaggcggccagagggtgtgcggagctggtggggaggagcctggagagaaggggcagagctgggggctgagggagacccccccacaccccttctctccttcctctcgtccttggatagattcagctcccacacacacacccgcactgcccaggtccctcctcagacctccagccctgggacagggcaaacaactgaacttgctatggaaaggacagtgtgggaggctgggggagctgtgtcctgcagttcccaggaccccatcctctcagaaggtaggggaagggcgggaggattgagaagggacaagccaccttgaccgtaggggaaggaggaatgtgggctgggggaagatgccctcaactcaccccctacacacacatgagagagagcccccacccagttccttggcctaggtctcccctccaggctgagggcctctctacttccccagatgcctgggtgcaaagaacggcttggcttggctcctcctctggaggttaaaatttatagtcattctaactgcactttggaaaccaagcaaggggagaagacaaatgaagaaaaactagacagag

SEQ ID NO: 6776 - DNA, 483 bp, Homo sapiens
agccccccagaaggccgatggggaaggagaaggagtgccataccttctcccaggcctctgccccaagagcaggaggtgcctgaaagctgggagcgtgggctcagcagggctggtcacctcccatcccgtaagaccaccttcccttcctcagcaggccaaacatggccagactcccttgctttttgctgtgtagttccctctgcctgggatgcccttccccctttctctgcctggcaacatcttacttgtcctttgaggccccaactcaagtgtcacctccttccccagctcccccaggcagaaatagttgtctgtgcttccttggttcatgcttctactgtgacacttatctcactgttttataattagtcgggcatgagtctgtttcccaagctagactgtgtctgaatcatgtctgtatccccagtgcccggtgcagggcctggcatagagtaggtactccataaaaggtgtgttgaattg

SEQ ID NO: 6777 - DNA, 1732 bp, Homo sapiens
agcagcagaggtgagaactcagaagagaaatacagctggctatctactaccagaagggcttcaaagatatagggtgtggctcctaccagcaaacagctgaaagaggaggacccctgccttcctctgaggacaggctctagagagagggagaaacaagtggacctcgtcccatcttcactcttcacttgagttggctgtgttcgggggagcagagagagccagacagccccaagcttctgagtctagatacagaagcccatgtcttctgctgttcttcacttctgggaaattgaagtgtcttctgttcccaaggaagctccttcctgtttgttttgttttctaagatgttcatttttaaagcctggcttcttatccttaatattattttaattttttctctttgtttctgtttcttgctctctctccctgcctttaaatgaaacaagtctagtcttctggttttctagcccctctggattcccttttgactcttccgtgcatcccagataatggagaatgtatcagccagccttccccaccaagtctaaaaagacctggcctttcacttttagttggcatttgttatcctcttgtatacttgtattcccttaactctaaccctgtggaagcatggctgtctgcacagagggtcccattgtgcagaaaagctcagagtaggtgggtaggagcccttctctttgacttaggtttttaggagtctgagcatccatcaatacctgtactatgatgggcttctgttctctgctgagggccaataccctactgtggggagagatggcacaccagatgcttttgtgagaaagggatggtggagtgagagcctttgcctttaggggtgtgtattcacatagtcctcagggctcagtcttttgaggtaagtggaattagagggccttgcttctcttctttccattcttcttgctacaccccttttccagttgctgtggaccaatgcatctctttaaaggcaaatattatccagcaagcagtctaccctgtcctttgcaattgctcttctccacgtctttcctgctacaagtgttttagatgttactaccttattttccccgaattctatttttgtccttgcagacagaatataaaaactcctgggcttaaggcctaaggaagccagtcaccttctgggcaagggctcctatctttcctccctatccatggcactaaaccacttctctgctgcctctgtggaagagattcctattactgcagtacatacgtctgccaggggtaacctggccactgtccctgtccttctacagaacctgagggcaaagatggtggctgtgtctctccccggtaatgtcactgtttttattccttccatctagcagctggcctaatcactctgagtcacaggtgtgggatggagagtggggagaggcacttaatctgtaacccccaaggaggaaataactaagagattcttctaggggtagctggtggttgtgccttttgtaggctgttccctttgccttaaacctgaagatgtctcctcaagcctgtgggcagcatgcccagattcccagaccttaagacactgtgagagttgtctctgttggtccactgtgtttagttgcaaggatttttccatgtgtggtggtgttttttgttactgttttaaagggtgcccatttgtgatcagcattgtgacttggagataataaaatttagactataaacttggctccct

SEQ ID NO: 6778 - DNA, 1860 bp, Homo sapiens
gagtggaggctccagtcagacccgccagatccttgggcacctggcactcaagcactttgcacgatgtctcaaccaacatctgacatctttcccgtggagcaacttcctgctccacgggaaagaggtcgatggatttacccctggacccataagtctgttcatcctgctgaagtcccctccccattgctccttcaagccaaaactacactttgctggttcctgtcccctctgagaaaggggatagaaagctccttcctctatgtcctcccatcgagatctgttctggggatggagcttccaacttcctcttgcagcaggaaagaatgctgctcacccttctgtcttgcagagtgggattgtgggagggattggcagccttcttctccaccacctgtccagcttcttcctggtcagggctgggacccccaggaatattatgttgccgtgtgtgtgtgtgtgtgtgtgtgtgtgtgtgtgtgtgtgtgtgtgtgtgtgtgtgtgtcttcttttagggagcaggagtgcatctggtaattgagggtggatgttgtgtgtgctggggaggggtccttctgtttggtgctacccttgtctactctgcccctggatggtgcggggtgctttctccacccccacactccctgctcagctcctcgtgctgccctgcatgcccaggcttgtgagccaagctgctttttggggcagggagtagcagcaggtgggaggggttacccatcagcccttgcaagtcccccactcaggcctctggaaggtccagggatgggctctgatgagagggtaaaagatgctcagggaaacacaggcctcagctgcctagaggaccctccccctgccttgcagtgggctcgggtagagcagtatcaggagctagggttgtctgctgcccacactcctgctttttgggatatctaactgctaaggagggagttgacatcccccttctggctcatgtgtctgacaccaacaacatggtctctgtccctctctctttgactctccctttgtcctccccatagagctggggtggggtggatccctatacctggggcaggcagccccaaagtgggggagggggatggcagagactgtaaaggcgccactggactctggcaaggcctttattacctttactcccctccctctcccatcaccagcctcaaggcctgaggggtgcaggggctcctggcagctactgggtgaggtttcctggcacagactcacccttctttctggcaccacctctttcccttttgaagagacagcaacagccgtagcaaaagcagctgctgctcctgctatgagggtgtatatattttttacccaaagctctggaattgtacatttattttttaaaactcaaagagggaaagagccttgtatcatatgtgaacattgtatcataggtaatgttgtacagacccttttatacagtgatctgtcttgttcctgcagcaaaaatcctctatggacataggaggtgctgtgtcccatgccctcttgccctgacagtgtcccatgggcccccttctgctccctgccccctccctgctactgctgatgcactctcctctccctgcagcccctggcttcccagccttcctcctgaccccttccaacagccttggaactccagctgccaccaccctctgggtcggacactgggacccactggcccagtcttggctgctgcttacccctagccttgatgcctgcccagggacccccagccccctcccgttgccctgcagctttaacagagtgaaccatgtgtattgtacaggcgcggttgtcattgcagaaaccgctgggtggagaagaagccgataaagtctatgaatc

SEQ ID NO: 6779 - DNA, 3962 bp, Homo sapiens
agcctggcttggtcccgttcctcaggaaaaggatggaccttctcttcttctcagatggtcccttccattcccctgaaacctgcatgagagctcctaacatgtttctccaatgcaatcaagccctagactccaaatgtcctcccagctcacctccatctatgcatctcatctctggatttggtgatcagactctatattgacagtaggatctcaaaccctgcatccatccttcctccagcaagccctgctagccacatgaggaacaagtttccgtgtcttctgccttcctcttggggaaaggtgccttgttgtgatgaattaactcactgttagggcagggtggagaatggtactccttccttctcctgtccactgtgggggaagcttggcaggtatattatatttcatcatttaggaggctggcatgaccaggacttatgggtgggaggggagcatttttagtgaagcaagaaaggagtttgccaagaagtgatctgttttaaaggtcatatttggagaaagggcaaggaattgggtctgctttatttttgggggtattttgtttttgttctcacctgctgcccccccaccccaccaccccagggataaattggatataaacactaaatactaatcagttgaacttaacatttaataaaaagaaagggtgaaataaactgaagaccattttagaactagtcagttctctgcagcaaagggaacaggagccatttgaaccctctgggacccctcaccccactgcttcagggtgctaggctgagggatgtttttcctcccccttaccgcccatgcccttgaaagaaaagtcactttttgtggagggcatcattcattcctgattcacaaaccccaaaaacctctggtgggagataggaagatagggcgtgggcctgggccttaacctcaatcttgtgtctgcctcagtcttttctgactggccctgaagttgtcagtggctctttctgtccttcagcccctggaaggtgctccaggataacaaagaagggcaggttgaagcccctcatggaaggagctggctttgtggggctgcaaaggacttttaagtcctgcctgtactgaagttcacagcccacctgactgagcagactcttcctgttcctttctctaccacccttgccttcccaggactgcacggtttaacacagcagagtacagaagggtgaagaagtgagcagaggcttatgaagatattcagatactcttctatgccaggaagcacaaagactttgttgagatttgcctcagttcagtagatcttccttggcagccagccataggttgtttctttgtcttccgggtcctaaagagcacagagaaaatggaggtccccagtctaggtaggaagctgattggatgaggacttctttttttccgacagcaggatggggctcttgggctccacacaccagatgctttggttttctacaactgttgctatgtgtagagggtgctcagagcgtggcatgagagcaaggagaccatggctactctttgaaatggatggggaaaattagcttaaaaatttaatcacgagattgcgccactgcactccagcctgggcgacagagccagactccgtctcaaaaaaaaaaaaaaaaaaaaaatttaatcacacacatcacaggcttaaactgtcttagagacctttccagttgattggatcacaggctagggatctgtgcatggtgccaggtgaaacccaagtctccccagtgctaggtgagggagggctcaacgggggtaatgtgtatggggtctgctgtcctttgccatcccctggaccatattaactctgggacagaccatgattaggtctgtcaccaaacttttcctaatcattttttatgtatcattcttctttctaatctgttagcagttatctcccagaagtatccctagcatcctgaagcaaacagaactgccgggcgctgtggcttatgcctgtaatctcagcaatttgggaggccgaggcgggcggatcacctgaggtcagaagttcgagaccagcctgtccaacatggtgaaaccccgtctccactaaaaacacaaaaattatctgggcgtggtggcatgtgcctgtagtcccagctactggggaggctgaggcaggagaatcgcttgaatccaggaggtggaggttgcagtgagtggagatggcgccactgcgctccagcccgggtgacagagtgaaactccatctcagaaaacaaacaaaccaaacaactgagagagggcatgctagtggagggaaaaggagagagtacaagagttgatactgcatcagagttccagggcagatactgacaagtgactgaactttgactgtgaagtcttcccatttatttttgaaatgggagtcgatgccttttgtacgttatcaaagtgtttttttttttttcctcctttactcagacatagagcatcaaaatatcacgagtaaagccaaaccccagcttttcactggggctgatatcttcctccccatggcccactgccccctcatattccccagcacttggactgtgtcacatgggtattgattgtatacttgttgtcttggcctcatgcaaaaaggcctgggtctagatctagtcagatgagttttttttagagcatgttgatgatacaacacctgtttaaatgtctgccttatatgttatttggtcccactgttaataatagatttattactatgtatatttactattgaagatgggaatgtgatctgcatagttatcagtctattttgtatgttgtaaaaagcttctaatttaggtttaaggtgggctggctacaagagcactaaaactcctcaccttttaaactgctctttttatctgcttgtgggaatgtcgtctctttcgtggaagattgggtggtctcatgttgaggctgttgcccagtcccattaactcccttgtccccccacagaaggaagagacattgcccagctaagcatcaggaagctgtgttaaaagcccttctatgggtttggttttgtgatgtttttccctaatgggaaaaacgttatagttgtttcttactgccctgtctgggaagcagggcaaacctccaggtttttaaatgagctagatgcccctcttcctcttctctggtcactgaacctggaccaaagcactttgatattccaggtgtgattttctctgtcatggggatttgctccactgcagagccccatcattttcacagcgtaggccaacagagtgagaacctagggctaccctagctgatggatgtgaggctgctgtctacaggagctcatcccagccctgttaactggcagtggcaaggatactcgtcatcggccattgcactggggaactccctcaccccatggcttcccaacttgaaacccagatttacctccagggagaggtgagaaaaaaattgtaaatagacttgctaaagagcaactcagggttggggtgtgttttaattctcctgatcacttgaaataatctgtaggctgagtgcttatgggggtgggggagaagggtgactccagggtccttccattttgtgaagctctgggggtggagtgtgggcatctgaggccctatgatggcactacattgagctgtctgcccttccggaaacccaacctgcaatcaactgcaaatcaaattcttcacattccagctacagtctttctttccccattgaatctcagtccctggccatgtggtcaaggtggctttctgttaagctaccctaatttcgggaatgggaggggagagaggagggccattacaactctgccttcaagactcatctcttaaaaacaaaacgaaacaaaactacaaccaccatcaaaaccacacgcaaaaaaaaaaaaaaaaaaaaaaaggataactttaaccgaaggaagggtttggttccattcaactccacattcattg

SEQ ID NO: 6780 - DNA, 1160 bp, Homo sapiens
attcttctcttacaccccacccgaaagtattcagctggcatttagagagctacagtcttcattttagtgctttacacattcgggcctgaaaacaaatatgaccttttttacttgaagccaatgaattttaatctatagattctttaatattagcacagaataatatctttgggtcttactatttttacccataaaagtgaccaggtagaccctttttaattacattcactacttctaccacttgtgtatctctagccaatgtgcttgcaagtgtacagatctgtgtagaggaatgtgtgtatatttacctcttcgtttgctcaaacatgagtgggtatttttttgtttgttttttttgttgttgttgtttttgaggcgcgtctcaccctgttgcccaggctggagtgcaatggcgcgttctctgctcactacagcacccgcttcccaggttgaagtgattctcttgcctcagcctcccgagtagctgggattacaggtgcccaccaccgcgcccagctaattttttaatttttagtagagacagggttttaccatgttggccaggctggtcttgaactcctgaccctcaagtgatctgcccaccttggcctccctaagtgctgggattataggcgtgagccaccatgctcagccattaaggtattttgttaagaactttaagtttagggtaagaagaatgaaaatgatccagaaaaatgcaagcaagtccacatggagatttggaggacactggttaaagaatttatttctttgtatagtatactatgttcatggtgcagatactacaacattgtggcattttagactcgttgagtttcttgggcactcccaagggcgttggggtcataaggagactataactctacagattgtgaatatatttattttcaagttgcattctttgtctttttaagcaatcagatttcaagagagctcaagctttcagaagtcaatgtgaaaattccttcctaggctgtcccacagtctttgctgcccttagatgaagccacttgtttcaagatgactactttggggttgggttttcatctaaacacatttttccagtcttattagataaattagtccatatggttggttaatcaagagccttctgggtttggtttggtggcattaaatgg

SEQ ID NO: 6781 - DNA, 1416 bp, Homo sapiens
ccgcccacgccacatggacacagccctcgccctccgccccggcttttctctgcctttctaccgaccatgtgaccccgcaccagccctgcccccacctgccctcccgggcagtactggggaccttccctgggggacggggagggaggaggcagcgactccttggacagaggcctgggccctcagtggactgcctgctcccacagcctgggctgacgtcagaggccgaggccaggaactgagtgaggcccctggtcctgggtctcaggatgggtcctgggggcctcgtgttcatcaagacacccctctgcccagctcaccacatcttcatcaccagcaaacgccaggacttggctcccccatcctcagaactcacaagccattgctccccagctggggaacctcaacctcccccctgcctcggttggtgacagagggggtgggacaggggcggggggttccccctgtacataccctgccataccaaccccaggtattaattctcgctggttttgtttttattttaatttttttgttttgatttttttaataagaattttcattttaagcacatttatactgaaggaatttgtgctgtgtattggggggagctggatccagagctggagggggtgggtccgggggagggagtggctcggaaggggcccccactctcctttcatgtccctgtgccccccagttctcctcctcagccttttcctcctcagttttctctttaaaactgtgaagtactaactttccaaggcctgccttcccctccctcccactggagaagccgccagcccctttctccctctgcctgaccactgggtgtggacggtgtggggcagccctgaaaggacaggctcctggccttggcacttgcctgcacccaccatgaggcatggagcagggcagagcaagggccccgggacagagttttcccagacctggctcctcggcagagctgcctcccgtcagggcccacatcatctaggctccccagcccccactgtgaaggggctggccaggggcccgagctgcccccacccccggcctcagccaccagcacccccatagggcccccagacaccacacacatgcgcgtgcgcacacacacaaacacacacacactggacagtagatgggccgacacacacttggcccgagttcctccatttccctggcctgccccccacccccaacctgtcccacccccgtgccccctccttaccccgcaggacgggcctacaggggggtctcccctcacccctgcacccccagctgggggagctggctctgccccgacctccttcaccaggggttggggccccttcccctggagcccgtgggtgcacctgttactgttgggctttccactgagatctactggataaagaataaagttctatttattct

SEQ ID NO: 6782 - DNA, 1146 bp, Homo sapiens
ggcctgccagcaggccagggactcagcgtcccctgctactcctgtgctctggaggctgcagagctgacccagagtggagtctgagtctgagtcctgtctctgcctgcggcccagaagtttccctcaaatgcgcgtgtgcacgtgtgcgtgtgcgtgcgtgtgtgtgtgtttgtgagcatgggtgtgcccttggggtaagccagagcctggggtgttctctttggtgttacacagcccaagaggactgagactggcacttagcccaagaggtctgagccctggtgtgtttccagatcgatcctggattcactcactcactcattccttcactcatccagccacctaaaaacatttactgaccatgtactacgtgccagctctagttttcagccttgggaggttttattctgacttcctctgattttggcatgtggagacactcctataaggagagttcaagcctgtgggagtagaaaaatctcattcccagagtcagaggagaagagacatgtaccttgaccatcgtccttcctctcaagctagccagagggtgggagcctaaggaagcgtggggtagcagatggagtaatggtcacgaggtccagacccactcccaaagctcagacttgccaggctccctttctcttcttccccaggtccttcctttaggtctggttgttgcaccatctgcttggttggctggcagctgagagccctgctgtgggagagcgaagggggtcaaaggaagacttgaagcacagagggctagggaggtggggtacatttctctgagcagtcagggtgggaagaaagaatgcaagagtggactgaatgtgcctaatggagaagacccacgtgctaggggatgaggggcttcctgggtcctgttccctaccccatttgtggtcacagccatgaagtcaccgggatgaacctatccttccagtggctcgctccctgtagctctgcctccctctccatatctccttcccctacacctccctccccacacctccctactcccctgggcatcttctggcttgactggatggaaggagacttaggaacctaccagttggccatgatgtcttttcttctttttcttttttttaacaaaacagaacaaaaccaaaaaatgtccagatg

SEQ ID NO: 6783 - DNA, 981 bp, Homo sapiens
ggtaccttatcattgtcagccttcatctcctgatccaaaataaaataaaatgccacaggttacttgattttgcatctggaatatgattatttaaagaaattaaaaatttaaaactgaaaatgtagagtttagaaatcttttttaaggtttcaaaaaaatttctaggagacaacaaaatagtgttactagatttagcaaataaaatacagaatgccaattaaatttgaatttcaaatgaacattgaatactttttttggtataactatattccatgcaatatttgggacatatctgttatattattcattgtttacctgaaattataatttaaactgagagttctgtattttatctggcaaccttattatgaaaatatttaggatcaatataaaggaataatatttttaatttttacaaactattttaatataagtaatttatttgattttcattgtcatcctgagagttaagttttgccttacagtctatgttactttacctgtgttttatgaaaagactgtctcttataatgatagccaccaccaccatatcttgacaagtattgacatactgaaactttaaattcattttgtgtagttcccgcctcttcatgattgtttctgaggtaattcagcttctccgtctggctttccattttcaactctaggttagtcttgttcaaagtcaactcatctaagacacttcgcaggcccttgctatcagcctcaacacagtgataaaggacaactttactctggcatctgaacagagcccaattggaagaatcaatacagcttagatggaggtctcctcatccagtggtaataaaacatcccacatagtggagcttagagagcacagcactgggatgtgaagacatgggttcaaattgcacctctgccatgttcagctgtcaccttgggcaaattacttctctgaaccttagttttctcatcattaaaatgggaatattggttttt

SEQ ID NO: 6784 - DNA, 472 bp, Homo sapiens
tcacgttccaagagaaccaccatcctcacacaacaaatttctgctcaactgactcatcttttgggggactaatttaatttgctgctgacagccaccatgctctcacccaaatttttatgaattctctacatgtttaaaatcttggaaatctgcttgagggagggcagaatacttcatcctgattctctttttccttacaccttgtggatcatgtgccagcttcatctgttctcaagtttgagtcatggtctcagctttgactctaaagtcaagagcttcattccctgcttctaaggaatttaggtttctgcaactgatcgatgatctttgcaatcttttttttgttttcaatatcctcctcatcgttcttgtatccttctttcttcttttcatgataaatttgtgttgtgtccctggtagcagaaatccttacctatatgtttctgaataaattctgaaccatcctcatctc

SEQ ID NO: 6785 - DNA, 472 bp, Homo sapiens
tcaactcccaagagaactaccatcctcacacaacaaccttcagctcaactgacttgtcttttgagggactaatttactttgctgctgacagccaccatgctctcacccaaatttttatgaattctctacatgtttaaaatcttgggaatctgcttgagggagggcagaatacttcatcctcattccctctttccttacaccttgtggatcatgtgccagcttcgtctgttcttaatttggagtcatgatctcagctttgtctcaaaaatcaagagcttcattctttgcttctaaggaatttaggtttctgcaactgatcaatcatctttgcaattatattttcattttaaatatccttctcatggttcttgtatccttctttcttcttttcacgataactttgggttatgtctctggtagcagagattcttacctatatgtttctgaataaactctgaaccatcttcatctc

SEQ ID NO: 6786 - DNA, 467 bp, Homo sapiens
tcaagtcccaagagaaccaccatcctcacacaacaactttctgctcaactgacttatcttttgggggactaatttaatttgctgctgacagccaccatgctctcacccaaatttttatgaattctctacctgtttaaaatcttgggaatctacttgagggagggcagaatacttcatcctgattctctttttccttacactttgtggatcatgtgccagcttcgtgtgttctcaattttgagtcatggtctcagctttgactcaaaagtcaagagcttcattctctgcttctaaggaatttaggtttctgcaactgatcaataatctttgcaatcatatttttgttttcaatatcctcctcatggttcttgtatccttctttcttcttttcataactttgggttatgtttctgctaccagcagagattcttagctatatgtttctgaataaactctgaaccatcctc

SEQ ID NO: 6787 - DNA, 819 bp, Homo sapiens
gtgcttgtggctcactgaagcttaagtgaggatttccttgcaatgagtagaatttcccttctctcccttgtcacaggtttaaaaacctcacagcttgtataatgtaaccatttggggtccgcttttaacttggactagtgtaactccttcatgcaataaactgaaaagagccatgctgtctagtcttgaagtccctcatttaaacagaggtcaagcaataggcgcctggcagtgtcaagcctgaaaccaagcaataccgtcatgtttcagccaagcccagagccctaagattacaaacaactatggccggaacctcctcagctctccctctgcagagttccctaccctaagagaatgttaccacctgaacagtcctcggtgaatctgagaggagaggatggggtaaggcagaagcaccagctgtactactagaagggagcttttggtggtagatcccctggtgtctccaacctgactaggtggacagagctcaaagaggccctcttaccgctagcgaggtgataggacatctggcttgccacaaaggtctgttcgaccagacatatcctagctaagggatgtccaaacatcagaatgtgaggccaaccttctatcagagttaaacttttgacaagggaacaaatctcaaactgatccatcagtcatgtagctagctgtagagcttgcaacttaatagcagcagctgcccaatgccatgtgaagtaacaaactggtttttggtttttttttccccttcagttttaatgttatgtgtaatgtatttaaacccttatttaaataaaacttgttttcagaaat

SEQ ID NO: 6788 - DNA, 96 bp, Homo sapiens
caatcctagaaccaagcttcagagcctagccacctcccaccccactccagccctgtcccctgaaaaactgatcaaaaataaactagtttccagtgg

SEQ ID NO: 6789 - DNA, 809 bp, Homo sapiens
ggggcagggagcctggccaggcctgagacacagaggcccactgcgagggggacagtggcggtgggactgacctgctgacagtcaccctccctctgctgggatgaggtccaggagccaactaaaacaatggcagaggagacatctctggtgttcccaccaccctagatgaaaatccacagcacagacctctaccgtgtttctcttccatccctaaaccacttccttaaaatgtttggatttgcaaagccaatttggggcctgtggagcctggggttggatagggccatggctggtcccccaccatacctcccctccacatcactgacacagctgagcttgttatccatctccccaaactttctctttctttgtacttcttgtcatccccactcccagccccttttcctctatgtgacagctccctaggacccctctgccttcctccccaatcctgactggctcctagggaaggggaaggctcctggagggcagccctacctctcccatgccctttgccctcctccctcgcctccagtggaggctgagctgaccctgggctgctggaggccagactgggctgtagttagcttttcatccctaaagaaggctcctttccctaaggaaccatagaagagaggaagaaaacaaagggcatgtgtgagggaagctgcttgggtgggtgttagggctatgaaatcttggatttggggctgaggggtgggagggagggcagagctctgcacactcaaaggctaaactggtgtcagtccttttttcctttgttccaaataaaagattaaaccaatggc

SEQ ID NO: 6790 - DNA, 40 bp, Homo sapiens
gcctcttcatttagctaataaaaagtctaagcaataagaa

SEQ ID NO: 6791 - DNA, 167 bp, Homo sapiens
agccatcggtagagatgaggatcaggaagctggtgttcagagggatcatgggattttattaaactggattttcaagcgatttgtctgttataggaaaaatgagggttttacttctgctgctttccatcactattttgccattaaataggtgtctttcactcttgcaa

SEQ ID NO: 6792 - DNA, 3812 bp, Homo sapiens
gtgttctcaccaccacttatgcccctagaagggaaggggagagggaaacgtgccctctgtttgatccttgttttgtgacattttttttttttttttttttactcaaagttaacctacctgtaactttttaaaaacttgtaaaataactgaccctcccttcctgtccgccctcttcccctctaatgctcacgctcccaacacaaggtgggcagggaggcaccattcaggaacctggaccaaagctgacgaggctgggccaagccagggatggggccacagccagaaccccgagccctacttccaggttctggttagctcagccccagcccagcccagctgctctgcccagagctgggtgagtggggagacacctcagagccccgcaaaacccactgaccggaggcaaaaggcagtggggctgggggtagttttccatggtcacagagaactagtggtggctctgagaaggggaggacctctgggctttgattccatctccttgtcttttttctttgtttttagagacagggtcctgctatttcccaagctggagtgcagtggtgcgatcatggctcactgcagcctcgaactcctgggctcaagcaatcctcctgagtgatcccatttcttaatcagtgtagccccaagaaggctggggctatttaccagggtagaaaaaggagcttacctcccacctttggtcctaagtccctgccccctccccttcacaccataactaggtaacagtttgataactagggaagaaagcagaacagttaagcagccgccacatccccgctggctgggggcctcactccaggaaggggctggactggctgtcctttccagtggcctggctccgctgtgtggatggggagatcggggccagaggcagaaccctggtgaggaagctccagtcctgctctctacccagcccatcttgcctccatggtgcctctggaggcctctgggcctcctctaacaggggctggtgggcaccaagagccaatggagtagacccctggctggtaagggccaagtcccaccggttgcttctgggaaggggtttctaacactagtctgtgtgctgtggttcctggggtgccctccactgccctctgttcagtaacagggccttgctaatcgggttgtcactcaacaaaagtgctttggatttaagttactatcctggctttgcccaacctcagcaacctgtaagactgataatgaaataaatcatgttaatcctagctgtgtgcagtctctcttacccttctgtgcccagctcagtcttccctagggctgggtgtattaggactggctttgtcccacagcttggggccatcggtcctgtctcccctctgctggccgggcacagctgtggtgaggttgggcagctgaacagtgttggctttcatgaggaggcagaaagcagaggctggcctcagactcatacagaaggtgggggttggctgggtacgagggatgtggagcacaaaagcctctcatcccccattaaccagggcaccaagcccacaggtgtccccagcccactggatcagaaagagttcagtaagaccggaagctcctggtatgggtttctcccagttctctagggaaggccacctgcaggtcactgaaacttcaagcaccagggaagatctaacatttgagtcccttccaggccatcagaggcctagtcagccacatgggaaacttccaagacctgactcaggcatcattccaccatggctaaggcaccagccggggaagacttgaaagaaaggggcaggagctcagatgaagagaaatcctaagttacctttctaggtcaaggcctgtccctggccatctctgaacttcagctagagcttcaagtctgtgcctggagctcctgggaaggctactcaccttgaacaccacgcttgacaggacagcatggtgcatgccgctgcatccgtgagcagtgtgtctcctgcatgcagaaagggagcagagaaggccaggggcttttgctaaaaatagtggccagaccagagctctggagccacctgtcccacctcaaatgggtctgggggtcaggaggcagggttttatctctgtctaccatctccctcgaacccacactgcaacaggaactgtgagagtctttgtaagtaaactgccctgtctaggtcagtacccacctgagctttggacgcacacagcttttagtacccacctgagctttggacacacacagcttctagtgatttctggggccccaccgtaaagtgagcatgctttctgaactcgcttctctgtgactgatgttaggctgggcccagaggcacagccggggcctgcctagcactcacatgctggacaggtctgggagaggcagagtgccccacctgccactaggctgggtgcccacagcccgcatgcagcagcttgctgcaccccaagtccaggtcgggctcagctctggctcacagactggagacaatgcagatgccagagcaaagggccaggaagggtcaaaacattttattctcttttttttttcttttttaataaagttaaacagtaaaacaaaaattcacaagctgcctccctgtccacccccgcctccctcccctgccctcggtcttcggcattggttccctttgctccaccccactcacagagacacagggcatccaactgagaaaacgaaactgctctaagcacacggagacgtgatgaagggaggaggtgaactgtttccacattcaagattaaactgagtgaatctgcattttctgggttctgggtggttgcccttcattagccaaattgaaaaaagaaattccctggaccagatgctgaaagagaaaagaggggttggtagttggctatggattttctaaggaagatcactttgctctgattatggaaaagtcttcaagggctgcttcaaactcaaacacagagagaaactctatgggtatcaaacagctcaggctgtttttgggtgcaagagggagcacgtgactgtattatacatgggtagcttctgacctcagcattatctatatagtacctttgctcttgcagagaagccttggtactaggcagttagagatgcctccctgaccctgcagagatgcggtggctaaaggtcccaaggcaaggggtgcctgggaaccttcctgtcttcatccttagcaacagccgagtggatagatgccctgctagatgagaattcagctgcccccgctcatgggcccctctgactcccaaagagctgcctaagaggcaatgagtgtgttggcttgtgatctgggaactcccaagaacagcaggcccacctaccttcaaagctgaagccgccaggaccgccaaagaatgccttgaagatattgtttggatcaaaatctgtagagcagggcaagtaacatggaagggaagaaaaggtgaaaaattagaaatgttcgaagagaactgatgacactgagaacagatctccaaagctttcctggagagtctcactcccctcctttcccaacacttcagactgcaagtgagcaaacctgccccatcccgtgcaaaacatgctacctgatcccactcctaggacatgttcccttctccttccaactgctgccccaaaggaagctttctctgcttcagcttgcttcattgggctgttttctcaacaaatggaatgccatttgcacttacacaagactttccccatactctgtctccctataatgctggagcggctactaaaaaggataaaatgtatcacttaaatgttaccaaaaataaatataagagcaagatct

SEQ ID NO: 6793 - DNA, 1743 bp, Homo sapiens
agagctgccgttcctctttcacgatcccagccccatttcagtgtctggggctctggtagatgtgttgagggcaaagtagaggacaagctgtctttcccagtcagccagggagctccccgccaggccacgccccagccactttgctccctctcacctctgggaagtgcaaatactcttggttgacatccccttcctcagccctcccagcctactccccatcccagcttttagaggatctgctccactgtctcctggggcagttgtgggtcactgtcccttccagctgccccagacaggaagcagagtcaccacgcagcagtgtcccttcttgggtctgagttcctattataggtaggggccccaccctctgggcttcccatcagcgacacacacacacttatggcaccagcctggactccagaaaaagggtgtccaggtattgtgtgtatgcatttagttgtgcacacacaaatatgctcctatactggcattaggcgtctcctcatccctcaccctgacctttctcctgtccttttcttggctggaagaagttggcctcctgggagtgtagttttctgttttaaatcccccacccctggctgggctcagtggctcacccctgtaatcccagcactttgggaggccaaggcgggtcgattacttgaggtcaggagttcacgaccagcctggccaacattgtgaaaccccatctctgccaaaaatacaaaagttagccgggcgtagtggcacatgcctgtaatcccagctacccggggaggctgaggcaggagaattgcttgaactcagaaggcggaggctgcagtgagccgagatcgtgccactgcactccagcctggtcaacagagcaagactccatctcgaagaaaaaaaaaaaaaattccccacccctaccaattgttttacttcctcttcctgctcagggagcagatgggcctcactggttgagatggaatagaataactgggctatgagtcaccagcccactttgtgacccagcaagacctttcccctctctgggcatcagtttctcatctgtaagatgaccagagttgcttagatgatctcctagatcctttccagttctcttgatttcgtaaagccaatggcttctccctctttaaggtgctatgccaaccagccctggaggctgggatctgccgctccctccagccaccagggggcaggagtgcactacctgctgtcagtcaccagagtggccgctcagtgcccagcccgccagcctcgctcttggaggctgctctttatcctgcctgtggttttcagctcagagctggacttctatttataagttacctgtatttatatttatatgcccgctctcatggtgaaggctggacaaggtgctcctctggcccctccttcttacctcagatgcctgaacagaacaaggcaaacccgtagcagcctctcaggagctgacaggtcctctttcggggctcaggagggtgggcacacacccagcggcctgcagagtaagcttattacccacaactgtgcccgctttgtgcttctaaggtgcacacctagcctaggtgagacactgcagccaggcaaccaccgacacacgccccttctcaaagccagaggtgagtggggcaggtgcccggggctgggtgagtggaattaggacacacacaggcttgggcttcaagttcatttattgatgcattggttggacacaataaaaccacaattgttatc

SEQ ID NO: 6794 - DNA, 1271 bp, Homo sapiens
atgtttgaatcccacgcttctctttggaaacaatatgcaatgtgaagcggtcgtgttgtgagtttagtaaggctgtgtacactgacacctttgcaggcatgcatgtgcttgtgtgtgtgtgtgtgtgtgtgtccttgtgcatgagctacgcctgcctcccctgtgcagtcctgggatgtggctgcagcagcggtggcctcttttcagatcatggcatccaagagtgcgccgagtctgtctctgtcatggtagagaccgagcctctgtcactgcaggcactcaatgcagccagacctattcctcctgggcccctcatctgctcagcagctatttgaatgagatgattcagaaggggaggggagacaggtaacgtctgtaagctgaagtttcactccggagtgagaagctttgccctcctaagagagagagacagagagacagagagagagaaagagagagtgtgtgggtctatgtaaatgcatctgtcctcatgtgttgatgtaaccgattcatctctcagaagggaggctggggttcattttcgagtagtattttatactttagtgaacgtggactccagactctctgtgaaccctatgagagcgcgtctgggcccggccatgtccttagcacaggggggccgccggtttgagtgagggtttctgagctgctctgaattagtccttgcttggctgcttggccttgggcttcattcaagtctatgatgctgttgcccacgtttcccgggatatatattctctcccctccgttgggccccagccttctttgcttgcctctctgtttgtaaccttgtcgacaaagaggtagaaaagattgggtctaggatatggtgggtggacaggggccccgggacttggagggttggtcctcttgcctcctggaaaaaacaaaaacaaaaaactgcagtgaaagacaagctgcaaatcagccatgtgctgcgtgcctgtggaatctggagtgaggggtaaaagctgatctggtttgactccgctggaggtggggcctggagcaggccttgcgctgttgcgtaactggctgtgttctggtgaggccttgctcccaaccccacacgctcctccctctgaggctgtaggactcgcagtcaggggcagctgaccatggaagattgagagcccaaggtttaaacttctctgaagggaggtggggatgagaagaggggtttttttgtactttgtacaaagaccacacatttgtgtaaacagtgttttggaataaaatatttttttcat

SEQ ID NO: 6795 - DNA, 1458 bp, Homo sapiens
gtccctgtgagggccgtgtgccccatgctaccctccccgcctccctccacagtgatcagctgtgcctctctgcctgttggttgtgatctgtgggcaccagctcattcgtgtcaccctgtctgtgagtcatttagatagaatagtcctccttgggtctcccaccacccctagctttgtgtgtagtgtagtgattttctggctgtcactcatactcactgggcaccagccttgccctcttagcctccatccatccagacagcccttcccacctcctggtggtgagccagtctgcattcccacgccatcccaaagccctttcatcttccccgtgcattgtagatggaaggagcacccatgccattcacatctagactttgagttccctgcatctgccaccgtagtttctagcaggagtagtggggggagtaatacagattcttccctagaaggggacactggtaacatgtcccactcttggattagcaggggtgggtccaggaagatgatatttgcgtcttttgcccacccccctggcattcagctggacccaactaggccatcatgagtggcttctccctgtcatccccaggggtcataggatatctacaccgcctttctgaccccaccctgcactcccatcctttcctctctccccgttcatgccctgcactacatagcacagccgggatgcttggaacagaggccttggctgctccgcagtgcacagggcttccctctctcggggttggcttcttcccaggccttgcatgggccctgcccacaagcacaccctcaggccgagggtgcagactgatgctcttccctgatggagaccctgagatcttccccacccccaatcatgatgtcttcagtgtgggactggggtcctcttggttctgcctgcagcctgcctggctccgcccctagtgccccctcctcaccacactggccccaggtctcaggaggggtgtcctgggcagggaaggtcagtgtcactgatggtttgctgtttggaagccattggcagggctgccgtgcatgtggctgtgagggctgcacagtcctgccaaggggcttcctccttgtcaccccgaaccttgtaatcgtgtgctggcgtggcagccctggctaagttaatccccaccgctttcagtggtagaaagaattccctgagtgggccaggctggtgccctcctcctaccctggcttttctgagtgagctgcctggagccctcatcccctctcccaggctgggctggccctgggcggggccactgtgtgctggcccactgtgacctgacccgaccttgtgcagcccccctgccctggtgtcctgggttttcgtgatgatctttgctctgtttccagtggggtttgaagcagagttcagggaaccctgcccaaggtcctcctgttcagacattcctatgttgaataaagtatgtttgacttccccgg

SEQ ID NO: 6796 - DNA, 208 bp, Homo sapiens
tagattcgccaccactgggccttgttttccgctaattccagggcagattccagggcccagagctggacagacatcacaggataacccaggcctgggaggaggccccacggcctgctggtggggtctgacctggggggattggagggaaatgacctgccctccaccaccacccaaagtgtgggattaaagtactgttttctttccactt

SEQ ID NO: 6797 - DNA, 275 bp, Homo sapiens
aggcttcctcagccgctgtctcccgcgcccttctttgtcccctgggtctgtgtggtccctggggatggggcggcggtagcagctgtgggtggctaattaagatagatcgcgttagccagttttaccagcgcagctaggcgcgatggctgtcgcctgtaatgccagcgctttgggaggcggaggcaggaggatcgctcaagccccggagttggagaccagccagagcaacacagtgagacccccatctctacaaaaataaagaaaatttaaaaatc

SEQ ID NO: 6798 - DNA, 308 bp, Homo sapiens
aaagttctcagtggggccagactggctcctggagctgacaagcgaccccgtggtgaggagaaatgggggccttgatgctcaccctggttcaggcccagaggtccaagctatactgtgcaggacatggccaggcctggtggacacaggaagcctacccaacacgctggtatttggccaacactgaggatgtggttcatgggggagcagtcccctccccactcttgcccatgggtgactcttacccacagctgactagggccagcgcaaatactggaacctgtaacagaattaaaggtgaatgttctgag

SEQ ID NO: 6799 - DNA, 1599 bp, Homo sapiens
ccggttcttggaaacctggagaacagccaacaagaggcccttgaatctctacgtggccactgaactgctgggcccgggagactggactacaacacctcacactggtcagctggtttctacttggtgtttggtttttcccagccccattttatcttcagcggagccgcggtgtttgttttgtgaaagcttctgattaatttattatattgacgataaaactcaaacctacccagccttccccccactccatggaagtccttgggatgggcgtctgctctggacaccccaaagagctcctgccctctcagccctttattcaagcctcagatttctgctcatgatctacatagatttggaaactgttttcctctgttttggtctcttgggcaacatttttggcccaagtttgggcaacatttggcccaagtttgggcattttggcagtagctgtatgggagaaaaagagtaagaggaaatattcccacagccatgaagggtgaaagggcaccttgtgcctagactagggctgcctggtcagtcccaggtgaggccaagggctttctggccatctcagggaggggccaccaggttcctcccctcaccccatattccatcaccttcctcctctgctctgggtggtaagggaagccctcccggttcccacaggctatgatgctgcatggcagaggcaggtataacacagcactacatattggaaattttttatttttctaaataccaatgcagttttgctacggttacaattttgaaatattaactgagcctcaaaatcaccctttctgtcaagcatatcttggcctctcccatgtctcagtgttgcctgcatttctcccaggacttgggggtggggtgaaaagcgtacaaaagatacttaaaagggctcctggggtacacaagcccagcaggtcctgagtgaagccgtgggccctccaaatgctcgttttatagcaacctctctctaccctagttctccaaattcacttctgccttcctcaggtttgatatctggcaggtttgactatccagaggaaattaaatatttttatataaaattaaattataataaatattgccaaatgctttcctttagcattgttccaagtctaaatgttaacctcaagctactgcaatttagacaatgaaatgggctgggtctacccccagccaccagccctcatcctctctacccagtgctctggtttatgcttgtctcctgactgctctgcttaaaggtgaaagtagcaggaacaacaacaaaagccaaccaaaaacaaggtagccagtgcaagacatctcactcttctgacatcctgcagtccccaccagtcctgaccgtgggcccctcaggggtctgggagtgtgacgttgtaatcttcatccgtctctatcccaacttcctcctgtgagacagggagacaagtgaatgagatgtcaccaggataagaccacagggaagcaaagaaggaagagagctccacttacaaagaactgcttcttgctcttggggtatccttcaagtattgcatcagacagctctgtagcctgacaagaaataaaaccacccgttttcagatgggc

SEQ ID NO: 6800 - DNA, 190 bp, Homo sapiens
gtcccccaggacagggaccctcatctgccttactggttggcccaagccctgcctgactgaccaccccctcagagcacagatcagggacctcacgcatctctttctcatatacatggactctctgttggcctgcaaacacatttacttctcctcttatgagactatttatctttaataaagcactggatat

SEQ ID NO: 6801 - DNA, 205 bp, Homo sapiens
tttccctccccactactccttctccttctagatggtaaccacagcctcgaccatgcctgctccctctgacccagcttcacctcatggacaacccttcttggttcatctccagcccgtgagctggtcctgcttcctcccttccatgccctaacttttaatatgcttgttcagctctaataaagtaataaagcttggttgtcagtat

SEQ ID NO: 6802 - DNA, 904 bp, Homo sapiens
gtcagaagggcttctgggaccaattccagctcctgacattcccccagtcctgcctctcccccatcctatcagggacatttggctcctcttagctggctctgctcatccagaggatattcccccatcccccccccatcaagtttggtgggcagagctacagatgggacccaagggagtggccgagcctcactgcctaaaccaatgcccttctcatccctgtttccccaggctcctggctgtttatctgccccaaaggagaagcctcatggggttgacataggtcctttctgccatctctgttccagctgctgtcagggattaacaacagagtgtaggggagattaactgcctcccttccaatagacactatcagcagggacagatgtgtgggagtgcagggctgcagagggtatggggggaggaggctgctaaaccctatcccccagcctcccccctgccctgaagatcttccatttgcttccactcagctggaggctcaagagggcttgatggctgtcccctgcccccctccttttgttttgtacacagagaccaagaggcctcagtttagcaccttagtacctccgctgcttcacttgctttagccaaagccataaaaaacctgcaacgtagagaaaataatgcagataccctgactagccagccctctactcctccaaccttttccaagatatgcaatggcctttgtgcctgcccaaaggcttcgccccctccagtgcatgaggaaccctctttcctccgctcagagatgctgcttcatttacccaggaggtcatattctttatatatattttttgttgcaaagtgtctctctagagaaactctatatattattcgaatttttaaattatttgtttatatataaaagaaaagctcaattggc

SEQ ID NO: 6803 - DNA, 187 bp, Homo sapiens
ggggccacgagcttctcaacaaccatgttactccacttccccacccccaccaggcctccctcctcccctcctactcccttttctcactctcatccccaccacagatccctggattgctgggaatggaagccaggtggggtcatggcacaagttctgtaatcttcaaaataaaactttttttttgtac

SEQ ID NO: 6804 - DNA, 529 bp, Homo sapiens
cagggacctgtctccctttacttcttacctcccacctttccagggctttcaaaaggagacagacccagtgtcccccaaagactggatctgtgactccaccagactcaaaaggactccagtcctgaaggctgggacctggggatgggtttctcacaccccatatgtctgtcccttggatagggtgaggctgaagcaccagggagaaaatatgtgcttcttctcgccctacctcctttcccatcctagactgtccttgagccagggtctgtaaacctgacactttatatgtgttcacacatgtaagtacatacacacatgcgcctgcagcacatgcttctgtctcctcctcctcccacccctttagctgctgttgcctcccttctcaggctggtgctggatccttcctaggggatgggggaagccctggctgcaggcagccttccaggcaatatgaagataggaggcccacgggcctggcagtgagaggtgtggccccacaccgatttatgatattaaaatctcaactccc

SEQ ID NO: 6805 - DNA, 373 bp, Homo sapiens
attcagaacagaagccatgtatctcccccacaccagggcccaccatggagcttgtgttctcagaatctgatgctttctgatcaacaaaactgagcaaggaagatcccaacactgaaggggtagaaggccaggggggcatggagagtgcagctccattatagtgaagagccaaacatatgtgaactgtttgctgtgtggaggtgttagttctgctgcctaccatcttcatctctagcacctcccctgccaagagtcaaccactaagcaatcccacccaagcctggatgcttctagaggggcccactcccagctgggagagtgtaggggatatgctcacaccacattagcagcaaccaataaaaatgctggaaac

SEQ ID NO: 6806 - DNA, 1100 bp, Homo sapiens
gggaggctgaatccaccaaatataaacagccatccgtcactgcactcatgcctccctctgtttactttcatactaagggtacaaaaattccaagtctcttttgaactgtattttgtatgccaatttcatgcttatttttcctttatcagagagagttaaggtggacgagcatgccctttttgtcatatcagcctgaaaatgttaaaaagctaggtggagacagattagttgtttcatttttgtttaacaaggtatttatacttttagcttaatttcattaagaggaacatcaggcattgcaatcagtattaatcaggggctcaaatacagactatctgggtgaccttgactaagcatcaaggaggtagcctttatttccccttaaaattagtttaacatctctgttccattattcagatctacacaaacaaggcttcctcaacagctatctatttttactagagtctttttttaaaactaaaactaactctaaagaagtttcaacagaatttccacatacctgcattcattagaacttgattctcccagaatacaaagtactctattttaaagaaaaacccaacagtgcacccctgggcagttttcagactgcagcaaatcttttattacaaataattaaatctctccataatgtctcaaacagtatcaaacaccatttcatatctctaacacagagcagagtcggcattcagtataagaaccaagtgaaaagtgttaaatttcaagcatctgatcacatcacatggtgaccaggtaaagcttagatgtcattttcccacattatccaactgtgcatctcaaacatatcctcatctcagtaaagacaaaagtttctatttcatattgttaagtgcaggaagttgagagagataaaaatccagtgaaaacacatcaatctcaattcaactcagttaaaaaaaagaaaagcaaatttaaattagtttttttcagagaagaaagggaaaggagtccatggggttaagaatcaaaactgaccagggctggcaactatagatggcatgttgtagctctggaaagtatctgtcacatgatattttaaaataaagtggcttttgtgg

SEQ ID NO: 6807 - DNA, 2180 bp, Homo sapiens
ggccagggccagggccaggggactctgtgagtctggctcaagaccgacattgccttggtttgttacatgactatcgtgatggggaaactggctggaaatagtaatcacacctctctgtttttagttagagtctaatgaaactctcatctagttctgtgatgtgtttacctcttttttcaggcctcaggaactcttctatttccttccctaataccccacacccaacctgtcgtaatttctggagaactccaggtttgtgtgtgcaggatgttggcacaaaaatacctgtgttttcattctccccctctctccctcctgtgtcttgcgctttatgttttcttccgtttgataattagttggttaaaagctgagggaaccggaaggaaagtgctaggtgttttttaggaactagggtggcggggggacgaacttctcttcctcacatgaggttactgtttctttcctctgtggggcattggatcctcccacagttgccctggtgatgacttagggcttcccatctgtgtacatcccactttgaatcttgatcgtgacaagaaataccttaggccttcagtcaattccgaagctccttcagttgtttttataatgggcgttttcacatgcacatatgtgtatgcatgtatacgcccatacagacatgcacacacagactcctactccattagctaacataccctccctctccacaacccctgtcacatacctttcaggaggtgacagttgtcttagttgtcatctacccagacaaacgtcctgggcccgtcctccctcctgatactgtagcctcttggtacccagggtgagttggtggagaacagagagatgagaagcagagggcttggggaaagcctgttcctctctgactcagccctttttggcattattgcaagagcttgactcctggttgccttttcccagccagttttcagttggggtgaaggtttctgcaagtgtgaggtccagatgctgctgctcatgttgggctttccttttgggaactatttctctttatttatagtgtcgggcttccggggaaagcaatcattggtgtgtatgtgtatgtgcatgcacacacgtgcatatacacatttgtgtatgtggaaatgtgctgggcaagtcaaaactatagaagagttgcctcctgtctctcgaatcttccagagatatcacttaattgttaacagcttttgtgttaatccccttcagcccctagctcttttattctaccacggctggagagttgatacctgcagtcagcctgccagtgactcttagtgtctgtttctgacttatttttcctgtctctgtcttccaacccccaataatatttccaccggggatgcatcatttttactcccaatattctgtagagagggagtcaggatgctgtcttcccacgaatagtactcagtaacaaaccaattgcattttagttgggcagtgctcccacccaccctccagatcccttccagctaaaacccttcccccttccctccatgtgtttctcagtttcccgtttcgtttgttggactgttccactgcccctcctcctcaccctatcacccatggatcgtaatgtaaaattcttttaccatgtcaagaaattattaaaaatacaggtactttgacctctttctaaagccgcagaccctggtgcaatgctctggtggctagggatgtactcatgctcatatgtgtgcacgcttggacacccacctccatggacacctagccaccctgttgtgtgtccttatgccagttgagctgaatcttttccccagtatagtggaaagactgaggcttctgcctactgagcaaggttgggtgcttcatttgtgttcagtctgaattatgggaaagttagctcttcccagacctaagctgccttctctccctactttcagaagatcctagttccttccttcccgagtgatacccatgaactgccagtagaggctgctatcgttccatgtgtaaggaatgaactggttcaaggcgcgtcctacccagtcattttctttaccttatactaattcttcctgaataatgtcttcagtttcttgaggagactcctagttttggttttcaaattacttggagggctgcctaggaatctatctccctctgaaataaagtttcctcatcttccaccttgc

SEQ ID NO: 6808 - DNA, 357 bp, Homo sapiens
tcctgagggtgtggcgggcggcgtggttaggcacatgtacttttccctgtttctactttctattctccgtgtttttatcacacctgctccccagattcccaccccctcaatgttcctctcacacgaaacccccatcagtccctttggttaattcttacttcctgttcatctctaaagtgttaaattataaaaatgatttttaaatattcaaagaaaaatatcacaaatcctactactcagaaataggtggtcacattacatcagacatctctttatgcatgtgcattcaaaaggaagagtagatagaattttgtaaaacagatgttgtatgtaatttataataaaaagtattagagg

SEQ ID NO: 6809 - DNA, 1571 bp, Homo sapiens
gcggtcctgggatggggcatgtggccaagggctccagggccagggtgtgagggatggggagcagctgggcactgggccggcagcctggttccctctttcctgtgccaggactctctttcttccactaccctccctcgcatccgcctctgagccaggagcctcctgaccctgtgatgcctgacacaggggacactgaaccttgttgatgccagctgtactgagttctcatccacagaggccaggcatggcccagcctggagccgtggccgagggcttccctagatggttccctttgttgctgtctggctttcccgaatctttttaggccacctccaaggactctaaaagggggctattccctggagaccccagagtagggttgccagtcctgcaagtccatagctgagctggaaaggatgcttctgctcacattccctctcatccaggtcctttccttctcgtcttcctctctctcacctacttcctcctcctcctcctgttcctgccttctcttctatcctgcaatttctcccgaatcctgaggggatatccctatgtcccagcccctggtactcccccagccctcagttttcagtcaagttccgtctcctctccagccctatggaagtctcaaggtcacgggacccctaatcagagtggccaatccctgtgtgtcgttcccttgtgtctgttgcttattgggagtaggagttgctcctacccctgtcctggggctgggtgtgtttcaggacagctgcttctgtgcatttgtgtctgcctgcctcatgctctctatagaggaggatggtcatcgtgacagcagcagctcaagttagcatttcaagtgatttgggggtgcaatgataatgaagaatggccattttgtaccagggctctgtattctgcaacagcctgtttgggaggctggagtggaaacaaagggtgggcatcaaagatgagaagccaaagcccctacaactccagccacccagccaggaggggctgtccaatcacattcaggcatgcgaatgagctgggccctgggtgaggtgggggtctggcctagtggggaggggcctggcctgggtggggcagggcctggcctggtccaggcttgggctccattcccatcactgctgtccctcctgaggtctggattggggatggggacaaagaaatagcaagagatgagaaacaacagaaacttttttctctaaaggactggttaaatcaattctgatacagccttacaatacaatagtatgcagctaaaaaataattgtatgtctttatatactaatatgtaataatcttcaggtgaaaaaggcaagccacagaaatgtgtatagcgcacttcccatttgtgtttcagaaaggagtagaatataaacacataattgcttatgtatgcctattcagaataaatgggtaacactgattacttttgggaggggaaccagtaggttgaggacaggagagggaagggtcttaacacttacacccttttgtacattttgaattttgaaccatgtgactgtattacctattcaaaataaacaataaatgggccc

SEQ ID NO: 6810 - DNA, 1943 bp, Homo sapiens
gagatgtggagtcttcggtgtttaaagtcaacaaccatgccagggattgaggaggactactatttgaagcaatgggcactggtatttggagcaagtgacatgccatccattctgccgtcgtggaattaaatcacggatggcagattggagggtcgcctggcttattcccatgtgtgactccagcctgccctcagcacagactctttcagatggaggtgccatatcacgtacaccatatgcaagtttcccgccaggaggtcctcctctctctacttgaatactctcacaagtagggagctcactcccactggaacagcccattttatctttgaatggtcttctgccagcccattttgaggccagaggtgctgtcagctcaggtggtcctcttttacaatcctaatcatattgggtaatgtttttgaaaagctaatgaagctattgagaaagacctgttgctagaagttgggttgttctggattttcccctgaagacttacttattcttccgtcacatatacaaaagcaagacttccaggtagggccagctcacaagcccaggctggagatcctaactgagaattttctacctgtgttcattcttaccgagaaaaggagaaaggagctctgaatctgataggaaaagaaggctgcctaaggaggagtttttagtatgtggcgtatcatgcaagtgctatgccaagccatgtctaaatggctttaattatatagtaatgcactctcagtaatgggggaccagcttaagtataattaatagatggttagtggggtaattctgcttctagtattttttttactgtgcatacatgttcatcgtatttccttggatttctgaatggctgcagtgacccagatattgcactaggtcaaaacattcaggtatagctgacatctcctctatcacattacatcatcctccttataagcccagctctgctttttccagattcttccactggctccacatccaccccactggatcttcagaaggctagagggcgactctggtggtgcttttgtatgtttcaattaggctctgaaatcttgggcaaaatgacaaggggagggccaggattcctctctcaggtcactccagtgttacttttaattcctagagggtaaatatgactcctttctctatcccaagccaaccaagagcacattcttaaaggaaaagtcaacatcttctctctttttttttttttttgagacagggtctcactatgttgcccaggctgctcttgaattcctgggctcaagcagtcctcccaccctaccacagcgtcccgcgtagctgggactacaggtgcaagccactatgtccagctagccaactcctccttgcctgcttttctttttttttctttttttgagacggcgcacctatcacccaggctggagtggagtggcacgatcttggctcactgcaacctcttcctcctggttcaagcgattctcatgtctcagcctcctcagtagctaggactaccggcgtgcaccaccatgccaggctaatttttatatttttagaattttagaagagatgggatttcatcatgttggccaggctggtctcgaactcctgacctcaagtgatccacctgccttggcctcccaaggtgctaggattacaggcatgagccaccgcaccgggccctccttgcctgtttttcaatctcatctgatatgcagagtatttctgccccacccacctaccccccaaaaaaagctgaagcctatttatttgaaagtccttgtttttgctactaattatatagtataccatacattatcattcaaaacaaccatcctgctcataacatctttgaaaagaaaaatatatatgtgcagtattttattaaagcaacattttatttaagaataaagtcttgttaattactatattttagatgcaatgtgatc

SEQ ID NO: 6811 - DNA, 1974 bp, Homo sapiens
tgagagtgccctaaccccagacaagctccttgttcagtagggatagatgtgctagtcttctagcataggagcaaggaatcagaggtggggttaaaggcatttttcccagaccctgctcaggcagtcggccaaatgagtgcaaagtctgttttccccaccaacttagctctcggaaagatgtgctggagggaccctcttgttaagaaggttctgccaggccgggcgcggtggctcacacctgtaatcccagcactttgggaggccgaggcgggcggatcacaaggtcaggagttcgagaccatcctgtctaacacggtgaaaccccatctctactaaaaatacaaaaaaattagtcggacatggtggcaggcacctgtagtcccagctactcgggaggctgaggcaggagaatggcgtgaacccaggaggcggagcttgcagtgagccaagatcgcgccactgcactccagcctgggcgacagagtgagactccgtctcaaaaaaaaaaagaaggttgtacccacagtatacgtgtgggcacttgtgcttgagcctgtattaaaggaatcaggccaggcacagtggctcacgcctgtaatctcagcacattgggaggctgaggtgggcggatcacctgaggtcaggagttcaagaccagcctggccaacatggtgaaaccccatctctactaaaaatacaaaaattagctaggcggggtagtgcatgcctgtaatcccagctactcaggaggctgaggccggagaatcgcttgagcccgagaggtggagactgcagtaagccaagatcatgccattgcactccagcctgggcaacacagggagactccatctcaaaaaaaaaaaaaaaaaaaaaaagacattcaacttgaggctcctgttagttaagctatcttctttcacttgaagcaggtttgagaggcctaggccagaatttaaattccttttatgaatagatttccctttcttcctgaccccaaggtcagaggagactatatattccatggctgcctctaagactaggaataggaatatctgaaaacagcatttctaagggtggtaaccacaggtcgattttaatacgagtcctttttcttgtagaggtaagtaaaatcttcctgacaaggtagtcctcttttcatggcacagacaatgggctttctgtttatgaggggtgagaagtgatgtttgttactatgttctccagcaagtaaacattcctctgctcacctcccaacaagactaacagtctttttagaagtaaatatattcaagacaaacgagaaaatcctggctacccaagtcgagtatatacaggaatacaaatcggtaaccagcagctgttcctcaggttgtgactcactgagcaccacttgtcctggaggctggatgatggaggacatctggttataggtactgtagcagggataggtgccacaggaggataggaactacagcagatcgctgtttccagaacggggaggagtatctcattgtgaaacagactctagagtggttctatttggtcttcagtgttttagcctcgttagttcatatttggcatgcagcttgtggtgagtactgttctaggactggccaaaaatgggcaaaatgtatcactccaaacactactgattcagcattgttttcatgtcttaaaattgccacctgcactttgtttctgcactattatgtagtgcattttaacttaaattttttccagcaacatgttacttatttaagatacattactgatatttcattataattagttcaccttccctgtgaaacaagagaattgtaaaatgttgtggaaaatgatacatatgtggatgctaatgaaatcatagtattttgtgtagcttctctgaagaccttagagatctgcagctttggtttataagtgtttgggccttatcagcccatctgatccagatcaatatttttttgaaaactg

SEQ ID NO: 6812 - DNA, 28 bp, Homo sapiens
atgctttgttttgatcattaaaaattat

SEQ ID NO: 6813 - DNA, 156 bp, Homo sapiens
gggcctccccttctcatcctccccacccccccgccaaggttctcacactggcctgggcttgggtgcccatataggaggtctgtatgttcaccaacagtgcggaggggtcacacattgcaaaacactgcccagaacagtaaaaagagcctgcatgcc

SEQ ID NO: 6814 - DNA, 3360 bp, Homo sapiens
ggggctaggagagggcagagtgtgaagaggggtggtgagggacacaattgttcccctgcctgcgcccaggcttcctgacctcctgatcctggctgggaagttagggcaggcagagcgagcaattctgggcaggggagctggagggcagaagggtatcatcgtttctcatctcctcctccctcctcttctccagtggatgttgagggagctaacagggctggcatctggggcatgaactgggatggggcaggtgggcgttagggaagctggtatcaaatggtgaccttggtggagtctcctatgtgaagagtaccctccctctccacccccagtccccatatcctggttctggcccaaggaaaatgtccattctatgaccttctcttttcctctcctctcacttctgcagctattctcacacatctaacctctaggcaacatgcactaaattcaaaagcaaggagaagcccttgccccccatcagtccaccagccctagaacctcccttgcctcaacagtcacctaataaagcccacctccatggaaaacggctgtggctttagttttgttgctttttaaaaaaatcaatctaccaatctttagcagtaagagggaaagttagacctcagctggggaactttcctgtccatgtccacagatagagcagaggacaaagccataggttggatcagaagtgtccttttaggagtcagagttgggagaaggagacatcctgggactgttcatcctagttaatgaagtgggcaattctcaggccattagggggttttagagcagaccgacatataattagtcagcatttctcagcccagccaggcctgctgctagtgtgggaggggtcctgctcaccatctgtacccctggcttggagcctgctggtaccctgggggttgtggggataaggaggcatcaggccgggcgcgctggctcacgcctgtaatcccagcactttgggaggccgaggtgggcggatcacaagttcaggagatcgagaccatcctggctaacacggtgaaaccccatctctactaaaaatacaaaaaattagccaggcgcggtggcagtgcctgtagtcccagctgctcgggaggctgaggcaggagaatggtgtgaacccgggtgaacctgggaggcggagcttgcagtgagccgagattgcgccactgcattctagcctggatgacagagcaagactctgtctccaaaaaaaaaaaaaaaaaaaaaaaagaaggcatcaaaagcctccacatcacagaagctacccctgtacagcgtgaagtttcctaagaggtcagtagtttgattctggggtctccttagaggctcaggccagggacctttctctcctcccatgctgagtttcatgatggctttcaggggagcatcagctgttagagtcacccctaccctgtcccttaaaggaaagacggtggagaggacggctgagcgcctgttgtcaggaaagacagtactggtctgttttctcgggagtctggtttcagattgtcctgtattcccttcctggctctggtcccactggcctcttttcggtgacattctcccccaggaaccatccctggcccttccctcccccagccctagccagttctcccagacacactggaagagaacactgaccttacccaactatctgctgggatcccacccaaatttatagcccattcctccctcattcattcattcagcaagtatgtactgaacaccaactgtgtggcatacactggcttgggagattgcaaggaccagtctctaagcttttggaggccagcccagtgtggaagagaggtacctcaggtgtgagggtgccatggctgagggatatttgtacatgtatgggatgctatgggagctccttgcagcctgagaagccagtcctgtgagccaggtcctgagggttgaagaggagttttccgggcagggaaggggtaggaaaggcactctgggcagagggtacagcatgtgtaaacacgtggagatgagaatgagcatagcactgttggggctcccatggcagggagaatagaagacaaggctaggaaggtacactgaggctactgcagggtccacagaggaatcagaatttcattctgaggatgaatgaaatcatcctcagaggatgaagccaccaggaatttcaggcagagagtgaagtgatcagagttgttttttggatagatggttatctggatgtggtgttggagctgggagatttggctctgaggtgtgtcatttaaaataatagcttctcggcagtggctcacacctataatcccagccaagattcctcctttgggaggccaagctgggaggatcgcttgaggccaggagttagagactgcagtgagctatgatcatgccattgtcttccagcctgagtgtcagagtgagaccctgtctctaaaaaaaattaaaaaataaaaaataaaaaatagcttctcctttcccttatgccaggttccagtcttgagaggaaaggaatccctacccaccactccctggatcatcagatatccctatcccaacctctcctatgggactagttcatctcagccagtctcaaagattctaggataacttcaatggcatttgaaattatctaagtgtgcttggataaccaccccctcaaactgagacctggttagggactgactcaaagaccctgagtcctcggctaagggtacaggagagggcaggggctccaggcccagctaggtggatctccatctgtctctgaggactgaccctttccccacaaggacctgccataaaaatcgacttgcgatttttagctgagtggcttctcttttccactttggacttctcagtgtatagcaggttcaagcctgcaaccaccaaagtgcagagtgtggagtgtttgtgccccctctttcctccaacctccatatcctgccatgtgagctcagggaatgcaaatgcatttaaatatccatctaaagcaaacataattagaaaaatcaatcagctggaggaccccccaaagtttaatacattttcaataccaccaggaatggatttttggtccctttctgcaggtctgggttgccagacgttttatttctggggaggagggctctgggctgaggagctcagtgggtgggaggagggaatgggactgttgctgatcctcaaaggcctctgtaggatggagggaggggaccttactcccttccccaccccagatgcaggagtcacccagcttccttctctgcgctgtttccttcacaaattagacattggtttgggaaacaatgtagcctcgttaaacatttaatgaaataaacaaataatcacactgtg

SEQ ID NO: 6815 - DNA, 1613 bp, Homo sapiens
ggagtgaccttgtattaaataactgcctgctgctcagagatgatctttattctgtcattggggtatgggatagaagcccttgcttatttttaatctgatgaatctgtatagagcccatcgttgagttaccaagacaatacctgctacagtattttggggagcaaactaaagaccagaacttaaattttcactttagacattggatgaatagtatgaagacagtttttcagttgatttggataaaactattttagtgcattgacaagtgtaacttcaacttcatatagaaccatttttctttctgcttttattgaaactgagtatttttctttggctaatgtggattttttatggggatatctgttaattttcaggttttgaaagacattaacctcggaagttgtttttaagaattattctcataattcttattctcataatttctgtaatccacctcaagcttcatagttatttggcattgaaataacacccagagcatgatagaaatgttgttactcttcctctctcaaggagaaagtaattttcctgcaatacttaataattggcaccgttgctttctaaagactccatggtgcattcaagagtatccaacttcaagggaatctccgcatttcaatgaaaggaggaagagtgtgctgataaacctaccagcacctattgagcaatgtctattatagtaattttgcatacatttttatttaagggaaaaaatataggtattgtgaaatattttgctaatcttatagaaaaggaaaaaatcccgttatttaaagggaaaagtaaatttaacagttgccttttttcttaatgtcagggcagatcttattttacagtacagtgggggaaatagaaacatgtgaaaggcaaaaggcaggctcctaaattaatgtcagtgaagttcagggtgggcaaatgagtgtgtgtgaggtataggaaatgctgatgacttctttaatgcttgaagtccgttcacaggtatctagccctagaatgcctagaacaggaagaggcagctggtgttctgcaaaacttggacaggggcaaagttgctgaaaaagttttggtttaacccgaagataagtggaaaagagcttgtccatgaacccaggttctcactctgtttacagaagtgtgttgagtacagttggtgaaggaagaggtaacaaaaaatgctaaatattttatccatgaaaatgacttccagaaaaggaagaatatgaaccccagaccgaaggggaaaagatagttaatagtattatctaacctggttggtatttgtaatgaatggtgattttaattagtcattagccataatgatgtttatttacagtataactcctgaatgctacttaaataaaccaggattcaaactgcaagccagccaggccgttcattatttaaaacgttttaatcggggcttccgggtagaaggtggagcggcagggtgtaattgggttgatgggtgggacctgtcttgaccatcggagttttataatcgagggccaggagggcccgggttgctctcctggttatgtatgtacttgtacataaccacctaaagaatggtgaaataaatgttcttggaaattcct

SEQ ID NO: 6816 - DNA, 1769 bp, Homo sapiens
cctgtctgctgtccctgtactccaggcacctgcaaccctggtctatatctcccacaactccctggtgactaaggaaggactacagaggctttgccaaaggagaagccctgcctcatcacacccttacctcccaccccctcagcacaggaagcttgctttgaagttaacttcatacacacacactcatatcctccagtttcccccagattctttcaggggctgccatcagattctgcccttggttagttttttgttttttttttggtagagacagagtctcactgttggtccaggttggttttgaactcctgggctcaagcgatcctcccttcttggcctcccaaagcacttggattacagatgtgagcctgtgcctggctggtctttcttgaggaaaatctgacctggcattttcttgaggcaccttagattccctggagtggcacctggcctttctgtactgagcacctggtcagtctgaagggggcatttcaccccagctccatcagggctggcagtcccgtctgaatgtggagagagctgtagttttatctggcttttaaaacatggacctgccggctgggcgcagtggcttacacctgtaatcccagtactttgggaggccgaagtgggtggatcacttgagggcaggagttcgtgaccagcctggtcaacatggtgaaaccttgtctctactaaaaatacaaaaattagctgggtgtggtggcatgcgcctgtaatcccagctactcgggaggctgaggcagcagaatcacttgaaaccggaaggcagaggttgcagtgagccaagatcgtgcaactgcactccagcctgggcaaaagagcaaaactttgtctcaaaaaaagactcttttcaagttttctaccctctgataagaaaatttggggatatccagtgccatctccaaggactttcaggggatcatagatgcttttctgtgcctatctgctttgaccatgtgaaaaagtgatagtctgcttctctctggtaacttgtctgccacccatctgatagtaagattagccaaggccctttagccctctgtcctttctggttattgactgtccctggttcctaggaagacagagttgttctccagctaaagcgtctcctctctataaagtagttttactattcttttcatagcaggagccaaaatagtagaggaggggagagaggcacctggcactctgcgggcctgcacaggaaaaacagagccaaagacagaatcattgtataagatatttattaaaggagagcctctaagtccacatcctgagcccatgtgagtggacacaggtaggtaaaacggtgggtccagctgctgtcatctgaaagccttcaggagatgaagctatcagtatccagctgaaggctgctgggttctgttccaccaccaccttagcaccagggccctctctggtcccagaggcctcatctctccttgggctttgacaatgtggagcagcacatcagcagggactggtctagaccctccctttcctgtcacttagctggagctaagctccagataacccctaggttcccactggctcctagtagaaatagtttctgtactttagcagaacaggaaggatatttgttcattaaaggtggcttggtcttacagctgggtgcagtggtatatacctgtagtcccagctactcaggaagctgaggtgagaggatctctagagcccaggaattcaagtttaacatgagcagcaacattagcaagaccccgttt

SEQ ID NO: 6817 - DNA, 797 bp, Homo sapiens
cccaagccccccctccctttcctcccacctagtaggggtctgcacacttggacagcagggtgggaccagcctgtgacctctcagtcagactggggtgcaggacctgtccacctcaatgaaggagagaggagcatggggtgtcccgttttggtgccacactggggtggggatgggagatgggatgtctttgcatatctctctcatcctctctggagaagtgggcgctgcaggactgtggagacgtaaatgtaaactgtgactctacctcgaccctgtttcttatttttcttctctggctaaaaatttttaattggatgtgtttgggggcggggggatggaagtgacttggagaatgtgtttgggatgaaataactatctccccttcctctgtcccccaactggggagtctccccaggctgcttttctaggaataccagtcacatagtttttatttttgtgtctgtgaaagtgccaagaacccctccccacatttgtagatccatgaccctttttataagctgtgtgtgtcctctgtattattgttattaactattttttagcatttgcctgtaagttattaaagactgataactgtagctcttaccttggtctggggcattttcctctccttatcttgccccagagacaattcaagatttctatatggggttgtggcgcagggggagggagatttatcttgaagctgaatttgcaaagcaagcacttataaaaattagattgtgtgttacgggatggcttgtgaaaattataggggggagtggaaaacccctcaagct

SEQ ID NO: 6818 - DNA, 465 bp, Homo sapiens
aaggcaagattgttcctttgcctctccagcagcagtagccagggcttggacttatcgatgacaggctggtcctgaggatacagctgtcccgtgactgactgtcttaactgagcattttctcaactcgactctcatttcttccctgctggtaaaatagaaacagggatttaaacctggctttggcaagagcctgcagcctccatcaccccaagtccttgggcccagttgggagctcatatctaacacagagacacattgcatcaacttcaagaaagggacaatttgtgcagctccaggatgggaaggtggagtgggtgagcatcttgtgcagggacatggtgagtgccctgatgccccagctagcaggagctactgtgctcatctaaagtgtttgccccacttcccaccccgtctccagcccctgtactttggcttgacctcgtggaaatatttattttcttaagg

SEQ ID NO: 6819 - DNA, 1715 bp, Homo sapiens
ggcaggaggccctcctggccaggccagcagtgaagcagtatggctggctggatcagcaccgattcccgaaagctttccacctcagcctcagagtccagctgcccggactccagggctctccccaccctccccaggctctcctcttgcatgttccagcctgacctagaagcgtttgtcagccctggagcccagagcggtggccttgctcttccggctggagactgggacatccctgataggttcacatccctgggcagagtaccaggctgctgaccctcagcagggccagacaaggctcagtggatctggtctgagtttcaatctgccaggaactcctgggcctcatgcccagtgtcggaccctgccttcctcccactccagaccccaccttgtcttccctccctggcgtcctcagacttagtcccacggtctcctgcatcagctggtgatgaagaggagcatgctggggtgagactgggattctggcttctctttgaaccacctgcatcccagcccttcaggaagcctgtgaaaaacgtgattcctgggccccaccaagacccaccaaaaccatctctggggcttggtgcaggactctgaatttctaacaatgcccagtgactgtcgcacttgagtttgagggccagtgggcctgatgaacgctcagacccctccagcttagagtctgcatttgggctgtgacgtctcccacctgccccaataagatctgctctgtctgcgacaccaagatccagctggggactcccctgaggcctgcctaagtccaggccttggtcaggtcaggtgcacattgcagggataagcccaggaccggcagagagtggttgcctttccatttgccctccctggccatgccttcttgcctttggaaaaatgatgaagaaaaccttggctccttccttgtctggaaagggttacttgcctatgggttctggtggctagagagaaaagtagaaaaccagagtgcacgtaggtgtctaacacagaggagagtaggaacagggcggatacctgaaggtgactccgagtccagccccctggagaaggggtcgggggtgggggtaaagtagcacaactactattttttttctttttccattattattgttttttaagacagaatctcgtgctgctgcccaggctggagtgcagtggcacgatctgcaaactccgcctcctgggttcaagtgattcttctgcctcagcctcccgagtagctgggattacaggcacgcaccaccacacctggctaatttttgtacttttagtagagatggggtttcaccatgttggccaggctggtcttgaactcctgacctcaaatgagcctcctgcttcagtctcccaaattgccgggattacaggcatgagccactgtgtctggccctatttcctttaaaaagtgaaattaagagttgttcagtatgcaaaacttggaaagatggaggagaaaaagaaaaggaagaaaaaaatgtcacccatagtctcaccagagactatcattatttcgttttgttgtacttccttccactcttttcttcttcacataatttgccggtgttctttttacagagcaattatcttgtatatacaactttgtatcctgccttttccaccttatcgttccatcactttattccagcacttctctgtgttttacagacctttttataaataaaatgttcatcagctgc

SEQ ID NO: 6820 - DNA, 466 bp, Homo sapiens
ccctcaccatggacactacaggccctggaatggccagggtggaccaaaagccatgccagctgggcatgaccccaggcagccagccacaggctgaagggggcttgttggctgagtgatctgcagaggagaaagcagccccagctctgcccagaggaggcgctgaagtgggacaagcacaggaaagaaggggaccagtctaggaccccaactcgactcactctaaagctacaaccaaatggccttcgattttcaacctggggattaggggaggggagggtgccttccagggctctactcaggactaaccctaagggtgagctagtttctgtgcctctgtgctatgttttgaggctcccttacccaaaataatacccctgcctgcgtgatattctaccattcattttaattcctttgggtcttgcagtttttcaggaggccttgattaaaatgcaaatacttgtctgag

SEQ ID NO: 6821 - DNA, 300 bp, Homo sapiens
cttcttgtgtgcctccctttcctttccctcccacaaagccaacactctgtgaccaccacactccaggaggcagccccatccccttccagcccctaagtaggccctcccctccctaaatctgcttccgcaccacctggtcttagccccaaagatgggccttctctctcccagataagttggtcctccctctgcctttcctctcaagcccccaaagagcaaaggcaacagcaagaccagcgggttcttgcaacactgtgaggggcagccagggcggccccaataaagcccttgaatactttg

SEQ ID NO: 6822 - DNA, 544 bp, Homo sapiens
gactgccccaacgcaggacaacccaccatgagcaggcagctctgggcatgtgtctggtcacatccaagggggagaagaaggccagcatgattggagagtggacacagccggggggcttctgtggttgctcccaccctgggtgttttccctgagagccccctcatctctgcgctgccctcactttgggccttcctttgccgttggcaccagaatccggccggagactggctctccagccaacaagaaaggcctgtcaccctcgccttgggtgtccctctcctgcctcagcttaattttagaggatattgggcctggttttcttgtcccttcataccctagtccctggacagctgaggagatgaaaggagccacaccacaacaatggcggcctgcccctccacacaggggagaagcacgctcaggcttcctctgctttgtctcttcagacctgtggttgctctgctcatccatgcccaaggttcccaggtgcaggacagaggtgtggcctattgtaccttgttctgaaataaagcatctcctgctt

SEQ ID NO: 6823 - DNA, 693 bp, Homo sapiens
accccatgtcaggctgtcccatggtgtgttctgcccctcccacctgtccccgcctccaactgcggaggaccagttcctggccctcttttcttttctttttgagacctagtctcactctgttgcccaggctggagtgcagtggcgctatctcggctcactgcaacttctaccacctaggttcaagcgattcttgtgccccaaacttccgagtagctgggactacaggcatgagtcaccacacctggctgattttgtatttttagtagagacagggtctcaccatgttggccaggctggtctcacactgacctcaggtgatccacccgccttggcctcccaaagtgttgggattacaggcatgagccactgcgcctggttgcctgcccctcttttctgtactccacgtgctgtcctggtccacctcactcctccatgggcttcttgagacacctgctgacctctagccggacctgagcttcagaccctctctccagcaggaagggctgcagactcggcctgttcccagactcggccttcacctcccttctcctcctgtgtttaagtggatggcccctctatccatccaggtcccatgccaagaaccagtgattctagtggcccaccacctccctctcctgccacccttatacctgttcagcctcctaaagagggacaaactctgtctctgcgtgc

SEQ ID NO: 6824 - DNA, 866 bp, Homo sapiens
ggacataggaagaaaatgaaaggcatggtctttctcctttacggcctccccacttttcctggccagagctgggcccaagggccggggagggaggggtggaaaggatgtgatggaaatctcctccataggacacaggaggcaagtatgcggcctccccttctcatccacaggagtacagatgtccctcccgtgcgagcacaactcaggtagaaatgaggatgtcatcttccttcacttttagggtcctctgaaggagttcaaagctgctggccaagctcagtggggagcctgggctctgagattccctcccacctgtggttctgactcttcccagtgtcctgcatgtctgcccccagcacccagggctgcctgcaagggcagctcagcatggccccagcacaactccgtagggagcctggagtatccttccatttctcagccaaatactcatcttttgagactgaaatcacactggcgggaatgaagattgtgccagccttctcttatgggcacctagccgccttcaccttcttcctctaccccttagcaggaatagggtgtcctcccttctttcaaagcactttgcttgcattttattttatttttttaagagtccttcatagagctcagtcaggaaggggatggggcaccaagccaagcccccagcattgggagcggccaggccacagctgctgctcccgtagtcctcaggctgtaagcaagagacagcactggcccttggccagcgtcctaccctgcccaactccaaggactgggtatggattgctgggccctaggctcttgcttctggggctattggagggtcagtgtctgtgactgaataaagttccattttgtggtcctgc

SEQ ID NO: 6825 - DNA, 365 bp, Homo sapiens
tggctcccttcgagcgaatgcccaggacttcaacgcatgcactttgtgttgacctcatccctggcttcaccttggtttttcccatcctagttctccctatgcctgaatatcctgtcttttcttttttataagcaaccacactgtattggatgaccctagatcttctttgagacaaggcaggctgtggccatgtagccccatcacactgtgtttgtgattgtctgtgtgtctgtctcccccaccagactgtgagctccatgagggcagggaccgtgtcttgtccgttctctgtatccccagtgcttggaacagagcgagtgctcactgtgtatttaataaatggacaaagagagaggatgaccctc

SEQ ID NO: 6826 - DNA, 304 bp, Homo sapiens
gggacagtactgaagactctgcagccctcgggaccccactcggagggtgccctctgctcaggcctccctagcacctccccctaaccaaattctccctggaccccattctgagctccccatcaccatgggaggtggggcctcaatctaaggccttccctgtcagaagggggttgtggcaaaagccacattacaagctgccatcccctccccgtttcagtggaccctgtggccaggtgcttttccctatccacaggggtgtttgtgtgtgtgcgcgtgtgcgtttcaataaagtttgtacactttc

SEQ ID NO: 6827 - DNA, 1684 bp, Homo sapiens
cagtggatggattttttgttaaattttttttaagtttcaggccaggcgtggtggctcactcctgtaatcccaccactttgggaggccgaggcgggcagatcacctgaagtcaggagttcgagaccagcctggccattatggtgaaaccccgtctctactaaaaatacaaaaattagctgggggtggtggcatgcgcctgtagtcccagctacttgggaggctgaggcaggagaatcatttaaacccaggaggcagaggttgcagtgagtgaagatcacgccactgcactccagcctgagtgacagagcgagactctatctcaataaataaataaataaaactctcatcaagttttagagctttgaagggtttttaaatcacatttacatctaactctctgaaatatatttttttcatgtttggtcctagaactataatatttaggaaaggggctgggtgcagtggctcacacctgtaataccagcactttgggaagtggaggtgggagaatcacttgagcccaggagtttgagaccatcctgggcaacatagggagatcctgtctctactaaaaattaaaaattagctggacatggtgtcacatgcttatgctactcaggaggctgaggtgggaagatagcttgagcctgggatgtcagggctacagtgagccataaccacaccattgcattccaacctggggaacagagcaagatcttgtctcaaaaaaaaaaaaaaaagaaaaaaaaagaaaaaggaacgggaaaatagtcccactcaatcattttaaaagtaattttcgtaatttaaatggttcctcttgaagctcaaattggcagtggagctaatcctcaactgaaagaattttttaaaaagcaaaaatcattttgagtattatttatggagaaagtctcatttctttgtcacatttgttttccagcttgatgagcaagctgtgcttacataagatggtaacttaatagggaattactatctttccttttttttttttttttttttgaggcgggtctcactttgtcacccaggctagagtgcagtggcatgatctatgctcactgtagccttgaccttctgggttcaagagatcctcctgcctaagcccccaaatagctgggactacagatgcacgctaccacacatatctaatttttgtattttttatagagacagggtttcgccatgttgcacaggttggtctcaaactcctgagctcaagcaatccacctgcctcagcctaccaaagtgctgggtgtgagccaccaccagtcaacaaaatacttttgttttggcgaagtaggatatgacttcaagtcaaatgttgtaaagaatcctcgttaagtcattttgtaatttaatgattattcctattctttataatttcagaattttctaagcaacttagggtaggtaaacttttccttttttgaccttcctctcttaaaaacttagttttccaaataaaatttgataaagattcttcctgggaaaaaaaaatgcagcaaaacggattacctcttttattgaataaaaccattttaggaattagaaaaatcaacatgggtcaaatttgtaaatctgtacaatggaatttatccatggtacattcagagcctaacatatgaggtacagccagatgttaataaaaacttcaatcttttattat

SEQ ID NO: 6828 - DNA, 153 bp, Homo sapiens
gggacgcccccaggccggaaccgcgcggcgctttcctccgcccggggtggggcccctacagactccgtattttatttttttaaataaaaaacgatcgaaaccatttcacttttaggttgctttttaaaagagaactctctgcccaacaccccc

SEQ ID NO: 6829 - DNA, 1817 bp, Homo sapiens
ggagggatttcactcttcttcccaggttcttctgaagcacccacacaaaatgcacactctgcgatatgtagtattgtcattatttccttcttctacatcaggtagtggaggctcagacaagttatttagccattcacctagagagtaagtgttgaagccagagccacctccaactctggagcctaccaagagaactgtggggatgtgggatgtggcgggacagggttgctgggtacagaagccagacttcttttacaagtaactctaggctgggtgtggtggctcacgcctataatcccagcactttgggaggctgaggtgggtggaccacttgaggccaggagttcaagaccagcttggccaacatggcgaaaccccatctctaccgaaaaattagcagggtgtggtggcacgcacctgtagtccccgctacgcaggtggctgaagcagaagaatcacttgaacctgagaggtggaggttgcagtgagccgagattgtgccactgcactccagcctgggcgatagagctagactctgtctcaaaaaaaaaacaaaaaacaagtaactctttattccttgtgtgaaaatccagggctgttaaagtttagtggcaggaggaggagttaaggtgatcttgtgagaagagtcatgctggtgacatcaggaggggtacatggctgtgatgggggaggtggtgctgctggactgagccagtggagggggaagatctgcagctagcatagtttcatgctcagtgaggatgatggtcaccgtgtttgttgtgtacttactgtgctgagagctttcctcgcagaggccctcccaacgaacagctctctcagaagcatctgttccttcctggtcacgaggtggccagagcacaatgtataggcagaccagtggtccttcctctcccaatgtggccatgtggaggacaggatgtcttcctgggggttgggatggactctctgggcactgtactctctctcctacctgcctccctgcagtccctcccatggatgactcaggcctcccagaagcaatttctatctgtccccttcactttcaggccttggggagtctctgctcctacctgactctgtgttgtaatttcaggggagcatcagtggaggaggcagtgggggcagcagcagcctcctgaccaatgcccgctcttggggagtgaggattctgcacgtggatggtaccctttctgtgctgggctcctgtggagggagaattggtgactttgaccaggagtgtcagcttttagaaggatcatggtcatgtgagcttctggtcaccggaagccagaaatactcagctgccatgttgatccacaaaggtgggaggatgtggggaagggggaaagcggtgaggacgcagagtgcaggctgtggcctcggcatcccgcaggaggtccctagaacatgccgtttcatgtcacctgctacagctctcccccagctagtatgatgatcctgttttacaaatgcagaaatgatcttaatattcatgaccactggccaggcgaggtggctcacacctgtaatcccagcactttgggaggccaaggcgggtggatcacaaggtcaagagttcgagaccagcctgaccaacgtggtgaaaccccgtctctactaaaaatagaagcattagccgagcctggtggtgcgtgcctgtaatcccagctactcaggaggctgaggcaggagaatcacttgaacccaggaggcagaggttgcagtcagccaagatcatgctactgcactccagcctgggtgacagagcgagactccgtctcaaaaaaaaaaaa

SEQ ID NO: 6830 - DNA, 1010 bp, Homo sapiens
aggtgaacccagaacacctgagacttgacccaggatggatgggtgctgcttgatgtgaatgaggtcccgcagtggctccttggcgtgagcactgctcagactcctttccactccagccccctttccacatcgcaccagatgacttttacccagacccagtgggcattgccttatcttgcagtcagtcccttttcaacatgttgccgtttctttctgaagaggtgtcctccctccacaagtcacactgtctgtccctggccctccagcccacctcgccaaccactcttgttggtttccttctcagacttgccacctttcccctctgccccaaaatgccatgctcctctcctggaaaacacttgagttgattcagtaaatcgacttcaaatacttgaaggctcccaccttctgttctctggctccttcctgcggtctatacctaccgcctcctcttcacctccttcccttccacacttccttcctgggtagctctgcctgaagcattccactaagatcatctattccaaggtcatggacaggctactggtgaccaaagttggttccttttctcctttctttcctccttgaagcctggctcccttggtcgcagcagcccctcagtggcctggttctcctgtccccctgcccttcctcaccattgcccattccctcgttcgttcattcagcacaggccttgccgtctgccctgagtcagctccgagacacctgaagagccctccagccctaactactttactcagactaggtccccaggcctttgttcttgcctcttctcgctgagcctttcacttctcggcagatgtgaccgattggtagctccaccccaactcccttctgctgggtggaatgcaggagctagctgcctccaactcactgtgacctcagaaaaatgcctttattactcgggcctcagtttcctcgtctttaagtaaggggcttggatgagatgatttcaggaccctttccaataataaaatactgtgactgcc

SEQ ID NO: 6831 - DNA, 2090 bp, Homo sapiens
gtgccaccctcctccctccaagcctggcacccaccgtctcggccctgaaccacgaggctgcccccatccagccacggagggaggcaccatgcaaatgtcttccaggtccaaacccttcaactcctggctccgcaggggtttgggtgggggctgtggccctgcccttggcaccaccagggtggaccaggcctggagggcacttcctccacagtcccccacccacctcctgcggctcagccttgcacacccactgccccgtgtgaatgtagcttccacctcatggattgccacagctcaactcgggggcgcctggagggatgcccccaggcagccaccagtggacctagcctggatggcccctccttgcaaccaggcagctgagaccagggtcttacctctctgggacctagggggacggggctgacatctacattttttaaaactgaatcttaatcgatgaatgtaaactcgggggtgctggggccagggcagatgtggggatgttttgacatttacaggagggcccggagaaactgaggtatggccatgccctagaccctccccaaggatgaccacacccgaagtcctgtcactgagcacagtcaggggctgggcatcccagcttgcccccgcttagccccgctgagcttggaggaagtatgagtgctgattcaaaccaaagctgcctgtgccatgcccaaggcctaggttatgggtacggcaaccacatgtcccagatcgtctccaattcgaaaacaaccgtcctgctgtccctgtcaggacacatggattttggcagggcggggggggttctagaaaatatagttcctataataaaatggcaccttccccctttcaagaagggtgattctggggccgactcagggtttaggtgccccctggtgtggcctagatgtccccacctgggccatctttctggggaggactctcccaggtagggaaggccagaggtggcccagtgcctggagggttagggtctctgcctgggatatgcaagaggaagtaggaaagggaggtctcatggatgatcctaggctgctagaagtccttaaggccccatctagtccattccactccctacccccattccagagccgagtagtaagtttacagatgtttcccccattacgtacccccacccatccctgctgcagcgagcctgagagccaggtagagccaggcacagctcctcagtcttctcacacagtcctgccggtggccttccctcatgacccttgcttgggagggtggagcactggctccttgaccctaaaaggtagctggcaggggcaagatgggggccagctacctaatggatgaaagccacaagtgaatacagttcttgtcaccagggttgccctgccctcactcggcagggagttctgacaccccagggcccgtgagctacctgcttgagcccctgtttctggggcaccttcgaggaggcgttgtggagggcatcgccccctgtttattcacaacaccctcaggggcaaacaggcctgggacccgctgacaccattttgggtagctggatgcacccgacagcagtggggtccacacactgagctccagctggcactgcccactcaagggctgagtggaggggcccctccggccagctctgctccaccagccctgcaagctgatgcagggcgggggaagggctgggtgttgcactattgctgcgctgccttaaggcatctgtcctctggtggtgcacccgtgcacacaggtacagtgcatctgggcacagcttttggatccacacctctgcacaagtgtgaatacctctgcacatatgggcgtatctgtgtgtgctcgtgtatatggggtggggaacatgagacttcctgtgaccagtccaccctggctcccagctgtctgtatcctcctgccccgccctggcgagtgcctaccctggcagaacccagggaggagtggaggctgcctctgcctgggcctccacacagcatcctgtacatacgccacctgggctgggggtggggaggcagggccaggagcatcgattaaagatcacatcctggggcttccagggagctcacacc

SEQ ID NO: 6832 - DNA, 76 bp, Homo sapiens
gactcctataggagccggggctgtccaactcccctaactcaatccctggtacattcctaataaagcagttttgagg

SEQ ID NO: 6833 - DNA, 442 bp, Homo sapiens
tgcggcaagctaccctcagaggtcccagtggtcactggaggcagttttttggttgttgtcttgggggttctgcaggaccataataagaaacccacacctggttcccttctcaacttggaattttcagagcaaaaacaggaatcaagtcttccccacttctccagtccctcagtgtctcgctgttttgaactgtgtgtatccatggacagtcaagagctcaggaagttgagagcggttttgtttcccacccttagagtctgccaagcctctagcccactggccttgagagatgagtgtgtgcccaaccaaatgctggctataccagttacagcctccactcataaaagggaaaaagcaaaatctttatggtaaacaaacactgatctccacagctcttaacaagaatgtttatagccccaaaccaatgaatggacatgtaatc

SEQ ID NO: 6834 - DNA, 3373 bp, Homo sapiens
ccagtcaccagtgcgattctggataaagccactgaaaattcgaaccaggaaatggaaccccaccactgttggtccaattttcacacacgtgagaatccctggcaaagggagcagaactgaaccggctttaccaaaccgccagcgaacttgacaattgtattgcgatggcgtgggctgcgtgacgtcacctccggtcgtgtctctggtctccgtgttttccagttaattacatcctcatgcagccgtgatcaagggaatgtaactgctgaaaactagctcgtgattggcatataatggagttaacgggtgaataataaaagtatatatatatattatatatatataaatattttaaatatctttcatgttccaaatgtacaaggatgtttggtctttaatgaaaagctgaatccagatcattcctcagaatgaggacccgaggacagtggcagacagacgcgttggcacagttcatggtttcctccagaggagacattggcttatcatggggaaaaagaggatctggagaacctcatccagctccccttctgaatcagctgggatgactggctttgagaaggaagggaagatggaacaggctcagatctcatgggatagcacgtggagctcttggctggggctgaccctgggcagggactttcctgcagggccagacctgcctgcattctgagacaaagcaatggacggtccgcagaagcagacctcattgattgagtcctttcttccatccccttggcctgctccctgtaggaagtcatcctgccaactgatttaaaagggctctttagccagttgttgccaaccttatagggatgagtcccctgtgagattttgcttttccactgcctgggatgatgcagtttgaagaggcccttggacctccttgtaacatcagggacctttggagaccattatcagtgtaagccctgcttagctcatcttagagcaaagagccagcaccctgatgtccctggggtggctaggcaggagtggcgtggggccaatacccagaccccttcagccaccagcccctggcctgtgccttccaacccattagccatttcttgttgtgcccctttccaagatacagcctgcaagtggtagcaagaagtgattagaggcagatctggacttggcaacagaagtggtttcccatctccattgtctgagtctgattttcgctgatgctgttttgtggatttttgtggtagtgatggttgtcagtgctgccagtttcccaaaacgtaatcaagcctctggtcacatggctgtcgatgtaggcattctggagtggtgttcagccaagtgaccgggcaaaattgggctgtgaaattgtacttccaggcttggatgtaatttttgctctagagagaagcaagtggtgggaaggaggtagcatgacgtgtggtgtgcgggtttccttgctgccgtcacctctccgctcatacaggaatgaagccttagccaggaggccaggctcagccctgtgccactcaccgaagccactttctacaggccagcaggggcttgttgcaggctgtgggttttggtgtggtttgtcagaggctaattctgcagagtttccaaaaccagaagacatcgtatgcttgggatgggggccgtgccacccgtgggaatgctgcccgctctgcagactgctgctagagccagcaactccactaaggtggattttcatcaggggcctgcagggccctcccttttcccattgttcctgcgctgcaaattgcaggccccagcaatcgtgactgacgtttgctccttgactccaagaaactgagaccaaagaagctgctgttcttagcaagatgcgcactgcattccacaggtgggaggagtcggagaggcaggggcttgctttgcagccccacagacaacagttgcacagtgcctcaagccccagagtggctcaccctgtccagacctttgaggatatcaaaggacaaagtgcccaagtctttcctaccttgggggaacctggaacttggaaaggctccctgtcctagtcttgatctgttctgggccaggtcccagcttgagctgcctctgagatttgggctgtgcggatctctggagtgagctctgtttcggttgacccaggtcatggaatggaaacggtgaggccccagtggctgttctggaagaaacagatctcctggcaaaggccccagcatctccctcactgaaaccaggtggccggctcctcggactctgctttatgttgcggtgagaactctgcccaggtgtgcagggtttggcttgtgggctgcttgctgctcatctgatttttgtcccagtagtccctgcgttcttcattcaaccccttctgggacttcagctcagagagcaccatcccgggggtcagggcctccccacaggagccctgcagtgtggtagcgccatggctgtctcaaaccaagcaaaggaaggaccctgaggccttcacgctaaccgtcctcgagcaactgctgttggaaggcctccctgggcctggcccccaccctctgccacccagtcctcccagctgccatgtttcaaagacgacctttacctcctgcctttggattgactctgcatttgaccacggactccagtctgtgtgtagggagagagctgagtaggaggcctccactccggatcgaggcctgtatagggctcgtttccccacacatgcctatttctgaagaggcttctgtcttatttgaaggccagcccacacccagctactttaacaccaggtttatggaaaatgtcaggccttccccacaactcctgtctaactgctgtcgcccccctacttgctggctctcagaagcctaggggagtccctgtggtcctgaattctttccccaaagacgaccagcatttaaccaacctaagggcccaaaggccttggacaactgcatggagctgcactctaggagaaggaggggaaccagatgttagatcaggggagggagcaggagtgtccctcccgtcagtgcctacccacctgtgaggcagccttctgatggcctggcccaccttccccagaaccaggggaggcctgaggcttcagttttactctgctgcaaaatgaaggcgggcctgcaagccgactacacctacggaggctgttgaggacaatttcattccattaaattaaaaaatactgactggctggcaggcaggtgccatgtctgggaacagggacgggggagcttcacctttttgtcttggcttttctttgggctgtgggggggcatccatttccagggtcggggaggaaataccaaatgcattgttgttctgctcaatacatctcacttgtttctaataaagaaagcagctgaac

SEQ ID NO: 6835 - DNA, 603 bp, Homo sapiens
ctgtcagtggaggggtctctgcagccaactgagactatcttgctgtgccctgagccttcctagggtttagaagaacagcattcaaaattccccgtcctgtcagtgtttgccttcgcacctcctcccctaaagcagcgcggggggcaaataagaccccacccctccctgcagcttcacagggacgcttccttccctccccgcaaccaccccaggctcccctgggaggctgcagttgtggtacacgtccccggtgctgggttggccgtgactcgggggcggggcgatcgggtctcagcccctgccttccccagtctctgggtcacccgaattttcccacccctgcttctccccgaggaggttgagctcttgagcaagttgggacttgggccggggcctggaagaatgattggctgggaggccgcgggagggaggccaggaggcccggaccagttgggaggagtgagcaggccccgggggagggggatgagcgcagtttgctcgctttcctcccctgccggccccctccgcccccacacacactcgggacgtcttcattgaagattcacttacaaaggaatgtttcactaaataaaagaaaaccag

SEQ ID NO: 6836 - DNA, 1830 bp, Homo sapiens
actgaaacttttttgggggagggggcaaaggggactttttacagtgatggaatgtaacattatatacatgtgtatataagacagtggacctttttatgacacataatcagaagagaaatccccctggctttggtttcgtaaatttagctatatgtagcttgcgtgctttctcctgttcttttaattatgtgaaactgaagagttgcttttcttgttttcctttttagaagtttttttccttaatgtgaaagtaatttgaccaagttataatgcatttttgtttttaacaaatcccctccttaaacggagctataaggtggccaaatctgagaacaattaaattcattttagttataataaatttaatatttgtaaatgtaacatagtttcagtgtgatttctagagctaattcaaaatagtattgatatattttatgtgactgcatttttggggaggggtaccgaaatcgttaaatttgtcagtttgcaaaaatatcaatctttaatgggagaattttcaatttgccaattttttccttgaatgggtttaagtatgctacaatatacagttcaggcaaaatttaagatgtaattatcttcaatacttaagtgtgcttgctttctagtgccttggttttctttcttgatgctggaaaaataaacaaaccggtattgagtgtttaggcgagtggaaagtggctacaatccaaaattttaaatttaactctgcctcggccattcaaaagtctaataacaaaaaatgtaaacctaatttggcagtttgttaggttagacaactgacagcctcatttcattcctacaagttggttttcagtaatctcttccttccccccagtaaggctggaagaggctcttggcaaacttcttagtgcaagcaatggttagattaatttgtgaggcagctctttaagacgttcagaggtaagaaatactggatttataaagcaaatggctgtttgggggattccaaggatttacctaattgtccaattctacgtgctctctataccaaaacaaaaaaaaaaagctatccacctttccatgtgggtcaaactaaaattagaaatgtcccctcactgcagatcaaatgtaaagcttccagttaaggagctaaatgaggtcctcagctgaatgaggaaccctgtacatccccttgcacagccctattctaaatcgcttaaactatgctgatagctgcttaggttcttgagtagttctgctcttaaacgtagggaggccctgagaactaaattttgccccaaaataaaaacagaaattatgagattgcctcctgtcattttggttaacccagtccttcacctgccctgtgtcagtgtcttctgagggcaattgcgttgctcaaatcactagcacagaggttccttaatttggggccttagaaaccattgtgggccttggggtccatgaaccccatgaaattatttgtagacttgtatgtacatttttctggggagaaggttcaagagattcataagattgtcaaactccttgaaggttcagaacctctgcagggaagggggaagaaaaccctcccattaggaagcatgcttttgcagttaaatggcgatggtggaggtgatagggacttcaagagtaaaatgcaccttgtattgcataagaagcatacacaaatcaataaatcaagggagattataccagtaggactgaatcagggccttcaaagctggactgagttggtcctgttctggcacatatggtccactggagacaatgtatgattgagtttttctttggtctaaaaattatattaaacatttattttgaaat

SEQ ID NO: 6837 - DNA, 230 bp, Homo sapiens
gggtgcctcccagcctggtggacccaaggagaaggtcccatttcgtgcacactcaggccagctgggtctcaaggaggcaggtggcagatgaaaaccaccgtcaacaccctgtgcgccctgagaacagctaaatcggttcagactcccacctcaccgtttccatagttggctcttttgtgtcatcttaccctttacagagaaattaaatggccttggtgggaccaaatggg

SEQ ID NO: 6838 - DNA, 448 bp, Homo sapiens
atctgcggaaccagccctacatccgcgcagacacaggccgccgcagtgcccgtcggcgtcccccgggccccccactgcaggtcacctccgacctctcgctgtagccgctatttctgcaggtggattctgcaggggtgtggggccgtggacaggctgaggctcaaggaaggtggtcctcagctcggctggccgggcagcccctcctccgctgtggcccgcctcaaacgggctggtgcatcctcctcttggccacagagggcagcatcgcccgccccttcccccaaatgctgcttgcagcacccaccctaaagccccctccaaatagccatacttagcctcagcaggagcctggcctgtaacttataaagtgcacctcgcccccgcaagccccagccccgaggaccgtccatggaccttatttttatatgagattaataaagatgtttgc

SEQ ID NO: 6839 - DNA, 1062 bp, Homo sapiens
gctggcaggtcatggagcagcccccaaagagctgtggctggggggatgacggccaggctccctgaccaccctgcctgtggaggtgacctgttaggtctcatgcccactcccccaggagcagctggcactgacagcctgggggggccgctctccccctgcagccgtgcaggactctagctcatgagtggaaagtcacctacaggactgggccgggcccagggcctctggcttccctgcccaatcctccctggagaagggacatgggaatgaattgaaatggggcgctggacacctacagcagcacgcatgtccctccaaggctgtcttctcccagagcacaagaaggccagcccactgggccctggggctgccctcggcaaccgtggggaggccatttgctgccctggggcatcatgggcaactcgtgacagcctctgactcaccacgatgacgcctctggacctcggtgatgccttccgacaccactgggaaccaagggccctcactcaggaaccctggagacagaagtcaggtgtcatcatcagacttgcggccacagcactagagtcacccccccaggcctccagaaccttactggcactgtggcactgccaccagcaatgccctgccttgctgccttcaccctgaacatttagtaccctgcaggccaggccagcttcccctcacttaaccaccccataccagtcacctcctgctccttttcctcttttgtgagaagatgggggctggagggggcagagtggcctgtgagcaagagccaggggtgtcccagtcccagcctctggggcagagcttgtagccctggatggcctctggggcaggaccactagctaagcaagccaggagaagacccctgcccaagtggctcttgggacaacgtgctgcttacactccaggtgtggaccggccgcagcccccactgacctgcccatgtccagagggactggacagccagggcagggctttggggggcactagaagatgagggtgtcggctgtgaggcgggtggctggtataaataatatttatcttttcaaccag

SEQ ID NO: 6840 - DNA, 4162 bp, Homo sapiens
tcaggcccctggggcggtcaataattgtggagaggagagaatgagagagtgtggaaaaaaaaagaataatgacccggcccccgccctctgcccccagctgctcctcgcagttcggttaattggttaatcacttaacctgcttttgtcactcggctttggctcgggacttcaaaatcagtgatgggagtaagagcaaatttcatctttccaaattgatgggtgggctagtaataaaatatttaaaaaaaaacattcaaaaacatggccacatccaacatttcctcaggcaattccttttgattcttttttcttccccctccatgtagaagagggagaaggagaggctctgaaagctgcttctgggggatttcaagggactgggggtgccaaccacctctggccctgttgtgggggtgtcacagaggcagtggcagcaacaaaggatttgaaacttggtgtgttcgtggagccacaggcagacgatgtcaaccttgtgtgagtgtgacgggggttggggtggggcgggaggccacgggggaggccgaggcaggggctgggcagaggggagaggaagcacaagaagtgggagtgggagaggaagccacgtgctggagagtagacatccccctccttgccgctgggagagccaaggcctatgccacctgcagcgtctgagcggccgcctgtccttggtggccgggggtgggggcctgctgtgggtcagtgtgccaccctctgcagggcagcctgtgggagaagggacagcgggtaaaaagagaaggcaagctggcaggagggtggcacttcgtggatgacctccttagaaaagactgaccttgatgtcttgagagcgctggcctcttcctccctccctgcagggtagggggcctgagttgaggggcttccctctgctccacagaaaccctgttttattgagttctgaaggttggaactgctgccatgattttggccactttgcagacctgggactttagggctaaccagttctctttgtaaggacttgtgcctcttgggagacgtccacccgtttccaagcctgggccactggcatctctggagtgtgtgggggtctgggaggcaggtcccgagccccctgtccttcccacggccactgcagtcacccctgtctgcgccgctgtgctgttgtctgccgtgagagcccaatcactgcctatacccctcatcacacgtcacaatgtcccgaattcccagcctcaccaccccttctcagtaatgaccctggttggttgcaggaggtacctactccatactgagggtgaaattaagggaaggcaaagtccaggcacaagagtgggaccccagcctctcactctcagttccactcatccaactgggaccctcaccacgaatctcatgatctgattcggttccctgtctcctcctcccgtcacagatgtgagccagggcactgctcagctgtgaccctaggtgtttctgccttgttgacatggagagagccctttcccctgagaaggcctggccccttcctgtgctgagcccacagcagcaggctgggtgtcttggttgtcagtggtggcaccaggatggaagggcaaggcacccagggcaggcccacagtcccgctgtcccccacttgcaccctagcttgtagctgccaacctcccagacagcccagcccgctgctcagctccacatgcatagtatcagccctccacacccgacaaaggggaacacacccccttggaaatggttcttttcccccagtcccagctggaagccatgctgtctgttctgctggagcagctgaacatatacatagatgttgccctgccctccccatctgcaccctgttgagttgtagttggatttgtctgtttatgcttggattcaccagagtgactatgatagtgaaaagaaaaaaaaaaaaaaaaaaggacgcatgtatcttgaaatgcttgtaaagaggtttctaacccaccctcacgaggtgtctctcacccccacactgggactcgtgtggcctgtgtggtgccaccctgctggggcctcccaagttttgaaaggctttcctcagcacctgggacccaacagagaccagcttctagcagctaaggaggccgttcagctgtgacgaaggcctgaagcacaggattaggactgaagcgatgatgtccccttccctacttccccttggggctccctgtgtcagggcacagactaggtcttgtggctggtctggcttgcggcgcgaggatggttctctctggtcatagcccgaagtctcatggcagtcccaaaggaggcttacaactcctgcatcacaagaaaaaggaagccactgccagctggggggatctgcagctcccagaagctccgtgagcctcagccacccctcagactgggttcctctccaagctcgccctctggaggggcagcgcagcctcccaccaagggccctgcgaccacagcagggattgggatgaattgcctgtcctggatctgctctagaggcccaagctgcctgcctgaggaaggatgacttgacaagtcaggagacactgttcccaaagccttgaccagagcacctcagcccgctgaccttgcacaaactccatctgctgccatgagaaaagggaagccgcctttgcaaaacattgctgcctaaagaaactcagcagcctcaggcccaattctgccacttctggtttgggtacagttaaaggcaaccctgagggacttggcagtagaaatccagggcctcccctggggctggcagcttcgtgtgcagctagagctttacctgaaaggaagtctctgggcccagaactctccaccaagagcctccctgccgttcgctgagtcccagcaattctcctaagttgaagggatctgagaaggagaaggaaatgtggggtagatttggtggtggttagagatatgcccccctcattactgccaacagtttcggctgcatttcttcacgcacctcggttcctcttcctgaagttcttgtgccctgctcttcagcaccatgggccttcttatacggaaggctctgggatctcccccttgtgggggcaggctcttggggccagcctaagatcatggtttagggtgatcagtgctggcagataaattgaaaaggcacgctggcttgtgatcttaaatgaggacaatccccccagggctgggcactcctcccctcccctcacttctcccacctgcagagccagtgtccttgggtgggctagataggatatactgtatgccggctccttcaagctgctgactcactttatcaatagttccatttaaattgacttcagtggtgagactgtatcctgtttgctattgcttgttgtgctatggggggaggggggaggaatgtgtaagatagttaacatgggcaaagggagatcttggggtgcagcacttaaactgcctcgtaacccttttcatgatttcaaccacatttgctagagggagggagcagccacggagttagaggcccttggggtttctcttttccactgacaggctttcccaggcagctggctagttcattccctccccagccaggtgcaggcgtaggaatatggacatctggttgctttggcctgctgccctctttcaggggtcctaagcccacaatcatgcctccctaagaccttggcatccttccctctaagccgttggcacctctgtgccacctctcacactggctccagacacacagcctgtgcttttggagctgagatcactcgcttcaccctcctcatctttgttctccaagtaaagccacgaggtcggggcgagggcagaggtgatcacctgcgtgtcccatctacagacctgcggcttcataaaacttctgatttctcttcagctttgaaaagggttaccctgggcactggcctagagcctcacctcctaatagacttagccccatgagtttgccatgttgagcaggactatttctggcacttgcaagtcccatgatttcttcggtaattctgagggtggggggagggacatgaaatcatcttagcttagctttctgtctgtgaatgtctatatagtgtattgtgtgttttaacaaatgatttacactgactgttgctgtaaaagtgaatttggaaataaagttattactctgatt

SEQ ID NO: 6841 - DNA, 69 bp, Homo sapiens
gaggagaacacagcccacctcaggcctcctgcaaaaatacatagaataaacaacaacagttactaaatg

SEQ ID NO: 6842 - DNA, 69 bp, Homo sapiens; identical to SEQ ID NO: 6841

SEQ ID NO: 6843 - DNA, 1637 bp, Homo sapiens
aaatgaactatttgaaacacacagtgaccaagggaagtgaccaaggtgaagatggcctaggatcttcactgtcttactcaagatactggactaagtggaacgttctctaccttcaacatgtgctcgctctgcatgattagtgcaataaaactcccttccttatgcatactgagatagcttagtgtctcgtggaaggtgtcaatttggtttagaatgctgcgcttaccttcccatgcaggctaaagtgattccttcttgctcagtccctctgggtgggaaccatccagtacttgtggacactacacgtttcaacctctctactagcaccatcacccttgaaaactctcagtcagtgtcatgaatgttgcatgacaacagttggccgattagaaggcagactttctacatgcaaatctggcttagtaaatcgaggtgtgggccagagatcctctgacagctgtcctgagctaacactaaaagtcactgggtatttggttaaaggtctcccacaagactggtattctctttgcctgaagaaacaaggcattgaatctctaaaatgctgttctcaatcattgtcagagatgttttcaagttgcagtcagaagatctttcttaatagaaagtcagatgactaccgtgttggttgtgacttccccttaagtataactaatttgctctgtggtaagagatatgctcattattaccacttagaagatgttgttaaaaacatgtgaaagataggtatggaaaaagcatacacccccaaacagaaaggagttattaaagtaatttacaaacctctcagcactaattagtgtccaactccaagtgggtcaattccttagtataatattaaggcttactagtatcactgctttttccttagcttaatgacttacttagaatttatcctttattttaaatgatctgtactatctagtgtctaaaacactattctccagaaaaatcaatcattttctagccctctccctcagtcctttattgtccattccaatacattgaacacatttcctttaccctccacacacttcttccaaaaggaagcacccgttgagtccttttgagggtgatttgtcttacaactgactgacttagcaggaatttaattaggtcatatttggtgatgagacttatggagtgtgcctctctctcccaactgctgcttaaaatgcaaggacaagcaattagaagccatcctaaggtgcttacctcacacgccacccatgaggcttgtggccacagtggcacttgggtgtggctcctctgttatttgtcctcatgtgagaaagcagatcatctccaaatcttgccatttgtatacttttggtggagacttggatgtcatatcttctttgttttgggttttcttccctagcttattttgtggcttttaaagaagtggattgtattgtgagatcctgtgattcctggtggccagtatcctggattcctctaagatcttgcctctttcctcctcatgaaagcagcacacattgtgttaacttatgtctcttgttaaatgagcttaatgtctttgtgttttgtccaaaactgtattgaaaaaatattgtttaatgcaaatgaaggaatgcaataaagagtaaatatacttg

SEQ ID NO: 6844 - DNA, 353 bp, Homo sapiens
gcctactgcccagcaagccagtctggcactgccaggacctcctgtggcacccttcaagctgcccagccggccctctgggcagactgtcatcacatgcatgcataaaccggcatgtgtgccaatgcacacgagtgtgccactcaccaccattccttggccagccttttgcctccctcgatactcaacaaagagaagcaaagcctcctcccttaacccaagcatccccaaccttgttgaggacttggagaggagggcagagtgagaaagacatggagggaaataagggagaccaagagcacagcaggactgaaattttggacgggagagaggggctattccatcttgcttcctgg

SEQ ID NO: 6845 - DNA, 2606 bp, Homo sapiens
gccagccacgctcagtggctgaacagcattcccacagcctgcaagtgtgtgtgtgtgtgaaagagagaggggggcccagaggccgccttttgaaatgtttgcctgtctgaactgtgaagacacttgggagtgattgtggtctaatttccaacctgctctgttttctgtgacatcttggagggggagctagtgccaccaccatgcgcggtgcttaggaaatgaaagaagtcccgggtctgtctctctcactctcgctctcactgggggagggaaagaatggctttggtggctttgttcacatagctgatgcgtgccctgggaaggtgtccacagtgagccctgtgtgcaggactgtccacacggttcacaccttgtcaccatcaggcctttctggctcctgatagggtggagcaaaagtggaaaggaaaggaaagaggccttttctcacagccattatattaaatagtaggtcgattcacatcctcgtgctcctggccaccctcccctgtgcctcagtgacatgtagatgactgactgccaatacttgtcaccattccctggaagcagctacctaggggaaacaagatgtagtgctattgccgataacaagtaagattttccacactacagctgggtgtttctcttttctaaagtgaggccagtgttatttcccgggagtgttcagtcttgaccctagtcactgattttttctagttgttaatagagtggttggcttttaaggttcagagactgtggcttggcacctgcgcccaggctttgtgggcctttgccccttagaaagtagctgtaggcaaagatttgtgattttccaattacagtctcagctctagttttagtatctctaattctttggttcccttctcttccctgaaatatattagcacctgccagccaggccctcattttgcccagccagtgtgggcagatcccaccgtggagacatctgtagtgtgtatgtccttgtaacactctgttttcagggactacaacctttttccttctgtgaccagccccggattcaggctgtactaataccaggtatattgtggaatttagtataaaggccaatctgtcctgaagtccatctaatgtggtgaatcactgaaagtctcagaaagacctggttagtgtatgttctcatttaccacaggcctaccagccctgggcacagcagcttcatggcaagacataaaatgacactcaaaatccttcagatctggaaaccggctcagtattaaccctacctttggttgtcctgccctacctgctctgttagtttcttgttgcttgaactgtcttctgtcttatttcccttcctttctgtgttcctcttcacctctcttgttcccctccccgctgctctgtagtcatgttggtcctttcaggcacctctgtggcatagctcccctttggtaagttttcttaattgtcatagattaactgagtttcctggatgctaatttcacactttcggttggaggagatctccattgttcctacccctccgggccaaatgggccccaggtttccaaggaaggagcaatctgtgactcctaaaatgggttggggccctgccagagttaaagcagtgactggagggtggactggggggttgcagcatctttagacctagatctgtctaactctggggaggcacattgacatttccattacacacagcactgctgcggtgccagggacctagcgcaggacttttggtaatccataaaatggattctgagactgcgacggcaaggctgtcctgtcccccaggcacccaaggatcctgccagacagcacactttggaggaaggtctgcagggagcagctgagccatttgttcttgaactctgggaggcagaagtccccgcacccatcatgcgtggactgataggacatcttttcgtggtgtgcaccagtgctttccacacttgacagtggttggctttgatgaaccctcatgctgcaccttcagagccagtcctctagtttggaataaaaattgcagaggtggtttttgggtctttaccacctgcggctggtggacagcagccagtgtgtctggacacccaggggcattgagactgcatgttgtcacatgaccacttctcttcacacatctgctttcagtgcctggtgaaaaatagaccttggcctaacagtgtgactctctccaccgcctcagtgtagggaagggtccaggccagggaaggagcaccctctagtggaggcgggggtgaattcttaggtcgagctgatgcaagaaactccggtagccagcctctgtgaccttgtacatgagtttggtgtgcctattgtgatttaaaacaggtgggttatcaagaggaacttgagatctctttattacatggacatttacttcagggggaccactgtaagaaaagccaaactccaagaccaagtaagttagaggagtcttgattttttagacttcactgcggagttctgtacaccctttgccctgatgaatttgaatgggtttgatttgcaaatttggatttacacccattgttttggaagcacatcagctgaataaagttgaggtttattttatttagaaaatc

SEQ ID NO: 6846 - DNA, 1557 bp, Homo sapiens
tgacaagacagagcccttgagtttgggatcctttctgttggagttgagttattgtgagcctgaaagtacccagttcctttgccagtgcttgaaacaaaccatgaagtggcctctcttaggatccaggtcttttcccatttactgaacttatcatgaaagtgagtgctactacgaggggtccaatcacaggctgagaaattgtgttacagaatctactcttggaagaatgaagacgtggctgtcctttggtacctcgctttaaggtggctttcccttaggacccctactgtggactgccttataactaaaaccttttgtattttagtaactgaatccccactgtgcagtgttagggctgcctggttgtttgcagtagattagagctttagaagcttctagagcttctaaagcccgtgctggtgatcccagcgactcttcactccctagccttaggtattcctagaagccctgaccagttggcactgctgagactccagcccctgggagtggtttacagaaacattacacagactctgatgtcagtcatgatgtttcagcctctgcccttttcctgtatcaaccctgatggataatagggcgtgggttctgtctgttatcagggtgtggtcccctgtgaatgaagcactcccagccactgagctgtgagaaacagtcactcggaagtgtgagctttatcttagtttttgttggatcatgttgagtctgtcagctccacaggacttcagtacgtttctgaacagtccctgccatctctacgggggagagggtcaggcaagctgcaagtgacactcacctcctgctgacagttgcagtgtctcagatggcctggaagggtggtctccagcagcctgctgggcgctcccctttcatgagagccacctgcagtgacctgaactgatacatgttgattagtctgccctttctttagaaaactgctactctccttttcatatctcagaaaaacagtagaggccttttaggaccaaactccatgtcacactgatgaagagccagtgggggttagagcgtcctgttaaggcacatgctaacttcccactcaagtctggcagcgctggggcatcagcacacctcttgccacccacactgataccagaggggaaggctgtgaggtggctgggggttgagacttgaggtttctaactttcctctgcacacctgtggctacctggtgtttgtctcttgattccctccacctgcctcacaccctgcctccgtcgggattttccacctacaccattcaaaaggaacataggagagggcatgaaggggctaggctgaagcactctgatgactggggccaatttgtggctgaaaatgaatacattttttgaaatttatggtcattttcaagtgatttagaaggttgatccttagcctcatacagtgatgaaataatctgtgtgttcagagccaagcaggactttagcaagagtctgattgtattgtcactatctcggggaaaaaaaaatacaaatacatttctctgatctctgatggcaatgaagtttgacttgt

SEQ ID NO: 6847 - DNA, 170 bp, Homo sapiens
gtgcctggcccttggctttagccataccagggtgagttaaagagaggccccggctgggtgagctgagatggagtcctcgacttatcaccacaccactgccccaaggaccttacaggccctccctgttaataaacagctctaacacggccaggctgggctctgggattctg

SEQ ID NO: 6848 - DNA, 2506 bp, Homo sapiens
tgataagcagtcatcctcagatcattatcagcctgtgccacgattgcaggagtccctgccatcatgtttacagaggacagtatttgtggggagggatttggggctcagagtggggtaggttgggagaatgtcagtatgtggaagtgtgggtctgtgtgtgtgtatgtgggggtctgtgtgtttatgtgtgtgtgttgtgtgtgggagtgtgtaatttaaaattgtgatgtgtcctgataagctgagctccttagcctttgtcccagaatgcctcctgcagggattcttcctgcttagcttgagggtgactatggagctgagcaggtgttcttcattacctcagtgagaagccagctttcctcatcaggccattgtccctgaagagaagggcagggctgaggcctctcattccagaggaagggacaccaagccttggctctaccctgagttcataaatttatggttctcaggcctgactctcagcagctatggtaggaactgctgggcttggcagcccgggtcatctgtacctctgcctcctttcccctccctcaggccgaaggaggagtcagggagagctgaactattagagctgcctgtgccttttgccatcccctcaacccagctatggttctctcgcaagggaagtccttgcaagctaattctttgacctgttgggagtgaggatgtctgggccactcaggggtcattcatggcctgggggatgtaccagcatctcccagttcataatcacaacccttcagatttgccttattggcagctctactctggaggtttgtttagaagaagtgtgtcacccttaggccagcaccatctctttacctcctaattccacaccctcactgctgtagacatttgctatgagctggggatgtctctcatgaccaaatgcttttcctcaaagggagagagtgctattgtagagccagaggtctggccctatgcttccggcctcctgtccctcatccatagcacctccacatacctggccctgtgccttggtgtgctgtatccatccatggggctgattgtatttaccttctacctcttggctgccttgtgaaggaattattcccatgagttggctgggaataagtgccaggatggaatgatgggtcagttgtatcagcacgtgtggcctgttcttctatgggttggacaacctcattttaactcagtctttaatctgagaggccacagtgcaattttattttatttttctcatgatgaggttttcttaacttaaaagaacatgtatataaacatgcttgcattatatttgtaaatttatgtgatggcaaagaaggagagcataggaaaccacacagacttgggcagggtacagacactcccacttggcatcattcacagcaagtcactggccagtggctggatctgtgaggggctctctcatgatagaaggctatggggatagatgtgtggacacattggacctttcctgaggaagagggactgttcttttgtcccagaaaagcagtggctccattggtgttgacatacatccaacattaaaagccacccccaaatgcccaagaaaaaaagaaagacttatcaacatttgttccatgagcagaaaactggagctctggcctcagtgttacagctaaataatctttaattaaggcaagtcactttcttcttcttaaagctgttttctagtttgagaaatgatgggattttagcagccagtcttgaaggtctctttcagtatcaacattctaagatgctgggacttactgtgtcatcaaatgtgcggttaagattctctgggatattgatactgtttgtgtttttagttgggagatctgagagacctggctttggcaagagcagatgtcattccatatcacctttctcaatgaaagtctcattctatcctctctccaaacccgttttccaacatttgttaatagttacgtctctcctgatgtagcacttaagcttcatttagttattatttctttcttcactttgcacacatttgcatccacatattagggaagaggaatccataagtagctgaaatatctattctgtattattgtgttaacattgagaataagccttggaattagatatggggcaatgactgagccctgtctcacccatggattactccttactgtagggaatggcagtatggtagagggataaatagggggcggggagggatagtcatggatccaagaagtccttagaaatagtggcagggaacaggtgtggaagctcatgcctgtaattataaccttcagctactaagacaggtgtggtggctcacgcctgtgattataatcttcagttactaagacagagtccatgagagtgttaatgggacattttctttagataagatgttttatatgaagaaactgtatcaaagggggaagaaaatgtatttaacaggtgaatcaaatcaggaatcttgtctgagctactggaatgaagttcacaggtcttgaagacc

SEQ ID NO: 6849 - DNA, 595 bp, Homo sapiens
gtagtcttacttgatagtgctagaaaattactagattatatattattcagtatgcatatttgacttctgaaattattagaaaataatttttaaaacttttgacaaatccagtagaatttttatcactatctgttatgttctcatgtatcttcagcgactctcttgatcacactttttaaacattcatgctttttgaggtataatgtacatatggcaaaattcactctttttaggtatacagttctttggattcttaaaaataatgtaatgtaacccttactatacacaacatatagactatattatcccccagaagtctcttatgcccttttggtaatccatttcttcctctaccctgagcccctggcaactactgattcattctttgtccctctagttttgccttttgtggaatatcatgtaaatgattaaatatgaagtggtttgagtttggcagtcattgcatgcatataccttgaatttactttgtttatactctcatttatactaccaaccctccctagaaaaaatggattctgattggttctggttgcagtattacaaattccaaataaagctttatttgaggaccccc

SEQ ID NO: 6850 - DNA, 1349 bp, Homo sapiens
atcctgaggtgccgccattggcggttctgctgcttcgctgcagggataaggtggagctaccgaacagctgattcatatgccaagaatttggagtcttctttcaaaccagtgggggttggacaatgaatgtagttaactggttcctgctcacactccagaattaaattctattgaaaaaggaaaatcagcaattcagcaaaaaataaataaaaaataaaaatgtaaatatgatagtaataaaatagagcataacgaaactgtgaaactttctgaagccttgtcagtggttaaaagtatttaacactctactgttaatgacagatgttctgtttttataacctaccaaaaggaaactagaggcttcttggtgaagagcatttttgtgaagtgggttctgcaaggagcctataaagccaagggtggtgtccatttctgggaatggttaaacacaaaaggctgatagctggtatcacatagttggagtcagtgcataattccaagtggctttttttttttttggcacggggactgatcaggaagatatattcctgcataactcaatctgaaccaaggattgtagtttagttttcctccttgccttcccttctgtgtgaccgaccccttggccaaaaaaaaacaaaaagcaaaaaacaaaaacctaccctgttctggtttttttcctccctttagttccacccccaacccccattccctggtgtccttcttagagatgaagaaataataaggaaacatctttcatagccacattaaataagagaaactgatatacattatttttttctttttaaagatgacttataagaaccctgaaatttatataggtgagacaatagaaataaaaagatcttcagccaggcctttctgaaggagttattctgctaaaaatggtcttagttgtctgaaaagccagctcttgaacctcttcacaacagtatcaacactggcttctcccggttcattttatgcgtgcgagaagtcagtggtaactgctgcagggcttaatacattagtggtaactggtttaaaaaacaaagactgtaagcctgtgtgtgccactgtttgcttcaacagtatatcctaataagcctcacctatttaatccaatgagttttaaatctaaatctcattcccttcttctttccctaccttttttttctttttttcttaaaaaaatattttgtgttattaacagaaattcatatttggtgtggcttaacggtatttcagaaggtcatcagattgtgagactgcttccttgaaacatttttgtgctattgttttaaaaaaataattaaaaaacagttggcgttaataaaaatgtcaatgtg

SEQ ID NO: 6851 - DNA, 1234 bp, Homo sapiens
tctgttaccattgggatgataacctgaggacccccactggaaatctcccatcttttgaaaaacctggaagtgaggagtgtgcacggatgctgaatgtttgggaatgagaggatgagtgagtgaggcttgaaaacacaccacattgaaaatcctgccacagcagcagccgcagccgccaacagcagcgctgttagtgagctaagtaagcactgacttcgtagaaaaccataacatcggccatcttggaaaagagaaaaacaatggagttacttatttaaaaaaaaagaaagaaagttatctcttcccaggagaggctagaagtagcttttctgtcttttggccagtgccgagtggaatgcctggtttgggggaggaggagggactgggttcagctgtggtgctttgttgtaaaaggcagcctggcctttgctactgaggagaaagatggagcctgggtctcaagcccaccttcgctgtacctttgccacatggtactgtatgcttgccagctagaaggagggtcagggattttttacagtctgagaatgagtgtgtgtgagtgaggcggtatccacattttcaacttcaagtcattgcagtttctttttcccagaaaacaaggggttagatgttgcatttcataaaactaaccgaagttttgtttactgatgcagcacaagagatgtaaaaaaaaaaaaaaaaaaaaaaaaaaaaacacacacacagaggaaagacgctctttaggttttgttttgttttttttttttggttttgttttttgttttttttactctagggaaaacactgacgaatggtcagagctcctatcctgatcttttcatcaaggcgcctttcctaataatatggttcaactgtgaatgtagaagtgggggggaggggggagaaaaagaaaactctggcgttagaggatatagaaaaatataagtacaattgttacaaataacgcagacttcaaaaacaaaaaaatcacaacccaaacaaaccaaaatttaaatgatcagaattggcagcacaaagaaaacgccctctcctgacttgtattgtggcagtctgaacgcccccagaaaattgtgccaaagagtttagaaaaataaatatacaataaaagtaaacacatacacacaaaacagcaaacttcaggtaactattttggattgcaaacaggataaattaaatgttcaaacaatctgataaaataaccatttggaaactg

SEQ ID NO: 6852 - DNA, 1424 bp, Homo sapiens
ggcaccagccccacccactggctgtttctccgtcctctcctatcacccccaaacactcactttgaatgctgcatgaatctcgtggggggtccctgcccttgcgacccccagatacctccacttgctaccgagtcaacgtgtgtgccatcttccctggtccaggcaccactcagctctggctcttcctgggaggtcagccgaggctccccccatgctcctggtttctgcttaggaggtggggacttgggctgggatggggacggcatacccctcccaggcctctccctctgcctttctgttcttaatcagggttggatccaagaaggtgtccagtgcttgggcctggggtggggggaaggtgttagaggactccaggagctcctgcacccctccccaaatgtccatctttctcagacggggctctgtctggggagcacccacaggctgcctttggggtcccagagcctgctctgtgcactgaccccagttcctccatcctgtggccagcctagggctcatggcatgggcccccactgggggagggaggcatcttgtttcttgtggttccctgcaggccagtcctgtcctcctttccctgttctgcccactctggggaatagggaggggaggagaggagaggagagggaggatcctggaggactgggaagatctagcctaaagaggcttctctgagggccagggccctacagcatgcccctacggccaggggactgtctgccagcctcccaggcccatgccctcctggtgcccctggcactgaggcacagatcgtcaaggcaggtaccccctcaacccttcttccactggagcccctgacaccacaggtgccctggagcccttgtgtgactcagcctctgttagctgggtgggtgtcatcagcccctgcctcccaggccagaacctgagaacgggcccagggtgctgtggagatcaacttcaaaagagctaaccccttcccacactccacccacccacctacatttcctctgtgaaatctacctcagagttgtaccctcagaaggacgggtaagcaggaggccagggggtccccagggctgaggtggggagccttctacggcgaaagcctgccaccccacaatgaatccaccctgctccactgcgcgcctctcccaggtctcagctctgggtggggagcagtggccgctaccgacagcgcatgtcccgctcttatccaactcttccaggccccacctccctgcacccctcccctctatagagcaggggagtgaaggggtatgtcaggcggggaaggggccaaggacacgtcattgtaccctgagcgtccccagggagtggaaatggggaagggggcctggagaggggaggcaggggcccctgtgctctctgaacaagttgaaagtccaaataaaacttacctgttc

SEQ ID NO: 6853 - DNA, 753 bp, Homo sapiens
gcagatgacatgatgaaaggaacagaaacagtgttattaggttggaggacaccgactaatttgggaaacggatgaaggactgagaaggcccccgctccctctggcccttctctgtttagtagttggttggggaagtggggctcaagaaggattttggggttcaccagatgcttcctggcccacgatgaaacctgagaggggtgtccccttgccccatcctctgccctaactacagtcgtttacctggtgctgcgtcttgcttttggtttccagctggagaaaagaagacaagaaagtcttgggcatgaaggagctttttgcatctagtgggtgggaggggtcaggtgtgggacatgggagcaggagactccactttcttcctttgtacagtaactttcaaccttttcgttggcatgtgtgttaatccctgatccaaaaagaacaaatacacgtatgttataaccatcagcccgccagggtcagggaaaggactcacctgactttggacagctggcctgggctccccctgctcaaacacagtggggatcagagaaaaggggctggaaaggggggaatggcccacatctcaagaagcaagatattgtttgtggtggttgtgtgtgggtgtgtgttttttctttttctttctttttattttttttgaatgggggaggctatttattgtactgagagtggtgtctggatatattccttttgtcttcatcactttctgaaaataaacataaaactgtt

SEQ ID NO: 6854 - DNA, 204 bp, Homo sapiens
ttctctgtcaacctttctctactagtggagaggagtggggcctgcccctcttctcagacctctgacctgtgacagaagcccatccccagtaaagtgtctctaggccctgagtatgcttttcatgtcacttggggtatctcaggggaagaaaccagtgaaagctccaggaaacaaaatacagagctcagtgagccacctgattct

SEQ ID NO: 6855 - DNA, 1133 bp, Homo sapiens
ggccaactgcggcgggaggccctgaagatgcagtcccccacctgtgtcctccctgggcccctggtggaaaggagccctgtggctgccttgggcctgccctcagccccactcctgttctgcaactgtccccacaggaaggggctctgttccctgtattgtcctccttctgaagccccttggctctgccttggcccttcccctcaccacgagctcccggcctgcccagactgtggacactggccgtgcccaatgagacgttctaaaccaggacgcgtgggaacccttatttccaaaggaaaaacatgcatttcactccgtcgaggagcaaagtgagcccctaccccccaccccgatccccgctcccaacactgccggagtcgcgtcatgccatgccccctctcctgcacctccctggccctgccggccactgtggacgccctggggcttggcacccacctctggagaaactcggggccacctccactccatgtgcccagccccgccacaacctctcctccagcacattccagctctatttaaaaagtaaagacacccaccgactcctgatccccctctttttctatggagaacgttgccttatactctacttcagatgatgaacactgtgtactgtgtgtgctttaaagaagttttatttaattgctcccttcttcctttccttgttattcacctccctgatgcctgctttcagttgagggttgggggcaatgatgagcatatgaattttttctcactctagcaattcccttttctaaatgacacagcatttaaactcaaatctggattcagataacagcacctgcacatcctgcacctcctccctctcccttcacctcacccctgcccggcccaagctctacttgtgtacagtgtatattgtataatagacaattgtgtctactacatgtttaaaaacacattgcttgttatttttgaggcttttaaattaaacaaaaatccaactttatttttagttgtaactgcttgaggtatgttttatgaattaagtgacagatttgttatcctttattaacgtactttgttggtcagcactgggctgacaaaaattttttcttgctaataaatttagttgcctgaggcaaaatcttcaa

SEQ ID NO: 6856 - DNA, 2525 bp, Homo sapiens
ctctgggacctgctggcccagagtggagctagggctaggtgtcaagagagggtgtgggattgggacccaggcccttctttctaaactcaacccatttccctccctaccccttatcttcaggactcttcagagctaatcctctaagttctctgtactcagttggttctcagttagctggtcaagtggagtgtaatggtggcgtagagaatcacaaatggaaaataattccataattatttttttgaccttgcctatgattgattaggatagctccctctaggggtagcagccggtgtgactccctttctggtgacagacagggccccagcagccctgtctgttaccatgtgagtcatactggccaaagcttagtcctagcatatgcacctgagccaacctggccaatcagattgttttgtcaataatttgaaatttgaactggagagatccagaaccttgggagtcattaaagccaagtcattcatagcagccaggaaacaataggaaccaaaagcctctgcctgctgctattgcaattcccaggatctctccttccctggatccctccctcccaggtctgggctgtgcagttcctccccctgccttaaaacaccccactatctctgtaaagtctctctctctcttttttttttttttacttaatctagctagaatctatttctgttgattacaacttaactaactcatttacggataggacttttttttttctttttttcttttttcttttcttttttttttttgagatggagtctcactctgtcacccaggctggagtgcagtggtgtgatcttggctcactgcaacctctgcctcccaggttcaagcaattctcctgcctcagcctcccaagtagctgggactacaggcacacgccaccacacccaactaatttttgtatttttagtagagatggggtttcaccatgttggccaggattgtctccatctcttgaccttgtgatccacccacctcagcctcccaaagtgctgggattacaggcatgagccaccacacccagcgagacggggtttcattatgttggccaggctggtctccaactcctgacctaaagtgatctgcccgccttggcctcccaaagtgctgggattacagacatgagccaccacgcttggccgggatagtatatttttatagcacttcccctactgattgctgccttctctgtggctacaagggacccacagaattacagggaagttacagggaagcaggtttcatctcaatattgggagagatttcaaacaatcacacctgcctgagaaggagtgggctgtcactaggaatttttattcccagtccgtcaggaattttgtagaagggcttcatgtgctggtaccaataggacaggaagattttaatcagctttactatctatgtttttttatggaaactgtgtgtatgtatacatacattttccaaaaagaaaaattaaatgattatagagattatgtttttcagactactcacgtatctgcttttcttactccccacctctgctgataattcctagttcattggtttttcccccacactggaattacctggggagcttaaaaaaccctgatgcctgggtcccaccctcagagatgattgaaccagcctggccagcatggcaaaaccctgtctctactatgatatgaatgcagcctgggcactgggaaatttaaaaactccccagataattctgtgcagccaaggttgagacctcctagtctagagctttgctatacacagggtggtccacaagccaggagcatcagcatcacttggcagcgccttagagattcagaccccagacccactgaatctgaccctgcattttcactagaccccaggtgatcagctgcactagactcaacctctaaaccaagacctcccaccctcacagtctatgatcctttagtgaccctcagctgagtcctgtgctgaactgtgtttgttctccttgagcacatgcccgctaaccagggacagactggatgagcaagcaacctgctggctatggagaagagccaggctgggtaaatgtttgctgtgactaagccaggatcaaagaactgcctgttgcttgcactggctggcactgagcttgccactctgtgaactgtgcttccttcccctgcatggacctgtgcctcagtcactattatccgcaggccttctccaagggcagccctctccttgtttatccctcttaagcctgcgtgcaggaaggcacattaaccctgtggccccctgcaggcaggagggtgttgggtgcccttacctaccttgccctttttcttgtaccgtaggctgtgccgtttatgagtaagtgatgtgtgtctgtgtgtgtgtctagaagtgctgcactcaccttgtgttattggaggttgtgtaaccccctagctttgagcctggtctcagatgttccttttccgttctctgtccagccgttaccgcccccagtctgtaataaaagcctatcagccgtgcacttt

SEQ ID NO: 6857 - DNA, 278 bp, Homo sapiens
caccctccgtgttcttgcctgcccatcttctccgcttttgggatgaagatgatagccagggctgttgttttggggcccttcaaggcaaaagaccaggctgactggaagatggaaagccacaggaaggaagcggcacctgatggtgatcttggcactctccatgttctctacaagaagctgtggtgattggccctgtggtctatcaggcgaaaaccacagattctccttctagttagtatagcggacttaataaaagaggaaaaaactcttgcttcagt

SEQ ID NO: 6858 - DNA, 1838 bp, Homo sapiens
gcctggggaagaagggggtttgaagcccaccaagaccgaaactggagaagggctggacctggacctggacctggacctacagcggggacttaaatgccttcttatccaatatatcttctcagatgggatgactgcgggtcagtgtacaggaagaggcaggcactggctggctcagctccactcgggtggagtggaagtggccagaccatttagacggacagggtcctcaccctacccctttcctgtgaggcaggggtggtggtggagttgctggaggtagaggagctatgtggagcaaaggccgacagaggggaaggaatggacctgtgagaggaagggaaggtggcagaaagtctcatttcaggaaggagggatagaaggaaggaaggaaggaacccccccccccccgaaaaaaaaatcaaagcgggaagaaaatcagagggaaggttaaggttggctctggccaggattccaggcagcaggttggagtgactggtgggcctagatcactggtgtgataaaccccaattttcaccccggggggggtggggtacacagacacagggtgggggtggggagggacggtgttaactctttctgctccttgcattttgacatccctgaaggggagctcttggatatcattggccatgtttcaatcgaatggagccactgggccccaacactggctttgagatttagagtcaaagggtagagtgaacaggaaagggtcacgtggtcccatgttgcaacagccccaacatcacgcatgtcattcactgccttgccactccatctccctccgtgctccagccacccctgagctgaggctcccattgtctccatcagagcctgcatgtgtatgccgtcctcccctggtccggtgtttgtgttccccacccctcacagactgcctgagctcttctgtaagctggggtagggtgatggcagtgctccgggaactgggcctgcagccttcctcttctgggactgctgtgaggcagaggaatgatggagaatctagtgtagcagcctccaggcaggattcagcacaacactggggagtcacccttccctcgggcctctgcctaccaacaactgggcttatcactgggaaaacacaaaaaattacacaacccagcaacaacaaaagaactagtcctcttagaatttcttgcgctttgatttttttagggcttgtgccctgtttcacttatagggtctagaatgcttgtgttgagtaaaaaggagatgcccaatattcaaagctgctaaatgttctctttgccataaagactccgtgtaactgtgtgaacacttgggatttttctcctctgtcccgaggtcgtcgtctgctttcttttttgggtttctttctagaagattgagaagtgcatatgacaggctgagagcacctccccaaacacacaagctctcagccacaggcagcttctccacagccccagcttcgcacaggctcctggagggctgcctgggggaggcagacatgggagtgccaaggtggccagatggttccaggactacaatgtctttatttttaactgtttgccactgctgccctcacccctgcccggctctggagtaccgtctgccccagacaagtgggagtgaaatgggggtggggggaagcactgattcccagttagggggtgcctaactgagcagtagggatagaaggtgtgaacctgggagtgcttttataaattattttccttgtagattttatttttaatttatctctgtgacctgccagggagaggggagagagagagagatgctgttgagcacatgacaaaataaaataaaatggatgattc

SEQ ID NO: 6859 - DNA, 1235 bp, Homo sapiens
gctctgggttctgctctgagatggtcagagaagatgcgggccaggagacttactcaggtgggactgggcacagggcaggtatgtgggaggctgggctgcttagtgtcttctagtcacctctgcttgggctgattgacagaggtcagtcattacagccccttatgcctcttccatgggaacaaatactgtgcagatgtttgtaagttaaacataagacacaggggctgttgcttttgaacagaaccctatattactctcctgggatctgagtttctgcaggtcatttgtatgtaggaccaggagtatctcctcaggtgaccagttttggggacccgtatgtggcaaattctaagctgccatattgaacatcatcccactgggagtggttatgttgtatccccatcttggctggcttcagtttttgctgtagccctagagcactttgtttgtgggaggctggcctcttgcctacctccttgcatggacagggggatgaatatttactttcccacctccttgctttttctttcactgataccactgaatggaactggtgctgtgactcctgctgctggggatttatgtcccgagaccttagcctggctgagtggagcctgagacctgcacaacagctcatggtcatgcatgagagagaagtggctggccacagccagagggaacagtaacagcccaggggcctttattttgggaaaggctgtcccgggctgttactgtctcttctggttataaagcagacatgtggccatcttttccgcagggttagagtgggctcctttctttttggaatccttttcttctcctttggtagcagctccctgcctccagggcttccgccaccagcgtctctgctgtgttgcgcagtgcagtggggtgcaagggctttgtttctgcctgcctgaaagagagggctctggggatggagatgagaaacaacacgctctccttcagacaatgaggcattctgtcctcctgctgccattcttcatctccactgagagccagagctggtaggagccgagtgccacaggcattctgcattgctctactcttaggtttgtgtgtgtgatccttcccctccctgtcgcccactcctccctcctctggctatcctaccctgtctgtgggctcttttactaccagcctatgctgtgggactgtcatggcatttagttcagagtggaggggctttggcctgaaataaaatgcaagtattt

SEQ ID NO: 6860 - DNA, 1861 bp, Homo sapiens
gtatcccaacctcttggatgtatacagagattttatagaatagaacctatagcttctaccatgagttatatgagtcaagatcctgcctaacctgaaattattagggatttactcagccctgctgccgctaacagtggagttatgtcactgatctgaaggtcactgttaagggcttctgctgccatccttgtgggttgctacctttaagtcgcataactctagctgtatcatcctctcacctgtcattcttctgagggtctcagtacaagggccctgggatggagccaacctgggtattcacaacaggcctgacttgatactaagtgattagttttccaagttgtcccactgccattcaaagtcagcccttgagtgtatttgttctcagtcctaaccctggggccagagattggtccgaggttgagaattccttcctcctcatccttggtgttgctttctccaaatgattgttttagactagccaaaaatgccgtggcaaagagctcagaaatccaatttggataccaaaggtttctcatgttaatttctcagcccccaaagaagcatcttactcctgaaccttagacaggaagtattgtttcagtcacagaaagcttttctgggtacctctggttagcactttctactctctgatatttcctatgtacatagcttttattgttgtaaatcctttcttaatggttaaataggattgttagcaactatgggtttgcagttttctgagtaggtgagttttgaatatgggtaaatcagaataatgagacaacttgttaatctctttaatactaaaaataaattactcttctatttcagggacttaggtaatttaaaataaaccttcaatttatggtcttctgttttgaagctcatgggaaaattgtgatcaaaagggctatgggaagggcagaccccgccaatgatttctcttcacctgtcttaagattaaataaaaaagagtgtcctggcagttatcttgaggtggggaaggaggtgatgaaacattagtttgtgaaatccaaggccctggcttgctttctttctttttttttttttttttttgaaacagtctctctctgtcacccaggctggcgtgcaatggcgcagttgactcactacagcctctgcctcccaggttcaagcgattctcatgccttagcctcccaagtagctgggattacaggtgtgtgccgcaatgcccagctaatttttgtgtttttagtagagacagggtttcactatgttggccaggctggtctcgaactcctggcctcacgtgatctgtccacttcagccgtccaaagtgctgggattacaagcgtgagccactgtgctgggcccgaggccctgacttcttgctgtaactttccatgcattttttttaaaaggagcagtgtggattttcgcaccctttgtgaactaagttcaatgcgctctatccaaatttgcctaattgaactataagaaagtaataattccattttctatcccctcagggactgaacaaatggaaataactcccaggcagtatcaggtggtcactacagagacttccacaaaaacttttgaatgatgtgaaacacgatgtcatgaataagggttgagccaactatagctctgtgttcctactgggctttccctaatgtggttgggagttatgccctagactaactgtattgtcctagtcacagctccttgctttgatttcatccttgataaaatgaagatgaaacttacactacttctccaagccttttgctgtcttaagaataagacctgagattaacactaaccctagaatagaaatgtaatagggagatggtaataaaggagtttttctggc

SEQ ID NO: 6861 - DNA, 99 bp, Homo sapiens
ggctccatgggggggtcaccggcctgttgctactgcaactccacaccattcttggtgctggggtgtgttaagctttaccattaaacacaacgtttctct

SEQ ID NO: 6862 - DNA, 1926 bp, Homo sapiens
accctgctcccatctccccttcccccactcaagagtcccagcagaatcccttccccccaccccagggatggagaggcactgtgtatctccctccagactcgaagtcatcctgcaagatggcaagaaccaagcaagctccgatcccagggtgtgggagtgggggcctgttcccggtctgacctccttggcactggagcatctggggcttcgttcatccattcatcccgtatcaggggccaaggtacctttacaggagcacctagagcgagggcctttggcaaaaacaaaacaaccaacacacctctccacagggccagctccttagggataagtggaagatggaaattgcaattccaagagggagtgtgcccaaatgatttatggggatacctggaagggagcttggggtgggggctgtctgtgacacttaagcagtctgggtggttgtctatttgtctgtcttcagtcttgaagcagggcttcccaatgcccttttcctccctgccttccttcccccattatttcccacaggccagcataattttgtttttcctaatttatagtcactgttctagacagaccaaagagaaggaacagtggtggagtctaggctgctgatcagtaagctttacctagcacctgagcacctttctcccctcccctctttcctcacccttttctagatgtaagacagaaagtaaatgtgactgggacttaaccaaggtcttggtaaagcctgcatggcaccgtaagaagctgaaaatactgtttgttcccgcaatcactgatttgaaaagttcccaacacaggcagctgctgtgtatatgggattagagccactacatagaatagtctcttacagattttcataaatactagtcacaataagggtatttttcttgggggtggagtaagggggagactgatgctagtccttgttgtattttgttgggctgtccttgtgtattttcaccccagcctgtagtcctcctcacttcaaccccagggatttttggggagcaagggtagccaatggcagagggggttggggctgggactctggaggctcctccccttctttctcttccttccgcctcccccgtgcccccagctgctcttgtcactgtctctgatgggtatttgcctggctttgttgcttctctatctgtatttagctgcagtgatcctttagctggttggctcagaaaaaaaaaaatgtgctttaggtgccctgtaatcctgggcatcaagggaatccatccttcccctttttgatatgttctccccgtacttccagatttattgttatggctcccagtgggtattggcgattcttgtgatgcagggcctcagtcagtgtccagccatgcataagggagaggatagtgtgtacctgccctgccctctgctatgaaggtctctgccttgtggatcatgggactccccttggaggatctgtgcaaaggggggctgggcacaaaggagaatgtcctatttgggagggcaggaagcaaaggaactggacagggattggtgggcttggggaacggaagtttatcttggatacccttgaagaggctgggtctcttcacatgaagatcgaaaagggaccctgcttccaatttccctcttccattcctcgagctactccagggcttagaagaatgctcttggtctgtgggtccagtgttgtctgtcatccatttaagtgttcccactttcaagtgacaatcctctccttggccctgccatagggcagagcatgtctggcatagcagcctgacttttatgccctaatcttgagttgaggaaatatatgcacaggagtcaaagagatgtctttatatctgactgtatataaatgaagtttttttgttttttttgttttcctttttggtgcaataaagtttgttttggcagaaggag

SEQ ID NO: 6863 - DNA, 6699 bp, Homo sapiens
ccagcccctccctgtcccttcgagtccaggacaacaacgggcagaaatcgagagtgtgctctccccggcaggcctgagaatgagtgggaatccgggacacctgggccgggctgtagatcaggtttgcccacttgattgagaaagatgttccagtgaggaaccctgatctctcagccccaaacacccacccaattggcccaacactgtctgcccctcggggtgtcagaaattctagcgcaaggcacttttaaacgtggattgtttaaagaagctctccaggccccaccaagagggtggatcacacctcagtgggaagaaaaataaaatttccttcaggttttaaaaacatgcagagaggtgttttaatcagccttaaaggatggttcatttcttgaccttaatgtttttccaatcttcttccccctacttgggtaattgattaaaatacctccatttacggcctctttctatatttacactaatttttttatctttattgctaccagaaaaaaatgcgaacgaatgcattgctttgcttacagtattgactcaagggaaaagaactgtcagtatctgtagattaattccaatcactccctaaccaataggtacaatacggaatgaagaagaggggaaaatggggagaaagatggttaaaatacataataatccacgtttaaaaggagcgcacttgtggctgatctatgccagatcaccatcttcaaattggcacaactgaaatttccccactctgttggggcttccccaccacattcatgtccctctcccgtgtaggtttcacattatgtccaggtgcacataggtggtattgaatgctcagcagggtaggggctgaccactgtccctgattcccatcgttctcaggcggattttatatttttttaaagtctattttaatgattggatatgagcactgggaaggggacgctaactccccttgataaagtctcggttccatggaggacttgagtggccccaaaggctgccacggtgccctcaccccagcccatgtgctcccataagggctggttcctagaggcaggggttgtggggcactcccagccacggcactgttaccttggtggtgggacttggaacccaaccctgagctcccgataaagctaaagtccatcatctggcaaattcagtaaattggagagtacttgcttctgtttgtatctgagaggaatttttaactgacggcttctgtctccatgaatcattatcagcatgatgaaaggtgtgtctaaaaaacaattcagaataccagcagcattgtacagcaaggggtaaataagcttaatttattaatttaccaggcttaattaagatcccatggagtgtttagcccttgtgggagacagaagccatcagttaaatgaggttaggcctctcctcctaatatactgattgacaatgcatattagccaggtaatgcactttagctaccctggacaatgctatcaagtgtgctgggaagggaggaaggcctctctacatatggaaaagcccatgcgtggagttcccctcctttcaacattgcaacaacagtaacaacaagacaaccgcaacatgtgggcgtagtcaggcaatgctgtgtgcgaagtaaactacctcaaggtatgaagttacctcagcaattattttcctttttgttccccccaaccccattaaaaaaatttttttttgatttttgtttttttgcagcttgctgatattttatataaaaaagaaaagcaaagcaaaagagaagctgatagtcttgaatattttatttttttaatgaaaagaaaaaacaagaaagttatgtttcataatttcttacaacatgagccagtaaccctttaggaactctctatggagaacaggcctggtgggaaaggctttgggggctgcccccttaggaggaggctagtgctaagagggaaggcccaggtttgagagagcccagaggggcagagcccagagccttgtttggccctgatctctgacttctagagccccagctgctggcggctgctggaatatcctacctgataggattaaaaggcctagtggagctgggggctctcagtggttaaacaatgcccaacaaccaaccagctggcccttggtctcctctctttcctcctttggttaaagagcatctcagccagcttttcccaccagtggtgctgttgagatattttaaaatattgcctccgttttatcgaggagagaaataataactaaaaaatataccctttaaaaaaacctatatttctctgtctaaaaatatgggagctgagattccgttcgtggaaaaaagacaaggccaccctctcgccctcagagaggtccacctggtttgtcattgcaatgcttttcattttttttttttgttattgtttcatttcagttccgtcttgctattcttcctaatctatatccatagatctaaggggcaaacagatactagttaactgcccccacctctgtctccctgtcttctttagatcggtctgattgattttaaaagtggacccaaacttagggaattcttgatttagggtggctggtggcaaggaggggcaggggatatggggacgtgactgggacaggttcctgccttatcattttctccctaggacattcccttgtagcccccagaattgtctggcccaaattgaatagaagcagaaaaacatttagggataacatcaggccagtagaattaagcctctccacctgtcccaaccataaaaagggtctcccagctttccatctctggctctatatgctttatcccaaaacaaagcagataacgttcagacgtcggccatttagtaatttaaagcgaatttccagcagcaagcatgctttgatatctggttcagactatcatcaggaagaaaaaaaaatcccacagtacctgaaatgtgattgttgcagtgttcagtttccttgggggcctgctcccttcacaccttgagcccaagtccttttccgttggctgattcagctcccagaagagacgaggaagtgtgtggcaagggactggaaaacttcacttgcttggattaggcaaggctccactcattgttgatatttgcccagcaggaaaatcatgtaagttataccaccagaaagcaaaaggagcatggtttggtggttaaggtttagtgggatgaaggacctgtcttggtgggccgggccctcttgtgccccgtaggctaggtcttagggcaactccttgccctcctgctcagcacctccatttccccatccttggtgagataacaagctatcgcgaaaagcacttgggagatttggatgatttgagaagagtgacttaaaaaaaatgcttctgtgctctaagatatatatgtgtgtgtgtgtgctacatatatatttttaagaaaggaccatctctttaggatatatttttaaattctttgaaacacataaccaaaatggtttgattcactgactgactttgaagctgcatctgccagttacaccccaaatggctttaatcccctctcgggtctggttgccttttgcagtttgggttgtggactcagctcctgtgaggggtctggttaggagagagccatttttaaggacagggagttttatagcccttttctactttcctcccctcctcccagtccttatcaatcttttttcctttttcctgaccccctccttctggaggcagttgggagctatccttgtttatgcctcactattggcagaaaagaccccatttaaaacccagagaacactggagggggatgctctagttggttctgtgtccattttcctctgtgccaaagacagacagacagaggctgagagaggctgttcctgaatcaaagcaatagccagctttcgacacatacctggctgtctgaggaggaaggcctcctggaaactgggagctaagggcgaggcccttcccttcagaggctcctgggggattagggtgtggtgtttgccaagccaaggggtagggagccgagaaattggtctgtcggctcctggttgcactttggggaaggagaggaagtttggggctccaggtagctccctgttgtgggactgctctgtcccctgcccctactgcagagatagcactgccgagttcccttcaggcctggcagacgggcagtgaggaggggcctcagttagctctcaagggtgccttcccctcctcccaacccagacataccctctgccaaactgggaaccagcagtgctagtaactacctcacagagccccagagggcctgcttgagccttcttgctccacaggagaagctggtgcctctaggcaaccccttcctcccacctctcatcaggggtgggggttctcctttctttcccctgaagtgtttatggggagatcctagtggctttgccattcaaaccactcgactgtttgcctgtttcttgaaaaccagtagaagggaaacagcacagcctgtcacagtaattgcaggaagattgaagaaaaatcctcatcaatgccaggggacataaaagccatttcccttccaaatactcgacaatttagatgcagaacatttctctgtattcagacttagagtaacaccagctgaaaactgcagtttctttcctttggatacataaggcttctctatcggggtacgggacagggaggaggcctcatgtctgaagggggatttaggggcgagagccccagccctgaccctcggtcctgtgcaccgctttggggcacagtctgatggcgcctttgctggcgccttagtatggttgactccggatggacaaaagaaaaaaaattttttttcttgaatgaaatagcaggaagctcctcgggagcatgtgttttgattaaccgcaggtgatggatgctacgagtataaatggattaactacctcaatccttacagtaagattggaactaagggcagggactcatgcataagggtatgaatcccagccaggacaagtgagttgaggcttgtgccacaaaaggtttgtccttggggaacaggcaggcctgccaggatcccccccatatcgattgggctgggagggctggccatgaggtccccactttctgctttccttgcccatgtgtcacccctttggcctccagcttgtccctctctcactttctatagctttgttggaccagatggtgaggaaaggaatggcctcttcccttctagagggggctggctggagtgagacctggggcttggcctggaacccaccacacagccccaaagtcaggaagcctggggaaaccagagctgagacctcttcaacagggtttctttgagatcctacacctccattgggccctttttcagtcttcaatgggggcccagttggctctagaaggagaagaggtgaagcaggatcctttgccctgggggagtctgagggcgcggtccttggactcattcaggccgtctttgtagttgggggagttccactgggcgatcccagcccctccccacccaccctctaatggacctcctcatagaagccccatttcacttttgttttatctacctcttagcaaaacaatagataaattaggtagtggcagctccacttgcttaggttagggggggaaaaagatttctttttccaaaggaaaaaaatattaccttgagaatactttccaaaaaataaaattaaaaaaaaaaaaaccaaaaaaaaaaatttttttttaaaagggagacattttccagtgaccactggattgttttaatttcccaagcttttttttcccccataaataagtttcactctttggcgattttcttcacttgtttaagataacgtgctagctattccaacaggtaacagctttcacagtctgcccctggcctgtctcaccccatcccccaccctattcctgccagtgagtccttcctgtgcttctctcccttctcccctcccagccagctgacttcagtcacccctgtcccccctcccctgccaataagctcccccaggaataaaggctttgttttggggatgcttaaatcttgactggcacttcccggctgtgggggctggggagccacttgtaacatttctgtgcagattttatgttagccactgctatgtaaaagcacgttcaaaatgaatttcagcagattatgtgttaccataatgaataaacgtcctctatcaccatttggagtctcccttttctccaggatcttgatcctggtccccaaaaccagagtgaatcaaaagagcttcctcccctgaggcaaagtggatttgtaagcagttctgaaacatcacttactcagaagagggaacgatgtattttgatgagtgcaaattgggaagagctggaggcctactgcttgggacagttttttttttttttttttttttaaatatgagtgctagcttattctgtaattgcggcaactttgaaaattgtattttactggaaatctgccagccatcaccacccgattttgattgtatccttcctcccatcctttaatctgttcattgctttgggggaggtggggcagctggctcacacgttggagtttgttctttgatggatgaacgaacactccagttttctttcccgtgaaggttgtttcagccacaaaccacttcattttgctgtttcaatttcaaaataaaaggaaacttatattgaaagac

SEQ ID NO: 6864 - DNA, 32 bp, Homo sapiens
aggtgtgagggcataggagaaacactaggctg

SEQ ID NO: 6865 - DNA, 510 bp, Homo sapiens
cagcccagggctctctgggcagctgatgtctgcactgagtgggtttcatgagccccaagccaaaaccagctccagtcacagctggactgggtctgcccacctcttgggctgtgagctgtgttctgtccttcctcccatcggagggagaaggggtcctggggagagagaatttatccagaggcctgctgcagatggggaagagctggaaaccaagaagtttgtcaacagaggacccctactccatgcaggacagggtctcctgctgcaagtcccaactttgaataaaacagatgatgtcctgtgactgccccacagagataaggggccaggagggattgaaaggcatcccagttctaaggctgctgctaattacagcccccaacctccaacccaccagctgacctagaagcagcatcttcccatttcctcagtacccacaaagtgcagcccacattggaccccagacacccctctgcagccattgactgcaacttgttcttttgcccattg

SEQ ID NO: 6866 - DNA, 1990 bp, Homo sapiens
gcccaaccggggagcccccgccccgccccacattccgacaaccgatgctccagccaacccctgtggagcccgcacccccaccctttggggggggcccgcctggcagaactgagctcctctgggcaggacctcagagtccaggccccaaaaccacagccctgtcagtgcagcccgtgtggccccttcacttctgaccacacttcctgtccagagagagaagtgcccctgctgcctccccaaccctgcccctgccccgtcaccatctcaggccacctgcccccttctcccacactgctaggtgggccagcccctcccaccacagcaggtgtcatatatggggggccaacaccagggatggtactagggggaagtgacaaggccccagagactcagagggaggaatcgaggaaccagagccatggactctacactgtgaacttggggaacaagggtggcatcccagtggcctcaaccctccctcagcccctcttgccccccaccccagcctaagatgaagaggatcggaggcttgtcagagctgggaggggttttcgaagctcagcccacccccctcattttggatataggtcagtgaggcccagggagaggccatgattcgcccaaagccagacagcaacggggaggccaagtgcaggctggcaccgccttctctaaatgaggggcctcaggtttgcctgagggcgaggggagggtggcaggtgaccttctgggaaatggcttgaagccaagtcagctttgccttccacgctgtctccagacccccaccccttccccactgcctgcccacccgtggagatgggatgcttgcctagggcctggtccatgatggagtcaggtttggggttcgtggaaagggtgctgcttccctctgcctgtccctctcaggcatgcctgtgtgacatcagtggcatggctccagtctgctgccctccatcccgacatggacccggagctaacactggcccctagaatcagcctaggggtcagggaccaaggacccctcaccttgcaacacacagacacacgcacacacacacacaggaggagaaatctcacttttctccatgagttttttctcttgggctgagactggatactgcccggggcagctgccagagaagcatcggagggaattgaggtctgctcggccgtcttcactcgcccccgggtttggcgggccaaggactgccgaccgaggctggagctggcgtctgtcttcaagggcttacacgtggaggaatgctcccccatcctccccttccctgcaaacatggggttggctgggcccagaaggttgtgatgaagaaaagtgggccagtgtgggaatgcggcaagaaggaattgacttcgactgtgacctgtggggatttctcccagctctagacaaccctgcaaaggactgttttttcctgagcttggccagaagggggccatgaggcctcagtggactttccaccccctccctggcctgttctgttttgcctgaagttggagtgagtgtggctcccctctatttagcatgacaagccccaggcaggctgtgcgctgacaaccaccgctccccagcccagggttcccccagccctgtggaagggactaggagcactgtagtaaatggcaattctttgacctcaacctgtgatgaggggaggaaactcacctgctggcccctcacctgggcacctggggagtgggacagagtctgggtgtatttattttcctccccagcaggtggggagggggtttgggggcttgcaagtatgttttagcatgtgtttggttctggggcccctttttactccccttgagctgagatggaacccttttggcccccgagctgggggccatgagctccagacccccagcaaccctcctatcacctcccctccttgcctcctgtgtaatcatttcttgggccctcctgaaacttacacacaaaacgttaagtgatgaacattaaatagcaaag

SEQ ID NO: 6867 - DNA, 1056 bp, Homo sapiens
cccggggcaggccacagaggccaggccagggctggaaggacaggcctgcccatgcaggagaccatctggacaccgggcagggaaggggttgggcctcaggcagggaggggggtggagacgaggagatgccaagtggggccagggccaagtctcaagtggcagagaaagggtcccaagtgctggtcccaacctgaagctgtggagtgactagatcacaggagcactggaggaggagtgggctctctgtgcagcctcacagggctttgccacggagccacagagagatgctgggtccccgaggcctgtgggcaggccgatcagtgtggccccagatcaagtcatgggaggaagctaagcccttggttcttgccatcctgaggaaagatagcaacagggagggggagatttcatcagtgtggacagcctgtcaacttaggatggatggctgagagggcttcctaggagccagtcagcagggtggggtggggccagaggagctctccagccctgcctagtgggcgccctcagccccttgtcgtgtgctgagcatggcatgaggctgaagtggcaaccctggggtctttgatgtcttgacagattgaccatctgtctccagccaggccacccctttccaaaattccctcttctgccagtactccccctgtaccacccattgctgatggcacacccatccttaagctaagacaggacgattgtggtcctcccacactaaggccacagcccatccgcgtgctgtgtgtccctcttccaccccaacccctgctggctcctctgggagcatccatgtcccggagaggggtccctcaacagtcagcctcacctgtcagaccggggttctcccggatctggatggcgccgccctctcagcagcgggcacgggtggggcggggccgggccgcagagcatgtgctggatctgttctgtgtgtctgtctgtgggtggggggaggggagggaagtcttgtgaaaccgctgattgctgacttttgtgtgaagaatcgtgttcttggagcaggaaataaagcttgccccgggg

SEQ ID NO: 6868 - DNA, 1592 bp, Homo sapiens
agtgacctgtcattccgagccagcgaaccccagcagtaggaatccgtaccctagggatctgtctgtcatttctctgttgctcttgtgattggcaagtacagtatcctttgggaaggccatccccctcaggactgtcctggctccgacctttgtgtacactgcagacgctggttctgaggaactgttgtttcggcctcagtgaggttgcctggatgggatctgtattagacttgagtgcaggtctctcagcactgacccaaggagttctgttatggtactgtacctgtccagtcactggttctctcctcatgtcctctcgccccatgaggttgtgttgtgtcttctaagcgtggtactagtgcttgccacctggtcaccagacctccaaatatggctgccaccaccaggacctttccagttactccttatatgtgtgttctatggaggggcagggaaaaggtggcacttgtgagtgtgtgtggattggcagggggtccattcactttgggttccatcttgctttaaatttcttcattttgattaagagacctctttttgatctgtattgggctaaccagagccaaatacttttgaagagtttcccagggactagtcatggtaatagcatataattgatctgaatgagatggagagaagaatgaaggggtggtggttctgggtttgatttgagttcacctgtgggcagtgggcagtgggcagtgtcttggtgaaagggaacggatactactttttgcctcaccgtaaagtactcactagtaaatatttccttctctctttactcccactttttacgtttgcaggtgccaaagtaatgtccacttttccctttcatgctgcatattaactggttaattatactgcagaaaccttttcacctccactagtctgatacagtacatctgtacttccatataccttgcactgattttgtctgagtgccctgggagaagtagaaaatgattgaaagtgacttccgtatctcagcccatgactcagcaaggcagaatggccacccctgccaaagtttgcttctcttttcaacagtgcctcaccctccctctaggattaaagtgcttctgcccttccacgaactcctcctccatttcctttttgggatttgtcaccatccttctattctctggtcttctatttttggtgttgttcaagtgaaggaagagatgttccctctaatttctctctagcccattataacctgctatcttggggcaacttttgatgtatgacatgtcacccttcccaacttggtctcctccaacatgctgtcttcatgtggagccctcaccacaatccctgactccggtcatttgtgcctttctcttgtcatctctgtacactacttatattcactgtgggttgggggagctaattttaagcatgttcagtggcagctcccctccagtttcagtgtcactgttaaaatttatcaaaaagcaacttcactaggggttttcttaagggataaaggccttttacagaagctaaacccttccccacatgtggtagaatgtgctcttctatatctactcctcaataaagcatgttctctgctc

SEQ ID NO: 6869 - DNA, 642 bp, Homo sapiens
atctggggaagggcgggtcaggcccacagccttcctgcaaagcccaggacccaggcagtccacctgcaccccttctgggctgggaggaaaccagctccagatgggttttctctggaggacaagcagttagaggagaaaaaggaatggagcagagcctgtacccctaaccctaacagctaaatcaaggacctcagccttatataatcattgtccccaccactaccatggactggacaccttcactccagctggacaaagactctggagagagagccattggctggagttgagactgtccccagaacccttggtcttgccactcccccactccttcttccctctctccctttctcctctccctgctttcttgaaaaggactgaatcgccactacagcctgggtgcaaaatcagcaagaaacattgagtatttttttttctttgtatgcctttggccttgcacaacccatttgtgagcaaaagcagaagtggaccaccatcagctcccacccacccagcgatttttccttggaggtcagcccgttacccccataactgatttacctacttaccatactgggaggtagaagagatgcagagaaatgtggaatttgtggacctatgggtaatttatgctttcctcct

SEQ ID NO: 6870 - DNA, 1371 bp, Homo sapiens
tgtgacttctttaagcggacccgctattatcagatcatgcccaagtaccacgcagtgcggatccgggaggaggagcgctacccacctccagggagcaccctgcccaccaagaagcactgggtgaccagctggcagactcgggaccaatactactgacgtcctccctgatcccaccccctcctcccccagtgtcccctttcttcctatttatcataagttatgcctctgacagtccacaggggccaccacctttggctggtagcagcaggctcaggcacatacacctcgtcaagagcatgcacatgctgtctggccctggggatcttcccacaggagggccagcgctgtggaccttacaacgccgagtgcactgcattcctgtgccctagatgcacgtggggcccactgctcgtggactgtgctggtgcatcacggatggtgcatgggctcgccgtgtctcagcctctgccagcgccaaaacaagccaaagagcctcccaccagagccgggaggaaaaggcccctgcaatgtggtgacacctccccctttcacactggatccatcttgagccacagtcactggattgactttgctgtcaaaactactgacagggagcagcccccgggccgctggctggtgggcccccaatgacacccatgccagagaggtggggatcctgcctaaggttgtctacgggggcacttggaggacctggcgtgctcagacccaacagcaaaggaactagaaagaaggacccagaacggcttgctttcctgcatctctgtgaagcctctctccttggccacagactgaactcgcagggaatgcagcaggaaggaacaaagacaggcaaacggcaacgtagcctgggctcactgtgctggggcacggcgggatcctccacagagaggaggggaccaattctggacagacagatgttgggaggatacagaggagatgccacttctcactcaccactaccagccagcctcagaaggccccagagagaccctgcaagaccacggagggagcgacacttgaatgtagaataggcagggggccctgccccaccccatccagccagaccccacgctgaccatgcgtcaggggcctagaggtggagttcttagctatccttggctttcagagccagcctggctctgccccctcccccatgggctgtgtcctaaggcccatttgagaagctgaggctagttccagaaaacctctcctgacccctgcctgttggcaggcccactccccagccccagccccttccatggtactgtagcaggggaattccctccccctccttgtgccttctttgtatataggcttctcacggcgaccaataaacagctcccagtttgt

SEQ ID NO: 6871 - DNA, 961 bp, Homo sapiens
gggccgccgtgcatctgcacctgagaggacggactgccgcctctgggtccccccaccgtggtgcccctcaccatcctcctgggggagcagggggtgggttctccctgatgaccaggttctgtctctatggaagtcactgcggtgataggtctgtgatggtccctaagtgccagtccatctctgtggagacccctcggtggcctccctatctctgtgggcgatgcctgagggttagggatgtctccaccctgatggggtgtcccagagacattttcccatggcagtcctcctctctgagaccagggctgtcacttttctgccaggggtactgggtccccctcagcaccctccacagcacaggccttccaagtggatgtcccgttgccttattcccccagcccacaaaggcaccctggccttggcctgctgaagtgttaggaagagggtgggtgccctccagacctggggactgagtggggaaaggagttacacccgtgagtggggaatgaggctggtcctgcagcctctccctccgctcagggcttgaaggtcggtggcggagggggtggctctcacagggcccaactctaaagtggaagaaccttgttagaccgagagcttgccatccagccaagctgctcgaggccctgcagtggccttggcaatgtctgtgccacctcctgagccctcccagcatgtcctcacatgctcatgcccacccgctcctccacaagcctagtccatcctgcctgagctccagcccccagcccccactgtgcccagacatgtgtgctcagggtggctttctccctaggaccttctgtgtatatagttagttttataaccctgaatgcccccacccttcccctaagcacacaggggttaaagctgtgtgtccctcccagtggctgtggcagtgacagtgacacccacacccacagtaaagaggagactgaatgag

SEQ ID NO: 6872 - DNA, 217 bp, Homo sapiens
tggttccaggtccagccctgacttcatcctcccttctctgtccacaccacgagtggcacatcccacctgctgattccagctcctggccctcctggaacccaggctctaaacaagcagggagagggggtggggtggggtgagagtgtgtggagtaaggacattcagaataaatatctgctgctctgctcaccaattgctgctggcagcctctcccgtc

SEQ ID NO: 6873 - DNA, 2175 bp, Homo sapiens
gtcacctcctgcctggaatcttgccatcagcaacctcctccccagtgcctcctggatcaagctagagactgctggcaccccaggaatgtccctgcccatcctgccgtgtctctgttcattcttggatttaacttattactttttctgcttctgtttccaccccagctgcctctcttgtcctgagggttaggctggagtgacagtttccgcccaccccccagcccaagaaagaggctgccggaaagaaaatgctgaccattggaggtgcccaacagtagaatgggctactgtgaggggtagtaagagccccatttctggaggtatgcaaatcttgactggacagccagctctgagattttatcagggcacttctatacctgtgggacattggactggatgagccctgagccagcttccactcctacctgaatagagaactcactgcacccacccacaacacatgataaacacatgtcctcactgaatgttactgattgcggctgagggcctgcctctggctgtgtggggaggtgggtggagaggtgagcccaggcactgctgaggggtgcggtgatggggtcgctgcgccgcaatcccaccactgatgagccacctgggaggtctgggaggacagtccatccatgggccgccctcggagagaggcttgttctagatgtattggctgtctgttttttgatgtctctgtgtgccaaacagcctggaaatggggtacgcgtgtcccttgtgtgggtttcccaatcccttccgcccaaggctttcctgggacacatggagcccagctctctggctgtcttaccatgagaagttggtaagttggctgtgagggggttggatccaggaagcagccctgggacagcccattctgctgttgatagcaggaaaccacctgctgggagacaatgggggtggggaaaagcccaggagagcagtgggtggggctgggcatccgtggagtggggctttaggagaccttgaacggccccaccctggaatctcctacaggaaggtgaggaggtggcaggttccacccttctctaccagccccgctcgctcgtgggagttaaccccctaggggagaagagtcttcactggggttcgacccatgggggcctggcatagtcatgcagaatggggcgggacaatgccaatgccttgggactcagacagggctgagtgcctccaccctgatttttgcctctgcactgcgcccccacagcccactcaatgccagcctccttctccaggcagagagccccatgtcaatgctggccaaagctctcaggaggattggaggtagaactggccctggtatgccaacaggggtgcctcttttagtgctctcccaataatgctcatcctgggggcatcaggacgcaggcaggtggcagagctgggggcagcttgatggcacaggcagccccaaagatgccaggaacagggactgtccgggtgtgggttcccagtgagatagggccctggaaggagtgcagcagttactgacaatatagtgccagggttggccataggagaatgagcccaagcgtaagtggaagtttccctttactttcagggattggtcaggggtggcagaaaacatgtgggttctttgtgtagatgtggctagttccaattagagaagtcctgcagctgatgttgccctcaccgtgatagcaggaggatgttgagaaatgggcttgggagacctggaggagaagttaccctcggcccagacgttgccttcctttcatcacagggcctttaactcctcctagggagtagcagagtggccctagggaaagtggccatcctgaaacctagtgttgctgtgacctggtgacagaaatggaaacctctgtggctcttctggtcatccttggtgggagtgggaatggtgtcacctttctagagggccatctggcaccatgtaatcacgccacagatctttacgaagctcctgctatgtaggaaacactatgcctggcactgggtatccattaaaatgtaaaatgcacgtgacctggcaattccacttctagaaatgagccttcagaagtgctcatacaaaagagctcaataagtatcatgcactaattcattgtgccaccagagctccctatgcagccttttaaaagaataaataggatctgtagcacc

SEQ ID NO: 6874 - DNA, 859 bp, Homo sapiens
cagggccccagccagtacccgtggaggacccgggaaattgcaccttacagacagtggaggggtgtcccctcccacaggcaagaaccagaggcccaggctgcacacccatttcagccatcaagaacccacacagacggcagggaaggtggacacagtatgaactactgctgatgtctctgttggggatcagagggctggcgggaacgcgagaagggcaccagcagcattccacacccagctcttcctcaccttcctgtctagtttgaatttcttttttttctttttttttttttttttttaatttaaaaaggaaaatgggtggttgggagagaaactagaacagaagatgtgcaatagggctcagagcagccccaggaagtgggccatgtctgtggggagcaggggcttgctgagcccacctgctattgttctgcacgaggctgggcctgcctcactctccagggcctcatgccccattctgggcctgtggtgctcgtggctgaggctccacagggctgcaagtgccctgccaggctctaaggcccgaagaacaggtgatatcgggggcgctgcagagctgggctctagcaggacagttcttttgtagccaggggaccctagaagtggggtggggcggctccagggctttccagcataccctgcccctggatgggaaaggcagggtcagggcccactgagacccatgcagagtttccaggtgtgcactggaagtgaggtcacatgagcagcgtgggaagaagactctgtcaagactctcagaagaacctggagtaattgtgcctgaagctcagcgtgaagtctgaaatatgcaacagaagaaatatatctctatctctct

SEQ ID NO: 6875 - DNA, 518 bp, Homo sapiens
ttctagccctcagggatgaggatgaaaagctggaaacttccacttccccaacctcagagcctgactgtaatgaagagactggcagcacctcctggaacacaagcctaggtgaggcccagtctttcttgggtcttattatttgtgaaggtctctctgcctgtcggctggggcagagactgaaatactgccacctacctttggcatttaatgttcctctcctggcaaaaattcactgccacagacaaaccacccccactcctacccagccagccctcaaaacacaaaggaacaaagacagtccactcagacacttatttaataactgtagaaatccaaaagaattagcatcaaatcttgaagtcgtgagtgaagctgcgggttggcttgactgggctcagccactgagctgcctcaaccggccaaggaacgggattatgatgactatgcggacttctatattgtcttcatctcattgtgtgtattatgtatttagtttcaataaagcatttgtaccaatg

SEQ ID NO: 6876 - DNA, 285 bp, Homo sapiens
ataaagcagcaggcctgtcctggccggttggcttgactctctcctgtcagaatgcaacctggctttatgcacctagatgtccccagcacccagttctgagccaggcacatcaaatgtcaaggaattgactgaacgaactaagagctcctggatgggtccgggaactcgcctgggcacaaggtgccaaaaggcaggcagcctgcccaggccctccctcctgtccatcccccacattcccctgtctgtccttgtgatttggcataaagagcttctgttttctttggc

SEQ ID NO: 6877 - DNA, 1114 bp, Homo sapiens
caaaaatgttcctgtgttccagggtaatgccaggtgggttttgagagctgggtcggtactgcagacatctcttctccgttgtcgggtgccgtctctgctccttgtggttattgctcagccctggcatccccaggggaatggcagcagtgaggtagatgggaggacatttctggtcagggaactggcatcccattcagcatctcaggactcacaggccaacatgtgttccatggctgggaattgcctaccacccacatcagcttctgtttacctttttggcatcaaataatgaacagtgtttggaaatctttctacaggcaattacctccccaagagaagccttccttattttggagtaaggtcctaagatagctggatgaatcaggaaaaccatgtcccctctaggtattattaatataagcaggaagggatctactataggaatgaagtatttataaaccactgaaagggatagagaagtgaacattggagaaagccagtagcaactgtgagaaatcagcaacttgcaggaggcacagaaaactcctgctgatggtctcagcttccagcagcacaaaagcagatgatgtactggaaaatgctcagaagatgctacaaaacctcatgcctactgtctgccactgctggagaaggaatcatggtttctagaagtgcctctcattagtggactttaaagcaaatcctggctggcaggaaattctgaggaatatagctcttaggcttccagcctctaccatgcaggagagaacacagaaggactgatgtatgttggtggatccatgtatgtgtccagcacagcggcctgctggactctgagaactgggaaagatcagagcaagccttgcctcttatcttcgggaaaccagaatatgtttggggtggtaggagccacacagactcttctgagccccctcactcacttccttccccctgtgcctttcctttgagagtgaaggtgggtggagttgaccagagaaaggggagagaattcgggaaagacccaaagtgtttgtaattcttctttgtccttttacctacagaaatggtcacatggttctatttaaatagcctaataaacacatctggagcctgt

SEQ ID NO: 6878 - DNA, 72 bp, Homo sapiens
ctctcgggcccaagcaaccttctggaaaacgggttaataaataaatcaataaagaaccttcaagtttctact

SEQ ID NO: 6879 - DNA, 643 bp, Homo sapiens
gccccgccccgtcccataccggcctgcgcctgcgccggacgctccgcggccccgcctccggacccggggctgggcggggcgccggtgctagtggaacgccgagccagtggcggctggtatcccgcggcggctctggaagctggacgcggaccacggcccgggagctagaaactgaacgcccgcataataaagactggaaccctcgttctcagctctcaccaagtggactttttgcggggtgtggcggccgggtctcgaccacagcgtggatcaccggctgtttaggaaactgcagctgcacaacgtggggtgcaaaactgccccgcttcctttacagctcttctcaaccctcacctccatcccccgtcacccaggcaccttcgcttccagatgctgccaggctgtcactcaattcggtcatttcattcatttatcacacatgggcactggggttgggctaacagcaagagacaataggcctttgttcctatttattgggtactgcttacgtgctaagcagatcagtttatttaatgcttgcaacgactctctgaggtagaaaatattgttaattccgttcaggatcccggctacataatctgtggggctcaatacaaaataaaaatgtaggggctccttgttc

SEQ ID NO: 6880 - DNA, 188 bp, Homo sapiens
ctgccccaacccccttggggtggggcagaaggtgaagcatcccaactgactagagactcaggccctgcagggccctatagaacctgtggccatccctgagcaccctgccaccaggtgacctcggccatactcactgccccccttgggcacccactcaccctagaataaacttaacagtgtcccgtggt

SEQ ID NO: 6881 - DNA, 430 bp, Homo sapiens
gtcctgccccactttcccactcacctttctccactgggtgccaagtcctagctcctcctcctgggctatattcctgacaaaagttccatatagacaccaaggaggcggaggcgctcctccctgcctcagtggctctgggtacctgcaagcagaacttccaaagagagttaaaagcagcagccccggcaactctggctccaggcagaaggagaggcccggtgcagctgaggttcccgacaccagaagctgttgggagaaagcaatacgtttgtgcagaatctctatgtatattctattttattaaattaattgaatctagtatatgcgggatgtacgacattttgtgactgaagagacttgtttccttctacttttatgtgtctcagaatatttttgaggcgaaggcgtctgtctcttggctattttaacc

SEQ ID NO: 6882 - DNA, 203 bp, Homo sapiens
ggggcttgcccagggccacagagctacatggtggagcaggaagcacacgtggcagtgggggcaggcagccctggatgtgaatcctgtgcaaatcctgaccccaccattgtcagctcaatgacctggagcagctgacttaccagggcctcagtttcattaactggtgaatggagtcataatagaatctcctcggaggtcacaat

SEQ ID NO: 6883 - DNA, 501 bp, Homo sapiens
aatatattcctgagatttcctcctggcctttcctggttttcatcaggaaggaaatgacaccaaatatgtccgcagaatggacttgatagcaaacactgggggcaccttaagattttgcacctgtaaagtgccttacagggtaactgtgctgaatgctttagatgaggaaatgatccccaagtggtgaatgacacgcctaaggtcacagctagtttgagccagttagactagtccccggtctcccgattcccaactgagtgttatttgcacactgcactgttttcaaataacgattttatgaaatgacctctgtcctccctctgatttttcatattttctaaagtttcgtttctgttttttaataaaaagctttttcctcctggaacagaagacagctgctgggtcaggccacccctaggaactcagtcctgtactctggggtgctgcctgaatccattaaaaatgggagtactgatgaaataaaactacatggtcaacagt

SEQ ID NO: 6884 - DNA, 2048 bp, Homo sapiens
aactgatctgataagacctcagatcagacagaggtaagtgtattgtttctcactttgattagggctttttgttactgtttgacagtgcagcgtaagtatgcacagatgaagatggaactaagccgagtaagaagacatacaaaagcctcttctgaaggaaaagacagtgtagtcctgcaaaacattttgaggtacattgttttgtctcagctattttgtagcagactcgtgcccccattagtgtgcctctttggaaattatcgcccacatttgtaatatagtcgccattgaaaagttaattatcctttttttagggattttgatgtcatttcttttttttttttaataaaaaggttgaactgtttttttttttctttttggtattaagtccatcttgtgttggtacattggcagagacatatgctttaaaaacttaaatatttcggaggcacatgttggactactttgttttaattaaactgctagtatttctttgtcaaggatgtttctagttttttgctttattgccttgcattctaatgcagtttgttctgtaactcgagagccagtagcattggattgatggaagtgtagggtttatgaattattgcagctgactaccatacctcacacagcgttggtgttgtgagcggcccatgaaaagccaaattaaaaatcaaggattcagtcaaactaagcaggtactcatgccaggtactcctttctctacccacatccatgtttgaatgctattgcctgtgatctttacgcttaactgttgtgtatcttttttgttctttacaagaagtgcagaggggttttttgtgtattgcgtgaaaacttataaaacaaatgttaacagaatggaattttttttcaactgtatgtagggctgcagtggtggccagaattagatatctttaaagaattttaaatacaataaacacttcatattattcgccttgttacactcaatgcaattctcaagtctataagaggtatgtgcttaatatttcctactgtgtaggagaatttgcagtcagccataggtatgtaggaatagtcactcactggctgatacatttaaagcagcagtgtgaatagcaaggacagacaccttcaatttgtgaaatcaaagaactgatgcactatatagaacgaatttgggtttttaaagaaatattaaaagttaggtactgtaagtgttcttaaaacctgtaaacttcattctgtgggctagtggtgtgggacaaaatattcctaatgaaaggaagtaccaattagttgatttgttggtggcattccccttttgggaaagcaatgtaaggttatgtctgtgtatgtcattcacacttaggcaagcatacacaggcacatggctttaagaaccacactgatgccttgataattaaaaagaatacaagcattccatgtacacatgttaattagcagttagtgactgggccaacactttctcataaaaattggccttttacatgttgtctaattatcatttttccccaaattttgcgttgtaggactactgttcgaagatttttggaagaatactgagaacggcataaagtgaagatcgacatttaaaaaatgaggtgaaagaaagctatagtggcatagaaaaagtataaagctcagttagtttttttattattattattattaaaagttaattcaggactgatgtgacctaccagatttcagaacatgtgttaatagtatatatgccactgaaaacttaggtcctgtatcatacttttttctttaagactttttaagaaatattacttaaacatgtggcttgctcagtgtttaattgcaagttttcaatcttggactttgaaaacaggattaaacgttagtattcgtgtgaatcagactaagtgggatttcatttttacaactctgctctacttagcctttggatttagaagtaaaaataaagtatctctgactttctgttacaaagttgattgtctctgtcattgaaaagttttagtattaatctttttctaataaagttattgactctg

SEQ ID NO: 6885 - DNA, 1329 bp, Homo sapiens
agccccccacccctccctgccccctccctggccttcttccacctatccaccccaatgcctctcagcaaactgggcgaggtcagattagacaggcttgggacagcagggaaacatcaaccgacgtgtcacagaaaaagccacagaaggtctcagatcagcatctattctttgggttcaataaggggttcatatcttttttagctgagggggacaagaggagaagtcagtggacacatggaagttactcgtgaccaccagcttgctcagatattctcctcctcccctcactggccccacacccctggctctcccagtcaccctcccctagccagtctcccagcaagggtttaagagatggccgctgtgtgctggtcacaggaagtgttgaatggattggcttgcaaagggggtaggtggggagagataggagggcccagggactcatgggacacctttcccacagcctcctcgattgctgtgagcagaggccactcggagttaggggcatgggcaatagcaagctggcggcagagtccagcccagcatatgacttgccctgaatggaagctgctgaaacgggtgcctttgggtggtggtcggcttgcctctgaggccaccacggcaccagcagaatacgtatttcttctccttggctgcactggtttgtcgatctagttcagttcaactcagtggatgttctctgaatgcttactgggtgccaggaccacagagagatgttagtcactgcccagttcttagagccccaacacagataccctcatcccagggcccccagacacacccctccgctggactcacaactgtctggagtttctgtctgatggatggtgtgctttcatatgccactggcttccttggacatagatcagacaaaagccccgggatctgtttggtagcaggagaaatgaaggaagatgaaaaagcaggcagggaagggggtagtaaaggactgagagaggagggaggtggctggagaaggaaaaggaacattgctcgatgctcccatctggtggcggcctcaggaacccacgggaacctggaaggaggctctttgtgagacctgggcaaaggatggggcagctcgtcgatgatttttttgtgtttccaggcttcctgtgtgatcctggccctccggccgctagagagaggattgggaaaccccactgtcagctctgcatctgcccccactaccctcctctgccctattctgtccctgcccctccaagctgaagaaggtccttgtggggcgtcctcatttcttcctcaaatataaggaggaagataccaattaaaagctcatagtatcaa

SEQ ID NO: 6886 - DNA, 244 bp, Homo sapiens
caggagggcagaccacattgcttttcacatccatttcccctccttcccatgggcagaggaccaggctgtaggaaatctagttatttacaggaacttcatcataatttggagggaagctcttggagctgtgagttctccctgtacagtgttaccatccccgaccatctgattaaaatgcttcctcccagcataggattcattgagttggttacttcatattgttgcattgcttttttttccttct

SEQ ID NO: 6887 - DNA, 139 bp, Homo sapiens
gaggtggacacaacagcagtctccttcagcacggcgtggtgtgtccctggacacagctcttcattccattgacttagaggcaacaggattgatcattcttttatagagcatatttgccaataaagcttttggaagccgg

SEQ ID NO: 6888 - DNA, 148 bp, Homo sapiens
gtccagttgagtcacaagagaagcctgtcttgatatatcatctcagaaactttcctgaatatgtgataatatatggaaaatgatttatagatccagctgtgcttaagagccagtaatgtcttaataaacatgtggcagcttttgtttg

SEQ ID NO: 6889 - DNA, 157 bp, Homo sapiens
agccaatggcgagagatcaggtccgaaatgctgcattgctgcagtttccaccactcttatacaggaaaactgtccaaattatctaaagatcctcctgagaagcttaaaacatcttaaaatacactgatgggaaacatgctctttcttctgcctctgt

SEQ ID NO: 6890 - DNA, 715 bp, Homo sapiens
aagaaagtggatgatcagctcactaccacatcaaaggtgccaactctctaaaacgtagactctgtgcagctttgaagcctggaagacaatacctaccaacatgtcaaagccatggtggcacatttctgctataatgaagattaaatagaataacagttccaggataacactgattcctgacaacagcgtgagatttcaacagaacttgtttggaacaaatactcacttaaaacttcagcagaagaaaaattacttagtccttaggccaaccaatttaactgcagtgtcatgtttcacaggccttcctacatttagaaatcgtcacacagctgtgataagagtagattattttactatgaaataattctgaatagatgaaagcataaaatgtgagaaactgaatgtattattcaggaagaatactgagtgccttcatttaactaaagttgaatgtaaaagtcaatttgcacttctttataatcctctggtttagaattataaattgttaaaaccttgataattgtcatttaattatatttcaggtgtcctgaacaggtcactagactctacattgggcagcctttaaatatgattctttgtaatgctaaatagcctttttttctctttttactgcaacttaatatttctatttagaacacagaaaatgaaaatatttagaataagttgtacatttgatgacaaataaatcactatt

SEQ ID NO: 6891 - DNA, 4177 bp, Homo sapiens
tggttttccttaggaagtggagctacatggatgatgtgagcagagacgcataacatccaattctgagatgaaacagtctaaaataggagtaaagcatgcactacttgttgaagtgtgaaatggagactctggactttgggtatttttgtaaaacttttgatatttctgtatacatttaaaaaatcaattgccactacagtagttccttaagaataatctagttatattttttgaaatcacatataattagactttataatatatatactttttcatatataattagatctttctttgtaatttcatatgtagttcttcatagggtctcagatacaatggtttttataattgacatattgaaaaagtatatgaacataatgaaacacctcatttatttgataattcactaatgttttatattcatatattaggaaagtgaacttagcaagctttttggaatttaaggatcacatttagacatctcatgggctgatgaatacagctggtatctttgtggagctttctaatttacaaaatgctttgtagaccccattgtctttaaaccatacaacatgcccgtgaagctgatctggtgggtatgtttattcttggttttcagtagggaaatagcagttcagagagaggaagctctctgtcccagcaccgagactcactcctaagtcttctgattccatgagcagtcccccttcccccataccctgctgtctccacggagggaggtcacagcccatcacgcaggacactgtgattgtgttgatgcagctggctccacagctgtgcattccacagagattcagaaggcacctcttcggtcaaacatggcccctctataaccccactattcttctcctataaacccttcccccttctctgcacccaagccttcgccaagtaggcgcactctttgtgatattgtttcagcagacttctttcagcagctcgtgtttttctaaagtgaaaggcatggtttgtcctgcttaggttgcccttcccagagggatggtttgaggggagctgatgagaagagaggtatctgttaaaacattactgctctactcgaaacaagatggaagcctaaagcccaagtcgagcagctcccagcactgctgtgcagacctagaggtccttagaacatagtctaagaaccattcattgtagccattttatagttgagtaaactgagatcttaagtctcctagtctactgaatttcatatggtgtataatacagatttatatggtaaagatatacatatacattgtgctcaactatacattcctgaatccatttaggatttgtgatttatgtcttgagtaataatataaagtcaactccagactgataggtagtcattagccatgagaaatgtttcaggatggctagggaagacttgtgttttgcctgacagccatttgaatgttaggaagcttcggggagacaagttttgagagaagccccagagggagctatttccttgcaccccccagaggtgaatgaggtattctataagttagtgtctataattgtgaaagtacaaacttcttgtttttgtcaaattaatggtatgaaatttctctccccctgcttgaagagttttctaattcgtttctagtgagcaaaacaaagaaggtgcttgagtcactgaaatcaaagtactcaggcacacagcccactgacaagagacacctcatccattaactgctgttttgtaccacttgccgccctgtttctgtcaaatacctagtgaaaaaggcctaaacaattgtaatgatattatttattgggcattttgtgccatacatggtgatgagcagtttgcatatatttatttatgatcttcttaaaaccattccatgaaataggaactgtaattatccccaattctaaaagaaaaaacttagttttagagagttagtaatctttgcctaagggtcacaaagcacctatgtgtagaagctagggttcaaggcagatctgtgattccagaagctgttctctaaaccactatggagaactgcttagattcattgtctatgggtacattttataaaaaggcagattctagttcagtgtcataaggaactttctagtaattagagctgataagaaaagaattccccaggagaaaatggaaacactatcccagcaatctgaattccttacttggggaatgttgctgaggaggttcagtgtgtgaatggactgaaccagttggccactctctcagattccctcttcataaagcttccgtgacttctaaaccatcaggtcggtgccataagagatgctcaaaaaagcatggtcagggcttagcaagaatccttttccagtgcaaatacgaccctcatattatgttttggcgagtagccagtctttctttaacatcaatcaaccgtagcaatgtggtcatcacgaagtcttcattgactcactggcttggattttagggttagaaaatctgaatgttcttatgtccttccgtctcactttactagagtgcccaagttgactcatccttactcactcattccctcaaaatatttattgagcaccaacaatgtcacaagcactgtgctaaacactgtggtgaagtagaacaattgctaatcatttcctgggttccacttactcttgatttaaaaaaaaaaaaacaacaaaagagtttgtgtgtggccaggactaaacagctgcttcttaatttttgaattttaaaactaatctattttatttaaaaaaaatcaagtactttggaagtgaataaagtaagagatagcctgtctcactttccagaggtagcagtcactaatactgtggtgagtgattttactcaaaggaaatcacactattaagcagcttggttttgacatgttatgttgtggtcatcttttcatgtcaatacatagattaatcttttatttcaaatgtctacataaaatatcactacccacataacctataatttgtgtggccagcaatttattgaacactaaaatgttttaagttttcttattgctaacaatgtcacagtgaacatttatatattcattaaatccttttcctcatgtatctttgcactcttgtgctagtatgtctatagtgtgaatacattcataaatttcttgatcaaagctaggtcaaagttacattcattttaattttggtacatatccataaattctccataaaagtaggaccaacttacattaccaccaatagtgtatgtgagccttatttttatgtatgataggactttttttagtccaaatgttcctatagattttctgggttttttttttttttttgtccttggaagaataaccttccttccaccaagtccaagaacctgagatttttaatcattaggttttagatttcctttagcagcagagactgacttgctgtatagagggaagtcaagtagtgactaactcactatatgtcaaacacatcattactcttctcttttcctactttacatgtaatggttgcgaggaccaactttcaaatgagctaacttgggtgagacgttcactaaagtaccaagcacaatacaaatgcatcttcgagttctttgggcctcactttccctatctgaataataaggatagtaatcccttgccttttctcaaaccagttcaactcagcaaacacttcctgagcacctgctacatgccaggcaaaatgtgaaatttgcatgctatgaggctaaatggtactgattctcaaaacaaggagctcatagtctaaaaccatttttctttcttttttttccccctaaacaacctcttaaaggggtaagaagttagggggttgtttattaagaacccctgaagagcaaccctttaccactctcttaaatttgaaaaattccaaaataatattaacacctcttgactagaaaaggaaaaaaaaggaacatgccgtatgaagagcctctccaataataaatgcaaagcagctgtcaaaatatagagtcaagtgatactttcataaagtgtttgcacaattagaaaatgttatcctttttctcgggagaaatgggacatttttattttctctgctaagtgaaatgcaactttttgaagaatcaacacgcttgacatttttacaatgtacataaagaactgaactattattaaaacaacttacacactcc

SEQ ID NO: 6892 - DNA, 4186 bp, Homo sapiens
gatggcatttttgcaggctggctttggaatagatggacagtttgtttcctgtctgatagcaccacacgcaaaccaacctttctgacatcagcactttaccagaggcataaacacaactgactcccattttggtgtgcatctgtgtgtgtgtgcgtgtatatgtgcttgtgctcatgtgtgtggtcagcggtatgtgcgtgtgcgtgttcctttgctcttgccattttaaggtagccctctcatcgtcttttagttccaacaaagaaaggtgccatgtctttactagactgaggagccctctcgcgggtctcccatcccctccctccttcactcctgcctcctcagctttgcttcatgttcgagcttacctactcttccaggactctctgcttggattcactaaaaagggccctggtaaaatagtggatctcagtttttaagagtacaagctcttgtttctgtttagtccgtaagttaccatgctaatgaggtgcacacaataacttagcactactccgcagctctagtcctttataagttgctttcctcttactttcagttttggtgataatcgtcttcaaattaaagtgctgtttagatttattagatcccatatttacttactgctatctactaagtttccttttaattctaccaaccccagataagtaagagtactattaatagaacacagagtgtgtttttgcactgtctgtacctaaagcaataatcctattgtacgctagagcatgctgcctgagtattactagtggacgtaggatattttccctacctaagaatttcactgtcttttaaaaaacaaaaagtaaagtaatgcatttgagcatggccagactattccctaggacaaggaagcagagggaaatgggaggtctaaggatgaggggttaatttatcagtacatgagccaaaaactgcgtcttggattagcctttgacattgatgtgttcggttttgttgttccccttccctcacaccctgcctcgcccccacttttctagttaactttttccatatccctcttgacattcaaaacagttacttaagattcagttttcccactttttggtaatatatatatttttgtgaattatactttgttgtttttaaaaagaaaatcagttgattaagttaataagttgatgttttctaaggccctttttcctagtggtgtcatttttgaatgcctcataaattaatgattctgaagcttatgtttcttattctctgtttgcttttgaacgtatgtgctcttataaagtggacttctgaaaaatgaatgtaaaagacactggtgtatctcagaaggggatggtgttgtcacaaactgtggttaatccaatcaatttaaatgtttactatagaccaaaaggagagattattaaatcgtttaatgtttatacagagtaattataggaagttcttttttgtacagtatttttcagatataaatactgacaatgtattttggaagacatatattatatatagaaaagaggagaggaaaactattccatgttttaaaattatatagcaaagatatatattcaccaatgttgtacagagaagaagtgcttgggggtttttgaagtctttaatattttaagccctatcactgacacatcagcatgttttctgctttaaattaaaattttatgacagtatcgaggcttgtgatgacgaatcctgctctaaaatacacaaggagctttcttgtttcttattaggcctcagaaagaagtcagttaacgtcacccaaaagcacaaaatggattttagtcaaatatttattggatgatacagtgttttttaggaaaagcatctgccacaaaaatgttcacttcgaaattctgagttcctggaatggcacgttgctgccagtgccccagacagttcttttctaccctgcgggcccgcacgttttatgaggttgatatcggtgctatgtgtttggtttataatttgatagatgtttgactttaaagatgattgttcttttgtttcattaagttgtaaaatgtcaagaaattctgctgttacgacaaagaaacattttacgctagattaaaatatcctttcatcaatgggattttctagtttcctgccttcagagtatctaatcctttaatgatctggtggtctcctcgtcaatccatcagcaatgcttctctcatagtgtcatagacttgggaaacccaaccagtaggatatttctacaaggtgttcattttgtcacaagctgtagataacagcaagagatgggggtgtattggaattgcaatacattgttcaggtgaataataaaatcaaaaacttttgcaatcttaagcagagataaataaaagatagcaatatgagacacaggtggacgtagagttggcctttttacaggcaaagaggcgaattgtagaattgttagatggcaatagtcattaaaaacatagaaaaatgatgtctttaagtggagaattgtggaaggattgtaacatggaccatccaaatttatggccgtatcaaatggtagctgaaaaaactatatttgagcactggtctctcttggaattagatgtttatatcaaatgagcatctcaaatgttttctgcagaaaaaaataaaaagattctaataaaatgtattctcttgtgtgccaggagaggtttcagaaacctacctcgtcttacaaatttaaacactttggagtctgtacaggtgccttatatgtaggtcattgtcacgatacacacacacgaacactccctctggactggctgcctctccatccagggcagttaactagcaaacaaggcagatctgcttcatggagcgggaggccatggcttgactctgagtgatttgggtcaaccggagtcagacgcatgtctgcacgctgcagctattatgagagtccctttgtcatttttcaccttttcatcctaagcatctttcagagattaattatttggccattaacaatgaatccaaatcatatcatactgacatcatctagacatgatttggaaggaacagcttaggacctcctgatgaggtcacattgttgtttcttttaactagacttggcaaagaaaggcaaaaattgaccagcctatctttctgctggtgctgccttaaggaggtagtttgttgaggggagggctgtagatcattacttctttctcttcaggaagtggccactttgaaccattcaaataccacattaggcaagactgtgataggccttttgtcttcaaatacaacaggcctccactgacccatccctcaaagcagaaggaccctttgaggagagtacagatgggattccacagtggggtgggtggaatggaaacctgtactagaccacccagaggttccttctaacccactggtttggtggggaactcacagtaattccaaatgtacaatcagatgtctagggtctgttttcggaagaagcaagaattatcagtggcaccctccccactgcccccagtgtaaaacaatagacattctgtgaaatgcaaagctattctttggtttttctagtagtttatctcattttaccctattcttcctttaaggaaaactcaatctttatcacagtcaattagagcgatcccaaggcatgggaccaggcctgcttgcctatgtgtgatggcaattggagatctggatttagcactggggtctcagcaccctgcaggtgtctgagactaagtgatctgccctccaggtggcgatcaccttctgctcctaggtacccccactggcaaggccaaggtctcctccacgttttttctgcaattaataatgtcatttaaaaaatgagcaaagccttatccgaatcggatatagcaactaaagtcaatacattttgcaggaggctaagtgtaagagtgtgtgtgtgtgtgtgtgcgtgcatgtgtgtgtgtgtgtatgtgtgtgaataagtcgacataaagtctttaattttgagcaccttaccaaacataacaataatccattatccttttggcaacaccacaaagatcgcatctgttaaacaggtacaagttgacatgaggttagtttaattgtacaccatgatattggtggtatttatgctgttaagtccaaacctttatctgtctgttattcttaatgttgaataaactttgaattttttcctttc

SEQ ID NO: 6893 - DNA, 1273 bp, Homo sapiens
gaaagagaactgggaacattgcatccatgggttgatgtctctggaagtgcaaccacccaatgtctctggaagtgccacctggaagtgccacctggaagtgtctctggaagagcacccaccactgttcagccttcccctgctgtttctgtcttcagaggcctacacactaccacatcctttctaagcatgtttgcctgacatccagctcactcgtctgcttcctttctcgctccccccatcctgggctgggctgccttcttctacagttcaatatggggcagactagggaaacctttgcttgcttactattaggaggggaagtcttcagtagggaacacgatcattccattgtgcaattttacggggatgggtgggcggagggacacaacaaaatttaagaatgactatttgggcgggctggctcttttgcagcttgtgatttcttccagcttgggaggggctgctggaagtggcatttcgttcagagctgactttcagtgcacccaaactggatgacgtgccaatgtccatttgccttatgctttgtggagctgattaggctgggatttgaggtgataatccagtaagtctttcctcgttcctacttgtggaggatcagtagctgttatgatgccagaccatttggagaagtatcagaggcctgaccggacacataatatgacaaccacatttttcctcatcatccatgaggaaatggatgatttctcttttccatatgtcactgggggaaaggctgcctgtacctctcaagctttgcattttactggaaactgaggcgtcaagatggctgtggcagctagcaaaagcaaagatgctttgtgcatagccttgtgaaaaagtatctttctatgcaataagatgaattttcctcccagaatatttagaaatgtagaagggataacagttcacagccaggtaaaatttaactggtggcttaatgactctgcacctttttctcaggaattctgcctaagttgtctgccttttctaccaccaaaaagacttttagttttctatgctttctcctgaattttggtagggtaaggtatttctatgtcaaaggcacagccttgatgatctcagggaaaaattttaatcactgtgtataatgatactgaaccttgattaataacagaaattcaggatgtaaagccacagaatgggatttattaatgtgggatacctcagactgtttgttttctttctgggaagaaaagtgtgttctataatgaataaatatagagtggttttt

SEQ ID NO: 6894 - DNA, 99 bp, Homo sapiens
aaatattaacccagcctccttataataaaatcacaaagttatatctgttcccccttgtcccagtggagggtcaataaatcacatgatggctttggcaac

SEQ ID NO: 6895 - DNA, 260 bp, Homo sapiens
aactcgggggccccctgcccgcacccggacacttgatcgatccccaccgacgccccctgcaccgcctccaaccagttccaccaccctctagcgagggttttcaatgaacttttttttttttttttttttttttttctgggctacagagacctagctttctggttcctgtaatgcactgtttaactgtgtaggaatgtatatgtgtgtgtatatacggtcccagttttaatttacttattaaaaggtcagtattatacgtt

SEQ ID NO: 6896 - DNA, 771 bp, Homo sapiens
atggatgagggagtgaaaactttgcatagaatcctcacgcaagtagatacatgttcatccaaaagtattaatagaaattctctatcagctattcagtcttaatttcactagtagtataatgggtatacatttttgtaaatagcatccccaaaccagccagccttcagttatttacaaatgtttgttcttttttcagcaaaatacttcaaatgaatagtattaacttacaaaaagtcacaaaaacttacatgagagtgaaaatttgttatgactgttttgagagtgggactcactctgaagtatgtgctgtctcatgtcttatttttgaaccatgcatatgatggacacacaatggatggacacattatatctccaacaaggtgtgggtggaaagatcaaattaacctgcttttttgaaaggaaatgattactgtcaaaccagcatggttaattgtgagcatcctcctgcagcatgccccttaagattttctacaacccaaaccaagtgtatgtattgatttctaggaacccccaaaaggagaatagtaaaaaaagatcatacttaaaatttgtattacaatttttattttaggaacttattcagacacgtaaatgttgtttaattctgtaggtaaccatttgagctgcaattcaggatcttttttataacaccagtgtagccaaaagagaaacagataagtgaattggtaagaaataagattcagagcacttgggattgtaagttataggttctgagctgaactgtttatc

SEQ ID NO: 6897 - DNA, 528 bp, Homo sapiens
gatggatggggctggagatgagctggtttggccttggggcacagagctgagctgaggccgctgaagctgtaggaagcgccattcttccctgtatctaactggggctgtgatcaagaaggttctgaccagcttctgcagaggataaaatcattgtctctggaggcaatttggaaattatttctgcttcttaaaaaaacctaagattttttaaaaaattgatttgttttgatcaaaataaaggatgataatagatattattttttcttatgacagaagcaaatgatgtgatttatagaaaaactgggaaatacaggtacccaaagagtaaatcaacatctgtatacccccttcccaggggtaagcactgttaccaatttagcatatgtccttgcagaatttttttttctatatatacatatatattttttaccaaaatgaatcattactctatgttgttttactatttgtttgacatatcagtatatctgaaacaccttttcatgtcaataaatgttcttctctaacatt

SEQ ID NO: 6898 - DNA, 1024 bp, Homo sapiens
cccccatgctgcttcctgagagtctttttttgcactgttgaaattgggcttggcactcaagtcaaagatgaacatcggaataacaaacattgtcctctccagaaagtcctttctttctccatactgtagtcctattgagaagacatttcgtctctgagaaaaaaggatggaactatgggttctcttcgcaaagccaaaggatagtgtttaacaagccagctggcttatgctggttctcagctgtttaaaaaaaaaaaaaaaaaggaatagaaacagtttcaaccagattgtcctattccccctgttccattcccctcttcttccttctatctccttccccggcaaaaaccaaacaaactggcagacaggccagggatgtatgttgcttgcttgagagggtttcttttacttcaaaatctttcttcagggagcaagacatgaactgactaattggtatccactacttgtacagcttacataaatgagttgatgatatttaaccagtttttataaacttcatttaggtctctaaacacagactttttaaattgcaactgtaaatatgaaatggtcatcacatctgaccttggtcagtggggaggggaactggtatcctgccaagcctggttgtaatttgtaaccattttctatttgtgcaaactctgtaaatatgtgtttaaacaaatgtaatattttgtacaagatacactggagaacaaagggaactcaagattcttccagccacatgtcacctgtaggtagaagtaaactctgcagtgcagcttctgctcttggcccctctggccagggcccctgtggcttcctgcacactggacaggtgactgtatggtagagactgtgatctgggaactttttgctgtacaaatctgtttaaaaaaaaaaaaaagtaactcattgaattaacttgcagtggtgtgtttgattcttttttagactggcttcagcattgtgcagtttaaaaataagtaagtaacttacataaatcttcaattgtatgaactgc

SEQ ID NO: 6899 - DNA, 1351 bp, Homo sapiens
ctcttaagagaggcatagcaaagtgggggttgctaccatttctagagagagaggacacagtcccggcctgggctgcccccgctccagtcaatgctcactgaaagtctgtcttagctgcctgtttgaatgactgttctttttctcatttttaattcttggactcatgtcctcattgcttcactcaattaaaaaaaaattattctccagtcccctcccactttgcttcttgtatgcattgtgaccgaccccacttcctcagaatgtaacggggccagagggaaacttctcacaaacttcgtagagcctcctcaggggaagctaggaagaagacatcaaatgtttttaagtcatgaccaaacaggcttgttggggacatatcatggggtgagctttgaagtgctggtggtccagaggggttgcagatacgtgacttggagcacccgtgtcttacgatggacagtgataaaggtgaacacacagagacagactattctctaagaatgtgagaaacctgatctggaagaggagctatataaacactatctgactatctttgtcttttggggccagtggctgttggcataatcacaagcctgtctgtcttcgagaagggacagtggagtcatccaggtgctgccacatgacaggcacggtgggcaccgatccacagtgggccccgccttccccagctcgcctccctgcctgtgctggcctggccttgcctgctggcaccattggagtaggagggggtggaacacagggggcccatcctgatcaggccccatctcaaggttggcactcctgcccatcacccttagaaggatcttttcccatggcttgacttccttcatttccctaactgaaatacacccactctcttggaataatgacgtaccactcagttggaccctcaagagtcactgctttgtctgtgctggtagtttgtgagaagtgacccgcacgcttccatttgatgcatttgatgtgagtgaatccatacatttgaatgtcattgtccttgagaccctacatgtgcagtttggctcatctcattaaagatgcttgatgtaataattggttagtttccttttattttcctgcaggcttttccatgagtattatttttttcaaagaacaaatctgtatggcttttccccatctccatattttgttttgctatgaattgctttgctttggtgaacttgtcctagtatgcttgcctcacaaacgttttagccattgtgaattttcttcatctctgtaaatagttcatctgtgcttctccctgatgacgttttattttttttcccctgtaagcaaccgaggtagaaaaataaattgtttaccatgg

SEQ ID NO: 6900 - DNA, 390 bp, Homo sapiens
agcatacctggatgtccaggcaagactgggcgaagtttctgagtggccctttgtttaggtgatgtcctcagacctggacccccaccagcctcactccccatcccaaccagagatggctcacttcggatcgagggttgactacatctcatcatctcacgaatctgctgtaatataagacaacagcttttaaatgtgtatataacccatgatttcggttttgttttgttttgtttttcttgatggtttccctctccctccctctcttcccattctccttttaaatctctttgaatcacatttggtagtgattttgacttagtccagtagtcacatagctttaatatctagttcaaagctaaccatagtataattgttatattaaggagttat

SEQ ID NO: 6901 - DNA, 171 bp, Homo sapiens
gtggccatggtgaaggtgtcagtggcggcggcagcgatggcaagcaggcggcgttgctgggactgttttgcactggagccagcatcaggatgtcctctccaatggctgtgctactgcatggactgtatactcgatttcatgtgtatgtcgcagtaaacaaaaccaaacctc

SEQ ID NO: 6902 - DNA, 523 bp, Homo sapiens
gggcccgcgctgcacaggaaagttccctttggtccacagggccatttcaagcaagttcaatgacctggtcccttagagctccatatcccagtcccagcccttctttgcagctgggcctctctatacccctggatgaacagcttgctcaggccccagggtggctgcctcggccctcccagctcttacactcagctccagtggcttctcctttctgtcaagacttagccccgctgagatgcccttctgctccagcttgctggatgttacctgtcctcttccctccacaagtcttggcccttaacctttatctttcttcctgtcctctcacctagattgtaagctccctgggccaggacttcagcctgcctccgagggtcccctgtggcacctagcatggtgcacagcacattagaagtgctcaaaaacatctgatgactgactaaagatgctaggcgtgacaccgttccctccaaaagcagacctcggaatcactgccaaataagtaactagacgtttacaggcc

SEQ ID NO: 6903 - DNA, 141 bp, Homo sapiens
aataaagtgttctccttttaagggtgggtttaataacatattatgaaagtagtattttgtactatcgtcaggaaaccaaataagatatatatgtgctcttaattttaagtgtgtatgtgcattaaacaaaaattagcttac

SEQ ID NO: 6904 - DNA, 107 bp, Homo sapiens
cccagaaacaaatctcaaagtgtacaaatttattgatgttgtgaaatcaatgtgtacaagtggacttgttaccttaaagtataaataaacacactatggcatgaatg

SEQ ID NO: 6905 - DNA, 4140 bp, Homo sapiens
tttttctttcaagtaggttagctagctctcccccaataaaaataccactatcagagtagaaacaaggtagacatttctaaaacatatgtgcttcattatgaatccatggatggctcaattcttaaatgtaaatagatctctaggaaactcaaagtacagtgttttcaatctaaaaagaagtattggcagtttcacttgcaaaattacacagctggtccctgtgatgtgtctcgacaccaatacacaacccccttcccaccatccttcatgtcactagatacacaacccccttcccaccatcccttcagtcactagtggaagctttcaagttagttatttcagtcaggatatacagtgttgaaatctcaatgcagttgaaatctggtctgatgtgcctaatttatctgtggaaaatttaatgctgaattacatttggttgggaaatgtccctcaaaatcctgggcactatgaaggaaccccctgccccctcacctttttgggtaggtaaaagactaaaagccatatggattttaactgataacaatgaaagtggtaaatcagtgtaaaagtgtcatattctcagacttgtgaggcggtttatagtcagaaagatttacggatttttttcctgtaacataaaagattgtgaactttttttaattaaaaaatatttcctagggctgtagttatttgggagtttcataacctgttatggtgcttttggtggaaatttttattatttagcattttaggagaccgctgtcaactggttttaatctatgatgctaatgtgttttccactgtaccctcatctcaggaataaaactgctttaacggagatgatgtcaggtacaaatacactatagagtcaaaataccatttacaaagaaaatcaaaagcatttctatattttgtctttttttagttcagacagcaaaggcatgtactactataaaatacaaagtgattttagagaatgaaaaatgctacttttatcttctctaaaattatttcccccaaggtagtgaagtaattggaatgaaggaggctgaaagtattgtctaaagtgagcccagaggccactgagaatgcagattactgacagccaggtctgtttagttgtaattggaagacacatgagtgtcctgcttacatgtagcttcagactgcagagacaggacgtgtgcttttcatttcaatatttagttatatttgatattttgaaactgtctgctttttgctatttctgcagtttcaagttagttagaagcatgttgtcaactaaagacaacaaactatcagattcattcattcagtgaagcagcctctgattctctaagagtcacgaatgtcttagtgttaccctcccctagtcaacagcagaccagcctggccaatgcctatgggtggcccctctggagtgctcactaacaagggtgagtgctctcgctaagaagtgtcccccgcctaatcatgtgtttataggatagtacacgttccccaggcccataacagaggactaaaatctctgaattttaaagacacagatgactggcatattttggataccagtatagctatatcaaatagacaaaaacagcttcactttagcaatgatcagattgttaatctacagattttattttttaaaatttggatgtaagtagagactttcagtatttgttttctcttgattttgaagtcatttcttcttctcacgtctgtgacaaatggttgaaaaggagtcaacatggccccaactatagtgccggaaccttttcatcattctgaggctttgccccacacatggtcctcactcatatctgtcaccttctgaagcctagatcttgttaacccatcaggtgcagtgtcagtttcaaatcaaattatctaagaaaacaagaaaacaaaggcagcagactattggtacacattatagtccaaagtgcttagcgaagtaaaaaaaaaagctttttaaaatttctattgttgtctattggtaatgtttttgatcagaataaagagggtaaagggaaaaagttactacacatgctaggctttctcagtggggaaaaaaatggctggatagaactgggacaaacacagacccatctttaggggtctggattttgtaggtccgactacacagcagtgttaactcatttctcatgccattagctctctacaaaataaagcaaagtagttctagtgtggtcgttataaaccaatattgtgaaaaatagcaactattcatttgttcacaacatgcgtatttatagagtagttaggtaccatttgtaaggtaaatcctttaaaattctataatacatactaaaatagtggttattggtctgatatatgctgctcttggttctataaactagataaaagcagtgctttgtgaaatgcagtgttctctcttaacgccactggtgataggaagtagttcccttcagttcaaatcctgtgcccttatttgctgcttgctgacgtaagcaataagtaaccctctaactaatggtatctacatatttctgtaacttgtatttaatgatggtgtacctggtgattgtaaaaatattagacagatataaaagtatctatataatatctataaactgttaatgctgaggtatagtctgtgaattatgtgttttgtatttttattcattgtgtaatttagtggtggtgaaagttctacactcaatccttaaagagtggcagtatccctttttcaatttaacatggtctgcatcaatctgtttgcctgctaaacaagttagaataggaaatagtaaaataaatccaaacaagagtgtaatattggttagggaaacaaacttcaggtcaccaactgaagtcattacaaactccttgtacattcactgtgagtttcaaagggagtcagtccctaatttacaggtttcctttgttcactttctagatgtgtacttttgagggacatgaggttaggcaacattacagcaacacacactggggctattaatcccatttaggtctgtactaaagaggatgggtagaaacacatatgtatataccttttctttacctagaagtgccatccattgtccttgaattattatgattaaagttactgttgcatttaggaggctccttgaaagtaacaccttttccaaggacaatggcaacaatgtcaatgtcaacactgagtctaattttgaccacatttatagtggtatagtgtcaatactgcattttcatgacaaccacactccactgttgaaacactgtgccagtgagaagtgcaacatccagtgggcagatgaaaatgatgcatggccaagttcagtgtttacagataaaactgctgtggttcaagtgcttccttccccatcaaatccttgataaggctttgtgggaaaatgatctaaattattgttttaatttttaaacctaatttattcactcagtgaacattcttacctaagcaaggctataaaagggaatactacagttttgtccacactttaatttgagaccatttttctttgaatcgtaagttagcaaaagaaatttttttcacctttgaaaatcacgtgatgttaaaggacaaatgcccactcttctattctgatctgcaaatagcttaaatgtctcttgcaaaacaaagtaagataccaccagtattacaacacaatgattttccagacaaatggtatggtgttgaaaaataactgttacttcttaaagcagcattttatcttctattttgaagactatttattgtaataattagaaaacatgaaatagggaactccagactgacacagcagttgtttttgaaaaggaaataaactttgatgaattagataatccagatacatcattgtaaactcttactctaggtgctctttggtgagagacaggctttgttctcttgttcataacatttctctgcaaagaattctctatggagtgaagcgaatgaagtgaataatttcttaccaaataaatttatcaatttacaaatctgctctacatctcacttttgagttcagttgtagtcatgagtgatccttcatattttattaaaagtgttcattcaggtaaggtgtatgttgaaattttgccaattatcttaataaaacctggcaattt

SEQ ID NO: 6906 - DNA, 155 bp, Homo sapiens
tgccaactctgcctcactccatgagatgatccataacaaatacagataaaaacacccagctgggtgcagtggctcacacctgtaatcccagcactttgggaggctgaggcaggtggatcacctgaggtcaggagtttgagaccagcctggccaac

SEQ ID NO: 6907 - DNA, 247 bp, Homo sapiens
gtgttttccagccagttcaatcctatacttgagctggtttttgtttttggtatttgtggctgtgtttttggtatgtgtttactgtgttttcccaaatccaaaatgtgttttggttacaggagttcagtatttggaaactaatttgttctactttttcattatattgttgatatttattgtaaacgtgactacaactttctaataaagattggttgttctagaaaagaatataaaatacatggatgat

SEQ ID NO: 6908 - DNA, 739 bp, Homo sapiens
aaaaagaggtacttagaagtattgaaggaaaaaatgaagacctaagaaaaaaatatttcatgatcatttccctaagccatttccagaatggtaaaaggtttaatcagtttttattacctcatttttaagcctgtatgagaatgtagaaactatatattatatgtatatttattttaaataatattgtatattttatgtttgtaaattgtttagaaagataattggttatgagatgtaagttttaatttcttaatgtgcatttttgtttctagatcttatacagaaatcttgattaataacatacacagaaatgtacatactacatcatctacagaaatcttgatcaataacctagaaactaggttatctaggttattgatcaagatttctgtagatgatgcagtgttctatcataagtaattctggaatcaaagactattggatacatttggcattgggctgagtgtggtggctcatgcctgtaatcccagcactttgggaggctgagacaggcggatcatctgaagtcaggagttaaagaccagcctggccaacatggcaaaaccccatctctaccaaaaatacaaaaattaaccatgcgtggtggtacacgtctgtcatcccagcagctcttaaggctgaggcacaagaattgcttgaacccgggaggcagaggctgtagtgagccaagatagcaccactgcactccagcctgggagacagagtgagactccgtctc

SEQ ID NO: 6909 - DNA, 4545 bp, Homo sapiens
ttggacagcatctacccaacccagtgtccacgtgaacgccattcaaccgaacattcttcccaagcgtgagagagtgactgacacttggttccatccatttaggggccttgccatccggggcatcctcccaccctgacgccatctttctggtgaccggcctctaaatcgctgtctctctgtctctttgctttgtatctgtttgtgagttgatcctggcttctctctctgttctagttttggctgaaaacaaaacaacaaaaggaacagatccttgaccgcatggcggcagcccaccttggtaagggccccagggcccatgcgagagctgcctgatggcctcttgtcaggagagcagtggcacgggggcgtgaggaagagggaaaggggaaactctaagggtcctggcgcggggaaggggtggaagggtggaggtaggaacaaaattgcgccgctcctggagacctgataacttaggcttgaaataattgacttgtctaaaaggacaaagagaaaaaaaaaatacctcatgactgcattctctctgactagaagcttctgttcctgacaccaaatgtgccaggttagcaaatgagcacaagatgtggccctgattctagttggtggggcaagggcctggttctcctgggctgagtgggggagtgtcctggcagcagcgagtgacctgggcagtggccaggtgggtgcgatgactctgatgcctcactcagtctctgggcaatcatcatctttgcctctagccaccgtagataaggtgtgaagggactgctgtttgcaatgggcttaccatccaaatatcccaaaggctttgaccagcaaccaagtaaaatcagtaattgaggagagcagggcacaaaggggctgcagtttgggagctcctgaagaaatggctcagatattgagtcagagaaataaaaagtaggatcagttagcaattctaactgcccttccttctgacccctcataagaggagtgtggtgagggaggggactgggtaggggtcatcccaggaggaggggtttacattggaaccagttcaggttcggtgcatctttcctcttcggttttacagtggcttccgtgggatcgtcaatttcttgttcttagagtttcgggtgtttttctccagtcttgttactgtagactgtagaaagcacgggccccaggctctgagcttagtaataacctggctggtagattcctcatgcccctaattgtcccacttaggcctgaatgtcttgcatggagagaaatctcctgtcagtgtggtccagcagcagggaggagttctgcccaaattccgatatcaccccttcccccatccaagcatccttcgattagggaagtggagagcacatccctgtaaggcccataagagaaagaggagtttgttacatttaatcaacactgtgaagtctgttctacagcaattcagccattacacagtatatgactgaaactcatttaactgggttaatttcatttcttagactgaatatattattgttaagatacgtgtgcgtgttaggtaattctcagcatctcctccaagtaggccgaccttctcggaaaattcaccctaaaagtctcacaaaagaatgagttcatggggagattctgtaaagtgatgaactgagatgaaagcagccaacagcccaggagcttttcagaatagcgtctgcagcagaaccagtttccattcagagcgcgtccttggtggaaatgcttttttgtgtgtctccacgcgctgatggtggaatgggagccccaagacgtgtgggcttagaaatcaacttttgttccccaaggcttcttgtccagatctttccagtgctttcatagccctgggagatcaagttgttctccccactttactgcaaggtagactgaagttcagaagaaatactgaatttctgctcccagaagaatagtttctctggctcacaggcccaagttctcaatgaaatcgttttttaactttcacattcctaagctggcttcccggcacagaagccatggatttcccctctctcccttccccctcctcaaggaaatagtcttcctttatggattttcattggactctttcctcagcgattgtcctggctgtttattgatagtccttcccataagaaaatggggttaaacatggggtaggtattttgtctttcaaactacaaatggaatgtggtgacataaactagacatggggtgccctcaagtttccaaggggaccaatgtgccactgttcttccttggggatgaggcctttgactgttggatggatcagagcaggctccagtcagaccctggttctgaatgttttttttttcggtgactatccagtgagccttcagtgggtgcaaggcgccatacttgctgtgagagagctgagtagagtgttggtttttccataactacagggggaaaaaaagtcattaggctttccctttgtgtcagtgaaaccaaaagtgcttcttacaacgttcgctctgttcatgggttgtctatctaacattgagcagcattggagaggccacagctgagctatggagatgctaaattaactcatggcctcagtcagttcattctttaatttcctcaccaaattattgacttagagcataaccaaagacctcattcattcaccccaggtgggttggggtaattggagtttgttggtgaagtttgggggcggggtgttgggagtagagacagggtaaggggacgtgagaaaggaaaaggcatgaagttctatacctcagccagcagctgccttcgtttggaactgaagtccagccagcagactctctagctccatctcccctgtgccaccctaggtcatatgaccttggccaccttggagtagacccagacccctcgggacccgggacattagtctcaggctgctgatggattgatttgacatgaaccaaacacagccaaactcgatacccacaagctgtcagctgaacctgactgagtgttcttcctgagttcacgaggataggctagagtgcatttttactggtggatcagtgtgtgcgaaagagatgaccctttataaagagattttcaagtggatatatataaaagaaacagttgcttgtaaaatatacttttgtaaataatatttaattttttaaataatatatttggtgctgttttctcagatcccctgagagcactttttattttccttttaaattctatggtttcctttgcatttcttgaagtatattttaagggaaacagtgatcaccaatacatgttttcagttttttttttttttaaggtctctatcactttaatctggatcaaggctttgaagcaatgcctctctgcattttttccccagtggaacagactctgcagtacattaatcaggttgagaattgaaatattttcttgcatcagtattggctagaaaagaaaataaataaaaccaagttaatttagtagtaacaacttacagtgattcttcctgttggaagaatttccaacaaatcagaatcacgtttttagttgtgcgtgtgcgcgcacacgtgtgtaaaaagcactttcgattgtgcctcctgttttctcgagtggggacactttaactacagtttacacctcgggcgcataaagtttttcttctctttctctctggttgtttctgtttctgagtggaccaacagcagaacccacgaggatttgttttgagtatggagctgttgcgggtttgctcctttttcttgctttgcgtgctcagtttttacagactgtaaaggagatgtgttgtttgtgaagatggagcagagtcaaatctgtgcttctaactgagatgagagtgtattaatcacgtatcgcagggctccagctgttttagaagccacatcatgttaaacattaactggtttggattaaaagaacattaatattataatacacatatcttagtggtaaacagctttttttttttaaggtcagattgcctcaggtttagaaagaggctgagaaatcaaatcttgaacacaatcaacttacatattttaaaggaatctgcctcaaatgagaaaatatgctagttatctagatagaggaaagagatatttacttttttaaaaattaaaatagttatgaaatctggcagaaaaggtaaagcctagaagaaactatgaaagctattctcatgttaccaaattctatctgcgcatatgtttttgtataacatttcggtgacagtgggagtcggttccctttcccaacctgcagagactatcttccaatacagaatctgtctatttatgcttgtgtttacaaactgtatttgttgggtttgggtttttgttttctttggtggcatttttcaggtcactttgcttctataacaaaggtaattgttttcaaataatttgtcttcaccttttcctgtatttgtacatagtgattcagtattagagaaaagtgcattgtttctgtcatatttccaatctgtgttggtgctcatttgagaaaataaaagttttcaaatattaactcttt

SEQ ID NO: 6910 - DNA, 1169 bp, Homo sapiens
ggtggtgaaccctccaattcaggaagtgggaaaaggagccaggaaatgtgcttctactttgccagttatttcagacagcactaccaagaggaggtggtcagcacttgttattggcctatgaactaaaagcaaatcaaagctcataaatcaaagctcatcagttcccataaatgcagttgtcaaagaaaagatttggttgccatagtcataagcaatgatacatgaaaccaatgaaagacagtacatgtaataatattttcctcagtacaattttgctggccttaactggtatcaaacgctgtcattgagatgttttcaaagaacattgagttgtatttaatcagcgtgtactccatttgcattgaagcattaaaaattatttttcttaaaatctctttaaggccttcttgttgctgttagaatagtgctatatatcaggtatgtgaccatttatttcagaaggctgaacataagaggtttctactcagcaatacttagatgtctaactgtttaattgctacagagctttatagatatttagagaaaagacttaatcaattagtaaataaaattgcctatggcaggattctttcttgaattaatattaatccttaaattgatttttctgggattatacaaattcctttttatataaaagtatattgtttaaaacagtagctatagccattaaccaaaggacagatgatatatatatatatgatatatatatatatataagttcttttttagctgtacctacgtacttatatcagcaccatgtatgtaggtgtgatagtactttcaaacagcgcctccacctggcctactctgttatttccacctgtttgggtagggccatttaacttccattatgccaaacttgggatgggattttcgaagcagacaacactatttcatcgtgtttcaaattggaaccttgaggctagttagtatcacactcaggccacactcagcacttgcccactcttgtttactgccttgtattctagttatttgtgtatttgtctccctcactagattatacgctccttgtgggcagggactgtgtcttttttcatctttgtatctttcatgcacctagcatagtgctttgcacatagtagtcactcagtgtttgttaaataaagctattagtgtcattaaaattc

SEQ ID NO: 6911 - DNA, 3104 bp, Homo sapiens
gatgaagcgctgatcctgtagtcacctattttcgtactgaaacatcgtctttacccacttctcagtttataatgggggaaaacaggcaacgtgttcttgtaacctttatttcatgaaggacttctttttgtttctaactataaacttggatcacctatgttaaaaccttatttcacattccacatcattttagaatttattttcgaaggggaatagtttcaatgttttattcacttgggctttttttcttccccctctttctttaaagaactgctcaatattcaatctgttgtgaagaacctgatttgcactctgtagtgtttaaagaaacaaagaaactctaatattgaatctcttaaatttagtgtatgtaaacagcttacaaatacgtattgtctaaatgcatttaaatctgttttattcaaagaaaagctaaagcaaaaacactggcatatgaccatgcaagactgtcagtgccaacaaagacaacactaatcagcacatcgtacactggattgcagtgcttcccagattattgaaaaatgttacagacaacttgcctgatttttaaatgagcgtaaaaggccctctaacctatgcaggtttccccattatgcatatagaaaatgctagtatgttttgctcacttcatatgtaacaggtgcccttatgttgtgctgtatcctgtgctttttctgtgggaccattccattcaggagcaaagagcaccatgattccaatcttgtgtgtgtttactaacccttccctgaggtttgtgtatgttggatattgtggtgttttagatcactgagtgtacagaagagagaaattcaaacaaaatattgctgttcttcagttttgtttgtggaatttgaaattactcaaatttaaaataaattactggactgtggaaataacatagaattgaagttttaattaaataccactcaaacgaaaagaacagtagtttttgtagttttatattggatactgaggcattagggaggcatgaaaggaagaggaatgaggattgagacatgtgaagacattgtgcattatatcaatgtgcattcctgtagttcattaacaaggtacatgcaatagtctaaagaaccagagtcactactatagtggcttaacatttaatctgtctccaatattttaaccaagtgacaccgaggtttttatcgaagcatttcacttaaatgaacaaatcatggctgttatattaacttgaaataaaatatatttaaacatgtagttaacatgctctttctcatcatgaattataaaggtgcccaaattatgggtatcttgatttttttcaaaaattggttgtgtgaatccagctcttgcttatggctgagaatgttcctaaagttcatttcactatcccttaatcctcaatagctacacatacccccttgcctagttagtcttgcactgctttacaactctcttaggcaaattacctaacataagctccacagaagagttttttaaaacttaaaatccctgtcccaccaggtgtggtggctcatgcctgtaatcccagcactttgggaggctgaggcaggcggattgcttgaggccaggagttcgagacaagcctgaccaacatggtgactccatctctactaaaaataaaaaatcagccaggtgtgatggtggatgcctataagatcctagctgctactcaggaggcaggaggctgaggcatgagaatcacttgaacctgtgaggcaaaggttgtagtgagccaagatcacgtcactgcactccatcctgggtgacagaatgagactcttgtctcaaaaaacaaaaaaacctatttagtttcatccaggacattaagtgaaagtgtttaatgtgagtgcaggtcagtgaagaatacaatggtgcccctgctttgatttgtgggaggtgccatcagttttccccaccactgcttttgcaccctcagtgcaaatatcaacacagagaaaaaaaaaataataatagtattatgaaaacattgactctgtggagaccctgtgggttctgcagagtatactttgaaaactataagattatgagttctataaaataccaagtacagatgaactagaaaacaagcatatatccacaattaccagaattttcatagtattccttttagtagatatgccatgacagttacttagccaccccatgccatcctgttgggaatgccactacctttgaatttggagccatcagtctatctgaggcaaacctcagaaattacctgagccagaatcatgcacttagcactgagttcaactcagtcttaacgttgcattttgttgcatcacttttgcagccagtaaacattctgtttagaaatagttgctattgtggcatcattcacagttgcaatttttctcctgtgctgtcatatgcctgtgcgaagtgtattaaatgaatcaaatattagaaatttcaaggctgtctttagtgttctgcccacaatactccaccaatgaccttagaccttgagatggtgctataacgctgcttatattgcagttaaccatagagaggtggagccacttaaaatgggcctattaccaaaattctccctggcatcattacagttcttggggatacactgattttagaaattactgtcagtatcctcctaaaagaaggcttaaatagtttctaacaagatgactatcaggaagctatgtggcttggggagttgggaccctctgcctcatattctgggtaactggtataacatagtaattattaggattgtatcaagtgtatctaaagatcaaaagggaaaaaaggcacccttaattgtcaaagttagttctaggaaaaaatactagcagggatgacaaactacgttcactttacagttaccataaattcttacttgggcccacccatttccatctgttaaggtccataaggttactcaagtttcagtggcttcattgttacaagaaaggggggaagtgagaaactttaataggctgtgatttagaaccactgctgattaacctttggccagtatgggtcagggaaggtgaacatgaaacactgcacagtaggttgtatcaatgctataaaac

SEQ ID NO: 6912 - DNA, 1181 bp, Homo sapiens
gtagagaaagttttaaactgcagaaattggagtggatgggttctgccttaaattgggaggactccaagccgggaaggaaaattcccttttccaacctgtatcaatttttacaacttttttcctgaaagcagtttagtccatactttgcactgacatactttttccttctgtgctaaggtaaggtatccaccctcgatgcaatccaccttgtgttttcttagggtggaatgtgatgttcagcagcaaacttgcaacagactggccttctgtttgttactttcaaaaggcccacatgatacaattagagaattcccaccgcacaaaaaaagttcctaagtatgttaaatatgtcaagctttttaggcttgtcacaaatgattgctttgttttcctaagtcatcaaaatgtatataaattatctagattggataacagtcttgcatgtttatcatgttacaatttaatattccatcctgcccaacccttcctctcccatcctcaaaaaagggccattttatgatgcattgcacaccctctggggaaattgatctttaaattttgagacagtataaggaaaatctggttggtgtcttacaagtgagctgacaccattttttattctgtgtatttagaatgaagtcttgaaaaaaactttataaagacatctttaatcattccaaaattgtgtccgttttcttgagcgttttgattttttacttttagcttataccagctgaatggcagccttgcctaatccacctacaacaagaatttcttaagctttcttttatttgcatgagagagccactaccaaggcatgttttgttatgctgaaactgggctgctgcatactgctaaatggcacctctgggattggcctacctggggatttcttggtttgtgaaaacaggagaggagaaatatctcatacaagtgaaaggatactggagagagaaattacccatttctaaaaaaaaaccacactctgtcgtatctgtgttaatgttttctagcatgtactctggtttcaacagacacaaatttatatgttaacccagttttcttgccgttctgtaagtgttttattcttagtgtgatttttttccattgggatgtttttgattgaacttgttcattttgttttgcttgggaggaaaataaacaattttacttttttcctt

SEQ ID NO: 6913 - DNA, 3635 bp, Homo sapiens
cagagcaatgcttttaatgaatttaaggcaaaaaaggtggagagggagatgtgtgagcatcctgcaaggtgaaacgactcaaaatgacagtttcagagagtcaatgtcattacatagaacacttcagacacaggaaaaataaacgtggattttaaaaaatcaatcaatggtgcaaaaaaaaacttaaagcaaaatagtattgctgaactcttaggcacatcaattaattgattcctcgcgacatcttctcaaccttatcaaggattttcatgttgatgactcgaaactgacagtattaagggtaggatgttgcttctgaatcactgttgagttctgattgtgttgaagaagggttatcctttcattaggcaaagtacaaaattgcctataatacttgcaactaaggacaaattagcatgcaagcttggtcaaactttttccagcaaaatggaagcaaagacaaaagaaacttaccaattgatgttttacgtgcaaacaacctgaatcttttttttatataaatatatatttttcaaatagatttttgattcagctcattatgaaaaacatcccaaactttaaaatgcgaaattattggttggtgtgaagaaagccagacaacttctgtttcttctcttggtgaaataataaaatgcaaatgaatcattgttaaccacagctgtggctcgtttgagggattggggtggacctggggtttattttcagtaacccagctgcaatacctgtctgtaatatgagaaaaaaaaaatgaatctatttaatcatttctacttgcagtactgctatgtgctaagcttaactggaagccttggaatgggcataagttgtatgtcctacatttcatcattgtcccgggcctgcattgcactggaaaaaaaaatcgccacctgttcttacaccagtatttggttcaagacaccaaatgtcttcagcccatggctgaagaacaacagaagagagtcaggataaaaaatacatactgtggtcggcaaggtgagggagatagggatatccaggggaagagggtgttgctgtggcccactctctgtctaatctctttacagcaaattggtaagattttcagttttacttctttctactgtttctgctgtctaccttccttatatttttttcctcaacagttttaaaaagaaaaaaaggtctatttttttttctcctatacttgggctacattttttgattgtaaaaatatttgatggccttttgatgaatgtcttccacagtaaagaaaacttagtggcttaatttaggaaacatgttaacaggacactatgtttttgaaattgtaacaaaatctacataaatgatttacaggttaaaagaataaaaataaaggtaactttacctttcttaaatatttcctgccttaaagagagcatttccatgactttagctggtgaaagggtttaatatctgcagagctttataaaaatatatttcagtgcatactggtataatagatgatcatgcagttgcagttgagttgtatcaccttttttgtttgtcttttataatgtcttcagtctgagtgtgcaaagtcaatttgtaatattttgcaaccctaggatttttttaaatagatgctgcttgctatgttttcaaacctttttgagccataggatccaagccataaaattctttatgcatgttgaattcagtcagaaaagagcaaggctttgctttttgaaattgcaactcaaatgagatgggatgaaatcctatgacagtaagcaaaaacagaaccatgaaaaatgattggacatacaccttttcaattgtggcaataattgaaagaatcgataaaagttcatctttggacagaaagcctttaaaaaaaaaatcactccctcttccccctcctcccttattgcagcagcctactgagaactttgactgttgctggtaaattagaagctacaataataattaagggcagaaattatacttaaaaagtgcagatccttgttctttgacaatttgtgatgtctgaaaaaacagaacccgaaaagctatggtgatatgtacaggcattatttcagactgtaaatggcttgtgatactcttgatacttgttttcaaatatgtttactaactgtagtgttgactgcctgaccaaattccagtgaaacttatacaccaaaatattcttcctaggtcctatttgctagtaacatgagcactgtgattggctggctataaccaccccagttaaaccattttcataattagtagtgccagcaatagtggcaaacactgcaacttttctgcataaaaagcattaattgcacagctaccatccacacaaatacatagtttttctgacttcacatttattaagtgaaatttatttcccatgctgtggaaagtttattgagaacttgtttcataaatggatatccctactatgactgtgaaaacatgtcaagtgtcacattagtgtcacagacagaaagcacacacctatgcaatatggcttatctatatttatttgtaaaaatccaagcatagtttaaaatatgatgtcgatattactagtcttgagtttctaagagggttctttatgttataccaggtaagtgtataaaagagattaagtgcttttttttcatcacttgattattttctttaaaatcagctattacaggatatttttttattttatacatgctgttttttaattaaaatataatcactgaagtttactaatttgattttataaggtttgtagcattacagaataactaaactgggatttataaaccagctgtgattaacaatgtaaagtattaattattgaactttgaaccagatttttaggaaaattatgttctttttccccctttatggtcttaactaatttgaatccttcaagaaggatttttccatactattttttaagatagaagataatttgtgggcaggggtggaggatgcatgtatgatactccataaattcaacattctttactataggtaatgaatgattataaacaagatgcatcttagatagtattaatatactgagccttggattatatatttaatataggacctattttgaatattcagttaatcatatggttcctagcttacaagggctagatctaagattattcccatgagaaatgttgaatttatgaagaatagattttaaggctttgaaaatggttaatttctcaaaaacatcaatgtccaaacatctaccttttttcataggagtagacactagcaagctggacaaactatcacaaaagtatttgtcacacataacctgtggtctgttgctgattaatacagtactttttcttgtgtgattcttaacattatagcacaagtattatctcagtggattatccggaataacatctgaaagatgggttcatctatgtttgtgtttgctctttaaactattgtttctcctatcccaagttcgctttgcatctatcagtaaataaaattcttcagctgccttattaggagtgctatgagggtaacacctgttctgcttttcatcttgtatttagttgactgtattatttgatttcggattgaatgaatgtaaatagaaattaaatgcaaatttgaatgaacat

SEQ ID NO: 6914 - DNA, 119 bp, Homo sapiens
tggctcacttctgcacgcagcctctctgttgcctcagctctccaagttccaggcttccggtccttagccttcccaggtgggactttaggcatgattaaaatatggacatatttttggag

SEQ ID NO: 6915 - DNA, 133 bp, Homo sapiens
gaagaccaactgggacaaagggcccgcttgtcctggctctcagagcacggggaatggagaccaaaaagggaaaagaattgtccttatcaaaaagattctcaggtcttaattaggaataaatgaggtgggaaat

SEQ ID NO: 6916 - DNA, 1123 bp, Homo sapiens
aatgcatctgggaaatgaggtttttccaaacttaggatataagagggctttttaaatttggtgccgatgttgaactttttttaaggggagaaaattaaaagaaatatacagtttgactttttggaattcagcagttttatcctggccttgtacttgcttgtattgtaaatgtggattttgtagatgttagggtataagttgctgtaaaatttgtgtaaatttgtatccacacaaattcagtctctgaatacacagtattcagagtctctgatacacagtaattgtgacaatagggctaaatgtttaaagaaatcaaaagaatctattagattttagaaaaacatttaaactttttaaaatacttattaaaaaatttgtataagccacttgtcttgaaaactgtgcaactttttaaagtaaattattaagcagactggaaaagtgatgtattttcatagtgacctgtgtttcacttaatgtttcttagagccaagtgtcttttaaacattattttttatttctgatttcataattcagaactaaatttttcatagaagtgttgagccatgctacagttagtcttgtcccaattaaaatactatgcagtatctcttacatcagtagcatttttctaaaaccttagtcatcagatatgcttactaaatcttcagcatagaaggaagtgtgtttgcctaaaacaatctaaaacaattcccttctttttcatcccagaccaatggcattattaggtcttaaagtagttactcccttctcgtgtttgcttaaaatatgtgaagttttccttgctatttcaataacagatggtgctgctaattcccaacatttcttaaattattttatatcatacagttttcattgattatatgggtatatattcatctaataaatcagtgaactgttcctcatgttgctgaatttgtagttgttggtttattttaatggtatgtacaagttgagtatcccttatccaaaatgcttgggaccagaagtgtttcagattttttaaaattttggaatatttgctttatactgagcttttgagtgttcccaatctgaaattcaaaatgctctaatgagcatttcctttgagcatcatgcctgc

SEQ ID NO: 6917 - DNA, 713 bp, Homo sapiens
gtaccagcaacctgcttctgactggccagccccctcccctgctggaggaggggagaagccccgctctggtcctacccttcagtctctgctcttccttcatcaaccaccttccccaagcttagtgacagcagccgcccatcctacctggatggagaagagacccttctccaagcacctcagcgcacttgccctctgccacacctgtcggtggaggctgtggccaggagagactgtagaagctcggtccctgtgtatgtttgcatatgacatcctgcattggatccgcttttgtattttttaaccatacccacggtggggcgggtggggggagcctggaacagtgaccagatctgggggcctgagtggggacagagttgatcgtccacctggccattttgaccctgagtggacagtcacagcctcagctcatgtctggctgtgacacacactgcccccagcttcccttggtcagccccactccagcacggggtgaacggaggcccagagtactagggaaggaggaagggaggacatgcctcttcttcctcctttctttccccatctgttcatgggaagagtttgtctttcttatctttaagcccctttaccctggtcctgtactgatcagtgaaggaaaccgtggttactgaggccctgttgaaaagtgcacgtcttgtccaataaatcacgctgcagttggtgtccatccctga

SEQ ID NO: 6918 - DNA, 958 bp, Homo sapiens
ggggctgcccagctgctcccctgccacgcaggccacccgggctgcctgcccctgctgcttgggacgtgtacagcacagaatgagtatttatttaaataaaggagaaaagtgggctgcagcagccggaatagagcctcgtctggcaagtcggggcctgggacacttccctgggcctcaacaaggatcaggctgctggaaacacagtcacttgggagctgctgggctaggtccagatccgctccagcgtcaaggtggcatccgaaggtgtctctggtcttccagcgaggtgggagaggcctcatccagggcccagcggtccctgcagaagccagaaggtgcaggggccaggggtgggagcatcggagggagtcccagagccctggaccttgggcctagaccgcgtgataaaactgggttgagggatgctggaaccagttacgactgaagtcagtgtagacctgagctgggagggaacctgttagtctccccacctcttccctgaagagacaggcacccctcccagccgtggtcaacggagggagtggcacttctgccttgagtccccaggggaaaaaaaaaaaagatatttatgaaataaatggtaatttgtgtaaataagctttaaggttcccagaatatgcaaattggtattaatttattcaaaggtgtacattgctgtgtacatatatttagagattaactcatacatttaaagtttttttcattttacgtgagcatctatattgtacagggctgggggggcccttggctgcgggagaaggcccagagccctggaggagccaccaccccgccggcccctcgacccctcggcccctcggcccctccgcccgggtttggctcgcccggcccgcgggctccacctcaggttttcacttttcgctccggagcgagaacgaaacgacaaaaacgcaagaaaacaataaaacgctagaaagcg

SEQ ID NO: 6919 - DNA, 549 bp, Homo sapiens
gcggagggcttgaggctcggggtggggccttctcccctgctgccagaaccgcccggcagcgccagctcggcgaccttccaggctgctgcagaccccagcttgtcctcttctgcgcgcccgcggggctgggccctcgcgttctctctgcgggaagtgagccgccggcctccggcctcctgggcccctccgaagggggctgtggctggcatccgcagcgcgcggggcgcacggccctaggagcgcggggcccactcgacggtgaggacttacgggcgggataggggaaggatcggcggggatccagcgctcctccagcggagagggccccctcggctccgacccgccctcctcaccaccctcatccggctcttcagggcggggtcttcagggtcgagggcaggatgtgccctgtggagctgctcacctaagttcctgcctccataggggaggctttgggctgcgttattccagcgggaggtggtggggactggggagggcccaggggtcagcctgagaatctcgcccttggattaaaagccaccaatgctc

SEQ ID NO: 6920 - DNA, 786 bp, Homo sapiens
ctctcacgtctcctccatagccccgggaccgtgttgctccagtattaacctctgtgggtggcctgcactctaccaagaaacacaggaaggtattccagtgtgtgtgtgtgtgtgtgtgtgtgtgtgtgtgtgtgtgtatacacgagcatgtatgtatttggagagcatccatcttctgacatacaactgaggtcatgacaaggaaaaaaaacaccacatttatctaagaagtgattttggctgcaggacctgggtctattgttatctgacatctcttgacatgcccgtgggtgggatgggagtggagggttcatatgagttattgagagggttttataatggttgatttactcaggggccaggtggggagttctctcccatggggaaagattctcactgctggggtgggaagattctcgctgctggggtgtgaggactctgtgcacaccttagagttcctggccttctctttgcaaggggagctgagaatctggttttggtagcaggaggcccactcctttgacttctggagagtctgtgagactgcctgagaggtgggctcagctaagccacaatgtgtactttgatagtacagctggctgctcagtgagtggcctagacattgatgactggagctctgaggtctgagggatgacgttcggaaagggtcatgggctaaatgtcacctgaggggtatttttaaagggtttttttttcccttcaagaggagggaaaatgcaaccagtagcatctctgtcatcattcagattttgtaataaagtacag

SEQ ID NO: 6921 - DNA, 147 bp, Homo sapiens
aatttctacattttctaaacagctcatcacaaactactttttcatagttatcaaaattattgtttcttgcttttgtctaagtacattcttagaagctggaaattttgacatcttttggattctgaccagtaaaaaagtttaagtcat

SEQ ID NO: 6922 - DNA, 1364 bp, Homo sapiens
gaggcacctgctgccaacacgatgcaagcccattgtgtttccgggcttttttaaaaaaaaaattgtagcactgggcgtggtgcatgcctgtaatcccagccactcaggaggctgaggcggggaggatccattgagcccagcagtccaacctgggcaaaatagtgagagaccctgtatctgaaagtaataataaaaataaaaaatataaatgaggtctcgttgatgttggacaattcaagaattcagacttgaaccttaaacctaggaaaagttactttgtatcaggattctaacaattatgcttcatatttgtgaagtcctttaaaacataattttctcaagttctttctttgagatctcaatctgtcttagcattttgtaactaataactgaaattttattcaaaggaattgtaaaccttaaaccaccaatttatttccatgtgaaaaagtgttacatatgacaagtgttttttgactgtaattgcgttaaatcttttgagaatgtaaatgccgggctaggcaattgcagttaatacatacagaggttagtgaagggcttattaagttgtaggggaagcaagctgggaagaatcagatcagatattttcctgacaaaaaaaaatgaccctacagagagcatcaaaatgtggtgttcttgttaagtaattgatcgtggtcttcgctttaatcttagttccgccaggcacggtggctcacacctgtaatcccagcactttgggaggccaaggcgggcggatcagctgaggtcaggagttggagaccagcgtggccaacatggtgaaaccccgtctctactaaagataaaaaaattagctgagtgtgttggtgggtgcctgtaatccagctacttgggagactgaggcaggagaattgcttgaacccaggaggcagaggttgcagtgagctgagattgtgccactgcactccagcctgggcaacaaagcaagactctgtctcaaaaaaataaaaataaaaaaaaaatcttagttccatggaattttaagcattgttccccctctaacctgtgtctaaagaattaaaagaatttggccgggtgcggcagctcatgcctgtaatcccaacactttgggaggctgaggcaggcggatcacgaggtcaggagatcgagaccatcctggccaacacggtgaaacctcgtctccactaaaaataccaaaaaaattagctgggcatggtggcacacacctgtagtcccctgtagtcccagctactcgggaggctgaggcaggagaatcgtttgaacctgggaggtggaggttgcagtgagccaagatcatgtcactgcattccagcctgggcaacagaggaagactccgtctc

SEQ ID NO: 6923 - DNA, 1099 bp, Homo sapiens
gactgactccaaggccacaaactgttcaacacacacaaagtggacaaatggcgttcagcagcgggtttggaacatagcgaatccgaatggatctgatgaaacctgtaccaggtgcttttattttcttgcttttttcccatccatagagcatgacagcatcgattctcattgaggagaaaccttgggcagctccggccaggccttgtaggaaaaggccccgcccgaggttccagcgtcaacggccactgtgtgtggctgctctgagtgaggaaaaaattaaaaagaaaaactggttccatgtactgtgaacttgaaaacttgcagactcaggggggtccctgatgcagtgcttcagatgaagaatgtggacttgaaaatacagactgggctagtccagtgtctatatttaaacttgttcttttcttttaataaagtttaggtaacatctcctgaaaagcttgtagcacaaaggctcagctggggatggtgtttgacttcggaggaaaaaagttgctattgcccgttaaaggcactagagttagtgttttatccctaaataatttcaatttttaaaaacatgcagcttccctctccccttttttatttttgaaagaatacatttggtcataaagtgaaacccgtattagcaagtacgtggcaatgttcattccaatcagatgcagctttctcctccgtctggtctcctgtttgcaattgcttccctcatctcagtagggaaaaaattgagtgggagtactgagatgtgtgggtttttgccattggacaaagaatgaggttagaagactgcagcttggagtctctctaggttttcaactatttcttcacaatttgaacacttgacggttgtcccttttaatttatttgaagtgctatttttttaaataaaggttcatctgtccatgcagtcctcttggattctctgaatgtagtaactatgaagctatgccaaaggtaggcagaaaatgggcttgggagccagacactccagggatcagtagttcctacccatagtctttgtgtgcttgctaaatggtgtacatttcttgttaaccacgttattaaaacttgatcagcacat

SEQ ID NO: 6924 - DNA, 1138 bp, Homo sapiens
agccaggcgcgtgggcagggccagggcgggaggagctggggagctggggccctgggtcagtctggccccccaccagctgcctgtccagttggcctatggaagggtgcccttgggagtcgctgttgggagccggagctgggcagagcctgggctggtggggtgccaccctcccacaagggctgggctgagacccagctgagtgcagcgtggcgtttccctttctgggggggcctgaggtcttgtcacctggtcctgtgcccccacaggaaccagaggtaggatgggagggggaacgagagcctctttctccccagagcccccggcccaggcctgttgatccgcgccccaggacccccttctttgcagagcccgaggagcctcccctgtcccctcgggcagatctgttgtgtctctcttcccacctggcagcctcagctctgtgcccctcaccctgctccctctcgccccttctctcccaccccttccttctgagccgggccctggggattggggagccctcttgttcctgatgagggtcagctgagggggctgagcatccatcactcctgtgcctgctggggtggctgtggggcgtggcaggaggggcctaggtgggttgggcctgagaaccagggcacgggtgtggtgtctgctgggctggagataagactggggagagacaccccaacctcccagggtgggagctgggccgggctgggatgtcatctcctgccgggcgggggagggctctgcccctggaagagtcccctgtggggaccaaaataagttccctaacatctccagctcctggctctggtttggagcaaggggaagggttgccagagtcctgggggccccagaggagcaggagtctgggagggcccagagttcaccctctagtggatccaggaggagcagcacccgagccctggagtggcccagtacccttccaagaggccacagtcccagccaggacaaagtatgcggcccatcctggtgcgacagcgtgggacaatgtgaacatggactcgaagacatggccctttctctgtagttgattttttaaatgtgccattattgtttttaaaaaaaaaggaaaaaagaaaagcaaacaaataaaacacctttaagaggcttg

SEQ ID NO: 6925 - DNA, 252 bp, Homo sapiens
ggtgacccggctgggtcggccctgcccaagggcctcccaccagagactgggatgggaacactggtgggcagctgaggacacaccccacaccccagcccaccctgctcctcctgccctgtccctgtccccctcccctcccagtcctccagaccaccagccgccccagccccttctcccagcacacggctgcctgacactgagccccacctctccaagtctctctgtgaatacaattaaaggtcctgccctccc

SEQ ID NO: 6926 - DNA, 337 bp, Homo sapiens
actccaagataaagacaccatgaggggactgaaggtgggcaaggtgagagttaaggatcttggggaggtggccgggtgcagtggctcgcctgtaatcccagcactttgggaggccgaggcgggcggatcagaccatcctggctaacacggtgaaaccccacctctactaaaattaaaaaagaaaaaaaatagccgggcgtggtggcaggcgcctgtaatcccagctactggggaggctgaggcaggagaatggcatgaacccgggaggtggaggttgcagggagccgaggccgcaccactgcactccagcctgggtgacagagtgagactccaactc

SEQ ID NO: 6927 - DNA, 176 bp, Homo sapiens
gggatttcctttagctgggcatggtggcgggcgcctgtaatcccagctactcaggaggctgaagcaagagaatcacttgaaccctaaaggcagaggttgcagtgagccgagatagtgccactgcactacagcccgggcgacagagtgagactccatctcaaaaataaaataaaatt

SEQ ID NO: 6928 - DNA, 5105 bp, Homo sapiens
tgttggtggcgctgtgcccacgaggcaggggcttttgtatttcctgcctctgccccacccccaaagtaagaagaaacatgtttccagtggccagtatgtctttcattgctttgcacccactgttaccagaagctgctctaggagttcctggccagtcaccccatcgccctctgtggcagactcagtgctgtgtggcgcctcctcagcccagggctgagttttaagattttctctcctttcctcttctcctttggttcctcaattaaaaaatgtgtgtatatttgtttgtcaggcgttgtgttgaggagcagttcacgcactggctgtgtctattcctctgcccaggtgtctctgtttgctgcccaaggcagcagttcatgtctcgtccatgtccatgttcgtgttagcacttacgtgggaacaaataccaatttgtcttttctcctagtatcagtgtgtttaacaaattttaactttgtatatttgttatctatcaggctaatttttttatgaaaagaattttactctcctgcttcatttctttgtcttatagtcctccctctttgcaccttcttctcttccctcagtgcctggagctggtactgggcccctggccccatgagcagtttgccttcttgagtcactgcctgtgtagtacatacctgaccgggagtccaaaccaccttggtgctctgaagtccactgactcatcacacctttcttagcctggctcctctcaagggcattctgggcttgtaaacagacataggaagcctctgtttaccctgaagcaccactgtccagcccattggttcccactggcagcatggtagagctgagagaaacaggctctcagggtacctgacttgaggggaatcgtttcatgaagctgaacttcaagcatatttccagtacattctttcagagtctgtttttccatccaaatataagccccaggccattccacttagtgtcttttcaatgataggcaagaatgatatctgagttgaacttcggtgcttctgttgtttgagtttactgtgcctggtggtatattgggcattctttggattgagtgttctgaggtgagagagtcttcccgaggcatcctgtctgtgcttccaaccctgaacaagaccttacatgagagatggactgatggactgcggcaatcctgggctgtcaagtggatagatagttaaaaagcattatactgtgggtaatgaaaagggaggaaaaaaaaagaaggaaaaggaattatagacccccagggtcagccagttaagagctctacccacacctgtcaacccctctctcccccagtttaggttctgagcagtattggacttgtagcctgcagttgtcttttgacttgcaggccgcaggtgtctttctgttatgtgaatgagttccatggaggggcatatgtgtgattccaccgttagatgagcccttggggcaggcagtttgggatgtgctcttgggggaaagttggctgtttccttgcgctctgctcctacccgaaggtttttaagtccctctgaattgctcatctgagattagtagagtagcaggcctgaaggatgatggttttgtcctctttggttctcacctgcttgagaagtaaaacagtaactttgttcttctgggcccttaagcttttttggttaagtcttccttttcagaagtagatgtcattatatgccaaaagtctagctctttgctttaccatacagggacctgtcccaaagaaaaaggctctttttttagccagcatatttccccttctacccttttactttgttgttctgattttaggactctggctggccatgtgcttgtggttgcctctcctgcatttgccactggatttgcactgcatcgtttggagatacaaagcgagcagttcttggtcagaaccctcctctgcttttcattgtgtttgataatggttactgggtccttctctcaagggtagcaaggccaagctgatggctgcttgtttaggaggccatcagttccttcctgtggagaagggtctgaaatggaagtcagtggtagaaggggctggtctgctgggcagggcttacatccactgagttctaagattcctttcctgatctgcacctacgcctggtctgtatggtggaatttgtcagctggaactcagaaacaacaacttgaaaaaaaaataataattagaacatatttgcataagatagctatttactctggaaaccaacaacttttgagatttcccttgccctgtggacgcccagctcctgtcatccttccttaggtcctgcagtacagtcttcccctgaatgccaccggggacccagggggactccacccccctaagcaagcacacacatactcacagttgatgagttgctggtctttgagtcccagctctcttaccctccctttactccaccagcccgacgacccatgactgaggaggggatttctacagtctcaggatttagaaagtctgtaagccatccatgctccagaaagcaccgatctgttgtagttgcaaaaacaactctgtaatttgttgaggttctcaaactgacagccagcgagactgggtgggaggccctggatctgttctccctgactgcgggaggagcagccactaggactttagcaggaagcccacatggaggctccgccaggctgtggcccagctggtgatggcccttttgctcctggcagcctgaggcacagctgcctgtattgtcctcatctgttctgactgaaggatggaggtgctgaataaattaggcctcaggcctctaccaccagagagctggagaatgggtccacgtcattcaaggacctgaattttttatgctcaggagcattggaatcctcttcttccagggaggaattagcctgcaaggttaggacttgaagagggaaggtatttaataactgggcgaggatgggtgtggtggctcacacctgtaatcccagcattttgggaggctgaggtggccagatcccaaggtcagaagatcgagaccatcctggctaacatggtgaaaccccatctctactaaaaatacaaaaaaaaattagccgggggtggtggcgggtacctgtagtcctagctacttgggaggctgaggcaggagaatggcgtgaacctgggaggtggagcttgcagtgagccaagatcgtgccactgcactccagcctgggcgacagagcaagactccgtctcaaaaaataaaaaaaaaaaaaaaataggtgaaaattccttataaatccaggattggctctgagagaactggctaagattcaggaagaaacaaaaaattcagaatcctacaaggttttgatgacaattagggccaaaattttaggaggagatgtaggatgcaggagaaaattaaagtgttttctttatatcagaggaggaaatagtagaggtcagtgaaggtctggggtagggaaacattcagactgtccattgcatggctgtggagtgagactgcccttagcctgggtcagccttcctgggccataaattgggcatccgtgatgctaggtaactgtgggaacaaaatgacagcttagagcagccatgggtgatgtttggtggtaaaaaacctacaggcgtttggggtcccatgattgttccagaccatgactcttcctggttgtgggtttgttacagagcaggagaagcagaggttatgacagttatgcagactttccccctcctttttctcttttctcttccccttgcttttccactgtttcttcctgctgccacctgggccttgaattcctgggctgtgaagacatgtagcagctgcagggtttaccacacgtgggagggcagcccagtactgtccctctgccttccccactttgagaatatggcagcccctttcattcctggcttggggtaggggagaccattgaagtagaagcctcaaagcagacttttccctttactgtgtgtactccaggacgaagaaggaagatcatgcttgatacttagattggttttcccagggaagagggcggagcagagcaaagtcactgtgaaccctgggccaggccctggctgggccagctcctgagagcgtctcgtgttgcagacccttgcccacttcacccacctgcaccttctccccctctcacagtgtcactgctgctaatggtcaaagtcaaatgtgtggccacatgggatgggccaggtcctctcaggctactttctggatgtcatttttaaaatatggaaacatgcaggtgccttcccaaagaggcttggactggtatatccaacgagaaacaaataagctaaagaaagtttaaactcaagaagaaagatgttgacagtctatgtaacagctggaaagtttataggcacccacctttgggacaacccagtgattatgaacatgtgatatctactatttaaaagaaatgttctcaccttgggttgattgtggtataccatgtgttatgaaaattgttgagctgaagctttgaatcgatttagttgagtctgactcacttgctttggttcctgtgtattttactacccctcttgtcagtgaccttccttccccaccccacccagagtgaatttgtagcatgattgtataaacctctatgtagaaaatggagatttcttgctctgaaatgttaagctctaactgatccatttctgtgtcctttagcctagtatgtctgaacttccattcttgttatatatttaaactttccctctatattataggttttgtggcatccacggtcaggtgtagaggaagctgccccttgcagaactgtactgtaatatttttcttttataaatattttcacaggactgattgtacacagggcttgtaataaaattttaacactgtgctgtgaaacaactatggggaatctccattgaaggctacttcatgggcacctgaaagtggagtgttatagctatgactttctatttcttgtttcctaagtaaattaaacctaattttcaccctttcattctgtttcagcctcctgtataagaagtaccgtattttctgcccatcatactttgtaataaaacttgaacatgtatagattgactg

SEQ ID NO: 6929 - DNA, 362 bp, Homo sapiens
ccaggctacatgtgcccccgggttccttcctagaaatgtggcagcccattccagcacacaggcttctgcagcaatctctgagggtaaagccggtgggaggctcagcaggccaggaggcccaaggacaggacttgcgaccttgaagccaaaggaatctcacttgtggggcctccttgtcagctctgctgctgtctcagagccatctggatgagtgtcccgacaccctctcggatgcagggcaggaccacccagctggtcagactctgatgttgggtagctggcctctgtggggattgtaagtgccctgaggcgctctgtactagaaactgctcttaataataacggtgattattggttgctgc

SEQ ID NO: 6930 - DNA, 2532 bp, Homo sapiens
gctctcacggccacacagctgccggtcgccctttgctgcatggcagggggctgctgctgggctcagtgaagttgctgcttctcccaggcaaggctgtggaccatggagtggcagcccagccagcgtcggtctgtgccccttccgccactggggctcagagccggggtggggtggctgcagcctcaggactgggagcccccagcctgtcagatccaggagctccagtgtcctgagctcagcgtggaggggtaggggctgggaacagtgtgcaaggcagccgtgggccccaccctcggggatgtgtcctgacactgcaattggcaccgaagcccagagggtctgggggcacaagactgacgccagggtatgaagagtgttattttcattcaaagtgttattttgtttttccttccaatgtctggagaccaccagggcatctctgggctggatgagctcccacaagcctgagggaaaggccagcactcgctagcagtggcaggcagaggcccaggctgccgtcccctagagtcccaggttggctctgccagtcctgtcctttaccaaagatgaatgaagcaaatgtcatgctgccttattcagggaaggaggagcctgtcctgcctgtggccatgaccctgcctctcccaggcaggggcccgcgatgtggaactgctgccactgaggggggatccagttttgtcaatgcagttgtctctgttttacaagttggagtcactcttatgctgtacccagtttctaaactggagactgtgtgtgccctctgggctctgagtacccctgctttgggcttgggcctaggctgcattgaaaagagctgaaggttgtggcctttgcgctcctggcccagcctttgttccccactggagcagaaggggagatggacgacacggtcggggcatctggcctggccagtgccctgatcccagagagcccgaggaggtgtctcaggctgcctgagtcgtgacctgctaggccagagcccactccatctggtagaagggaaagcccatatgctaccaccagctgtgtccaaaaccgccagctctgttcttcctcagccagcctcgcccatccccttgaggtctcagcccctttcccttgtagctcctcccctggagggggaatggcagcaggggttggggaaacagcatctccaagcagcttagagttggccatatttacctcagcctgggcgctggtcctttcttccggcccctcccctccaaaatgtgcctattgctagagctcctccctctcaacacccagtttccttgggagttgtcattaaaggaaaaaaaaaaaaaaaaaagccagtgcccagggatgggcatctccagggagctggggattagtgccaggcagccctgccagccatgcctacatccccatgggcacagaacaagccaaagccttcgttgtatgttgacgatgcacttttatgaatgtagtttctatcgctgtttttagccttttcacatcatgtaatgtgaggccttgtacttgttaatttatatctcagatcatatttgatggtttttatatatatcaattctagactgttacaggtgacggacgcctcaagagagagaagagaaaatgaaagcagctggttttgcagaagtgtgtgtcgcatgcgccagttgggcctggaccctcctgtgtccatccctgttcccccaggggctctatcagcccctgtaccccacactgccctctgaagacaacacaggctcctgcttccacctcggcccttgcccagggtggggcctggccctcatcttgaccaaagctgctgtgtggcagctcggcctctctacgaccccatcttggtggctgcacactcttcctggcccgcacccccatccccagtccctgttccccaagaggatacagagcacggtgctggctgactcaactgtgcgtcccaggttcagggtcttacagagctccaccccctggggtcttacctcactgggaatgtgttttgaaaatgaatttgaagacaagccaacaaaccctgcactccaaaaaagcaaaacagaccctaatttttttgtgccaaaaactgtggacatgctggctcagcatcctcaggaccaagttgttgcttaatttattgttttttaataactaatccagataaaaagttgtggggcttcagggtgacctgggcccaaaggttctgaagggcagttcctggcagccccaggcttgctgtgggaaggggccgtgccgtcactttctcatcattccatggggtgtgtctgcctgggccaactctgcatggagaggccagggctggggacagtccgcactctgccaccctcctgccccttccacccaccccagctctatgtctgtgtctgaattgtggatcgtgcagccatggttattgtggaactgtggaacctgcagccatagttatttgactatatcttgaccgagggcttgcagtgcaaagccaggccagtgttgcgcattacttacaataaaagggatcatttatatcag

SEQ ID NO: 6931 - DNA, 918 bp, Homo sapiens
aggggatgtgctaaagcgtgaaatcagttgtccttaatttttagaaagattttggtaactaggtgtctcagggctgggttggggtccaaagtgtaaggaccccctgcccttagtggagagctggagcttggagacattaccccttcatcagaaggaattttcggatgttttcttgggaagctgttttggtccttggaagcagtgagagctgggaagcttcttttggctctaggtgagttgtcatgtgggtaagttgaggttatcttgggataaagggtcttctagggcacaaaactcactctaggtttatattgtatgtagcttatattttttactaaggtgtcaccttataagcatctataaattgacttctttttcttagttgtatggccaggcagtccccattttaggagttggcttctgcaaattcaatccattgagctaactgttggggagcaatttggtagttgtagacatttgcagggaagggagatgtctgattctaaatgggagttgatgctcaggtccccagccaggtttgcatccagccctgagacatgtaggaaacacctttcagacccaggctctgaagattcccagaagccacaaggattgaagggaaaaggtgatcctggtaactgttccaggattgctccaggtttgagatggtattgctaaatttaaaattaaacaagaaacccaacaacagcttttaaagtgtcttctatctcattgtattttttttaacttgccccaatgatagaaaagtcttttgctgaaatgattttgatgatttttgtttatcgtttataaaaaggaaaagaaatatacaaactttgacttttgtgactttgtgaaggtttctttaagatgtgcattcctttctgcttgctctctagtaaatgttttactaccggg

SEQ ID NO: 6932 - DNA, 57 bp, Homo sapiens
gtggacagcctttgtgtgtatctctccaataaagctctgtgggccaagtcctctagg

SEQ ID NO: 6933 - DNA, 163 bp, Homo sapiens
ggccagacttgataatagtaggtgaaggttctggaggcctttaccaggacagagctagaatcgagccagtaaacagtctaagccagaaaaataattttcaaatgctttacctgtattttcattccagtactttttatgattttttaaataaaaattgttttct

SEQ ID NO: 6934 - DNA, 296 bp, Homo sapiens
ggaaagaggcaggctgagctgggggctctggaccaggaagatgctctgacagatgccatggtatgggccacaggacacacttgctcgagaaccaaagtgcatttgggtgacatttgaagattggggagacaagatggggtagattgtggcaaagaatgctctggctggttaccaggggccaactccttctcctcttcctgaccctccctcccctgggcagaagaaacgcatgtggaccagaagactttccctgctgccttaaaaccaataaaaggttaactttaagtttcttggaa

SEQ ID NO: 6935 - DNA, 6707 bp, Homo sapiens
aactcaccagcgagaacaaacacctccccagcccccagccctccccgcagtgggaagtgaatccttaaccctaaaattttaaggccacggccttgtgtctgattccatatggaggcctgaaaattgtagggttattagtccaaatgtgatcaactgttcagggtctctctcttacaaccaagaacattatcttagtggaagatggtacgtcatgctcagtgtccagtttaattctgtagaagttacgtctggctctaggttaacccttcctagaaagcaagcagactgttgccccattttgggtacaatttgatatactttccataccctccatctgtggatttttcagcattggaatcccccaaccagagatgttaaagtgagcctgtcccaggaaacatctccacccaagacgtctttggaatccaagaacaggaagccaagagagtgagcagggagggattgggggtgggggaggcctcaaaataccgactgcgtccattctctgcctccatggaaacagcccctagaatctgaaaggccgggataaacctaatcactgttcccaaacattgacaaatcctaacccaaccatggtccagcagttaccagtttaaacaaaaaaacctcagatgagtgttgggtgaatctgtcatctggtaccctccttggttgataactgtcttgatacttttcattctttgtaagaggccaaatcgtctaaggacgttgctgaacaagcgtgtgaaatcatttcagatcaaggataagccagtgtgtacatatgttcattttaatctctgggagattatttttccatccagggtgccatcagtaatcatgccactactcaccagtgttgttcaccaacacccacccccacacacaccaacattttgctgcctaccttgttatccttctcaagaagctgaagtgtacgccctctccccttttgtgcttatttatttaataggctgcagtgtcgcttatgaaagtacgatgtacagtaacttaatggaagtgctgactctagcatcagcctctaccgattgattttcctcccttctctagccctggatgtccacttagggataaaaagaatatggttttggttcccatttctagttcacgttgaatgacaggcctggagctgtagaatcaggaaacccggatgcctaacagctcaaagatgttttgttaatagaaggattttaatacgttttgcaaatgcatcatgcaatgaattttgcatgtttataataaaccttaataacaagtgaatctatattattgatataatcgtatcaagtataaagagagtattataataattttataagacacaattgtgctctatttgtgcaggttcttgtttctaatcctcttttctaattaagttttagctgaatcccttgcttctgtgctttccctccctgcacatgggcactgtatcagatagattactttttaaatgtagataaaatttcaaaaatgaatggctagtttacgtgatagattaggctcttactacatatgtgtgtgtatatatatgtatttgattctacctgcaaacaaatttttattggtgaggactatttttgagctgacactccctcttagtttcttcatgtcacctttcgtcctggttcctccgccactcttcctcttggggacaacaggaagtgtctgattccagtctgcctagtacgttggtacacacgtggcattgccgcagcacctgggctgacctttgtgtgtgcgtgtgtgtgtgtttccttcttcccttcagcctgtgactgttgctgactccaggggtgggagggatggggagactcccctcttgctgtgtgtactggacacgcaggaagcatgctgtcttgctgcctctgcaacgacctgtcgtttgctccagcatgcacaaacttcgtgagaccaacacagccgtgccctgcaggcaccagcacgtgcttttcagaggctgcggactttcttccagccattgtggcattggcctttccagtcttgggaggagcgcgctgctttggtgagacacccccatgcaaggtcctcagagtagccgggttctaccacaaacagaaacagaatgaaagtagctgtcagtccttgtagagagccgctctgtttcctcccagaagcatctcccagctaagctcgcattatttttctcctctggctgtttgcctgaagttcacagaacacacaaccatgaaaggctttttgaggtgagaggcccaggtggtcctggcaaccctgagtagaaggagagacggggtagggaacgggcccggccagaaaagaaccatttcttctgccatcttttatgcaccatagacatcgagactccagggggtcctggctcccctgtccctgcagccctgcaggtcagtgcatgatctgggttcgtgtcctgaccaggtgctcctcctttgatccgaggggaaagggactggtttatagaaagagcctaggagacaaaagggccagtccccctgcccagaatggagcagcagcaggacagacccccacgaggccccccagagaggaggaagatcccacggaggaacacatgaggttagggacccttgttcagcaccccaaacagcctgcctgtttaaagcaggcagcaggcttaggccttccctgcaaccccaacacccacaagtttgtttctctaggaaacacattcactgtctcagctggctgttactctctcagaccatatggcaaagttttccaagaaaatgccccgacaggggtgcccagcacactgcctgagggacaacagacatcagaacaaacccccagagagaaacagtcaaaatcagggcccggtgcagtgttgtcatgtggaacctgctttatccattgctgagtgttgaatgtgggtaatggttagggctttccagatctcagcagccaaagacagttattgttggaagactgtcatgtagataaccatgagcaatggctcgcctcagaatcagttcataaaattctatggtactggccccttcgtgggtattgtgtgaaatgagatggtggcgaggggtgcgctgtggaactgccgcagccacgcaggaggtccctgggggatgctttgggaagtccttgcccctgagcactgcctgattgccagggcctgtggaggtctaggccgcctggcagaatctagcaccgtccgaatccccgcaggacccatggagctatgaccacaccaggccattcaaatggctctgcattatcttcccttggaaggtggccactcctcggtggcagggcctttccctgaggctgcaggccgtgggctggcagcccgtctcttggcatttcaattgaaggtcaccaggtgctgggtttgaaaggaagtcactggagtgctgccaggggccgccctccaaggttaatgagaggcccacatccaggcaagaactaattcaaaaggcagatcagaaaccacaggagtcaaaattattgctccggcagtgcttcccttcctttcatccactggcctcgtgtggtccatgcagggccactgtctgccctttctgatgccacgtattaggctttcttactcagaattttgatagaaaaccatggggccaagagctctggaagcctggccggaaagaccaaggttcatgcagcccaacaaatgattgttgagcacctctcggagccaaagtccttaggcgagtgtggtgacttcctggaaggaggatgcagacttccagagagcccccccaacggacgtgctgagaagggagagggaggcgggggctgtagtcaggaaggagccagagaagaacagggtttgggtgcatccagaaatatgcctgcagtaggagggagaggaaggggtgccaccgtcaacggcttcccatcggaggtggttggtgcagatggaagtttctgtctgctggccctcaagagagtgttttgccagggacacagtctgttcctcctcagaaaacaccccccaaatgctaacaacatccccaccagctgctagaagcccctttcccctccccaccttgaagtagctcatagttctctgggcagagccagaccatccagtgtaccccagaggccagtaggttcctgcccattttcctctctggcttcctgccaagaattatggcagctgaggatgaatggagaagtaaaaacaactaacaccgcacaactaacaactaacaccgcagttcccacctgggttccacttagcaggagacatttcggagggttttttttgtttttgttcctgttttttttttttttgctggaatttgttttctcagtactgaaaagagaaaaagtgacaatcttgtatttttaaaagcctcggaaaggtgataccatctgacagtcattttctcacgttggtcttctaaagtcacctatttcttgtgtgtgcacatcacaccatttcctgtttctttataacccgacaagggtaggagtgcctgtttcccctgctgggcacaccagacaatcgtaatcacaaaacagacactgagccaggggcccaaagggtgtgatcatgagagttaccgggacagcagtaggcatgacagtcaccaggaaggacaagggtgctctgttgttagtggccacacaccaatttgacaaggagtgttgcgaaatttttatttatttatttatttattttgagatggagtttcactcttgttgcccaggctggagtgcggtggtacaatctcggctcactgcaacctccacctcccaggttcaagcgattctcctgcctcagcctcccaagtacctgggactacaggtgcgtgccaccacacccagctaaattttgtgtttttagtagagatggggtttcaccatgttggccaggatggtcttgaacccctgacctcatgatctgcctgcctcggcctcccaaagtgctgggattacaggcatgagccaccacgcccagccaaaatatttttttaaagtcattttccttaagctgcttgggctacatgtgaaatacactggacggtcaacattcctgtctcctcccatttgggctgatgcagcagatccagggaatgttacctgtttctgctgctagaagatccaggaaattgggaaggttacctgacgcacacatggatgaaggccatcatctagaaatggggtcaaccacaattgtgttaattccgtagtgtcagggattcttcgggaaggtcaacagtatgaaggattctgacccctgtgcctcccatttatgtgatcaggtgacagttaataaccgtggaggtcacactcagccatccaacagccttacagtgaccctacacaaaagcccccaaattccaaagactttttcttaacctaaaggaagaaattatttgttaattccagtagagcaactgaatatactgggctatttgtacttttttatagagaactttaataataattctttaaaaatgagtttttagaacaaagcaactgacgatttcctaagattccaatgccctggagcttgtaggaggacttagcctgggtcagctggagcacccccgacctgatctcccactgccagattttcccatgctcctagggtatggagtccacgtgggaatgactgcaagttcaggtggaacttggccgactgatgctctgcgagtttttaatagacactggggacaactgcttaaggtttagaaacttccaaaccacaggaaagacatttttagtgtcccccatccagaggcagccctggaataggattcccaggggtttctgggacccctttccttgctccgtgaggctctgtggccatcttttggcaggaggaggatgcttccttggctctgtgcccagacccgcctggtccccaggtctctcaccttgggtgaagattcagagatgccctgtaaggattttgcccactgggcaactcagaaatacttcgatctcccaagatataagaggcagcagcaaacgtgcctattgacgtctgtttcatagttaccacttacgcgagtagacagaactcggcttttcagaaaataggtgtcaagtccactttataagaacctttttttctaaaataagataaaaggtggctttgcattttctgattaaacgactgtgtctttgtcacctctgcttaactttaggagtatccattcctgtgattgtagacttttgttgatattcttcctggaagaatatcattcttttcttgaagggttggtttactagaatattcaaaatcaatcatgaaggcagttactattttgagtctaaaggttttctaaaaattaacctcacatcccttctgttagggtctttcagaatatcttttataaacagaagcatttgaagtcattgcttttgctacatgatttgtgtgtgtgaaggacataccacgtttaaatcattaattgaaaaacatcatataagccccaactttgtttggaggaagagacggaggttgaggtttttccttctgtataagcacctactgacaaaatgtagaggccattcaaccgtcaaacaccatttggttatatcgcagaggagacggatgtgtaaattactgcattgctttttttttcagtttgtataacctctaatctccgtttgcatgatacgctttgttagaaacattaattgtagtttggaagcaagtgtgtatgaataaagataatgatcattcc

SEQ ID NO: 6936 - DNA, 257 bp, Homo sapiens
agtgccggggtgatgtctgtgtacctgtttatgaagcggtacaccgcggaggacatgtacaggccccaccctggcttctaccgccctcggctgagcaactgctccgattactcaggccagttcctacacccagacgcctgggtcaggggccgcagcccctccgacatctccagcgaggcctccctgcagatgaacagcaactaccccgccttgctcaagtgccccgactatgatcagatgtcctcttcaccctgctg

SEQ ID NO: 6937 - DNA, 2398 bp, Homo sapiens
gccgcctgccctttctctccgctccagcctctccccagaacggctctttttgtcacacaggatggcatgtgatcctcaagacgacgaacaatgaactaaagccaaatgcagccctccctggcctccagaggtggcgtgggctggctttgcacgaaggttgtgctgggagaccggacccggggctgcagaagaagctgaaggctgactttgtcccctccccgaaaaagggtgttttgatgcctcagggtctctgaaatctcccgggaagccccagagctttcctgaggctgcctggccttgatcaacttgggaagacaaaattgagccattatctcctcttggaaacgaatcttgccagaaaaacgggatttcagggccttccctccctgcctgggtgtcgggccaccagaaggctctgccggacgccaagaagacggtctctgggctcttgtcagctgcttttgaacctgaggttcctgcgtcgttgagccagaaatcagaccaccgaagctcactcccttcctctccatctctccctctctccaagactctggcagtggcctatgatcctgaagacagctctgcagccaactggtgctttggcctttgcgctgtcccggggccagcttccctcgacctggggaggccgtggcctgtggaggaggcccaggtaaaggctgggggctgttgctggctatcctctttgcttctggaagtttctgcctcactcagaatgggcaggacagacccactgactggacttcagagtctggagggttccatcggtcaggggaatggcggccacgtgacctcttgccgtgccccttgtcatagacccaaggagcaactctgtcccctgagcgttgggggtcccgggggagaggtggacagacacctccctccaactggcatttggcaacaggagcctggacttctgtgcaagaaagggagacctaagggtgaacagtggccaataaaaaccctagagaacaaacatccatttcctaggtggttacaaatcataacttcctgcaaatcaacgccaggagagcaacttaccttcatttctttgtcttaaaaagtagcagcaactggccccacaactcctgtcattgtaagttattctgccaccacctaacaggacggagtggagtgagtttggataaacggaccgagctgggcttctcttcctccctacagaggggagatctcagcactttgtccggagctgaggaagtggtttctgtgttttacagtttttccagccattcttttcttccccctcctgaagcaagcaaagagcgtggaggcgtgtgcaggcttggaagaagaactctccagaacatggaacttaaccctcttttgtataaaacatgtgctttctaaagaaaaattgtttcttattttttgagactccttgatccaccctggaacagtcgcctgtagtcctggtagctgttgtgcttggaaataacgagcgcatccttgcctcagctacctgctcacagcccatgggtggactcggccccctggggttcagacccaggtccgttcggcctagtgatgatgtcatcgtccatcccatcttcctttgcccccaggaaaggacgcatccaccggtagcggccccagctgactgtcgccgtgtgctggggatctgaaatgaggcctgccagggcccctgtgtgctgtgctccagagccttcgctcccatcagggttggcatcatctgatggcatgtccaagtgtgcccagcagcggatgctgaagcaccagagctcaaggccttcacctgctctaggccagccctgtcaccacctccactgccatgaccaggccgaaggcagggaacgccctccccagtcccgctgtccagcaaggccccgagacttttcttctgtgatttccaaaagcaaggcagccgtgctgttctagttcctctccatccgccacctcccctcccgctgccccagaagtttctatcattccatggagaaagctgtgttccaatgaatcctacctcttgcccagtcccaggcagagtaagcagggcccacctagggaccaagaaagagtaggaagaaggggacgagccgggagcaaaaccacctcagacacccgggccttctcagccttctccccgcggccagctgggtctccggggaccctgggccctgggccgcccattcctggccctcccgctgcatctcagacctgacacccaacggggggatgtggtggcctgtgcccaccttctctccctcctcccgacccgccccctcgcccccacccctgtgtgtttcgccagttaagcacctgtgactccagtacctactactggttttgggttggttgttctgtcttttttttaattaaataaaaacatttttaaaatgtt

SEQ ID NO: 6938 - DNA, 522 bp, Homo sapiens
ccctcctgcggccctagcgaccctcaggcttcttccccaggaagcggggtcttggcctggaaccttccagagaggaggcgggagcaattttagccccaccctgctcccatctgcccccctgcaacagtcgcaggctgcttcctctctctgagttcctctgggctgccgcaggctcccctgggaatagagcaagacgtgagtcctaacctggccacagttgggggaggcagagccagcaggtggacaggtgtttgcaggggcccaacttcccctggagctcagaggtgtccccactgtaccagcctctgataagctgcctccagttgtcctttatgaacattgcagggacaacctgtgtttgccagctgggtgttccgtgtaaatagccagcctgtctctttctcggtgataaaacacaccctctctggtgagcccagcgtcccctccttggcttccaggagccctgggaagcatttttaactgggtagaatctgactgtggcttgaaataaaaagctctcag

SEQ ID NO: 6939 - DNA, 952 bp, Homo sapiens
caatggatgaagtccgagaatttgaacgagccactcaggaagccaccaacaagaaaatcggcattttcccacctgcaatttctatctccagcatccccctgctgccttcttccgtccgcagtgcgccttctagtgctccatccacccctctctccacagacgcacccgaatttctgtccgttcccaaagatcggccccggaaaaagtctgccccagaaactctcacacttccagaccctgagaaaaaagccaccctgaatttacccggcatgcactcttcagataagccatgtcggcccaaatctgagtaactttatataaatatctcatggggttttatattttcatttgttgttgttgtttttttttaagaatcttctgatagagaaaaagactgctttgtcactcaaacatgttccttcgacctttcagtgtgcatgtgactcagtaacttcacatagaatatgattccctaagtatgctacacagcatcatattagatgtaagatgtaagacttgcaaaggacagaaggaatcttctgtaaccacatagctgtatgccagagaggaagccttgttattgggcatttgatgaggtttggcatggacttcaaggataaatgaatgaaaactttgcaccacttttgttacaaggtacggtagaaaatagtgaagtcagtttcctctcatcaaatctaaaattctccaaaatactctcaggcataacatacttagctgttaaattttgaactgctaattactaatacttgaataccaatagttactgagattcctattttgtggttagtctgactcaggatttggagcctaattaactctaaacttttgaaaattttaatcatcaagctatagaggctccaagtgcaattaataataactcatttataccttccacagaatttaataaagattctacttgtttctgtctttt

SEQ ID NO: 6940 - DNA, 291 bp, Homo sapiens
tattatcaattctccttcatagacattttataaagctcttttatgtgaactcttgcttcatccaggcaagaacggtgttttgtttgcgaccatctcagtgtcaagagaaacgtgtcagtgagtacctggaccatcacttaactgatgctccggggtaggactgcaggtttcacatgaacctgttctaggctgtggacattggtgtggagaggttctgcaattttttaaaaatatgtaactgggttgattttaagtaaaattatttgtgtattgataaaagtctaatttctt

SEQ ID NO: 6941 - DNA, 2089 bp, Homo sapiens
agttcagcgtgttaacctaacataaaacacagcaagaatctggttgtctgaactattttaaattaaggagccagatgtttttagtcaggctatcctgacaagacttgacctaaacttcgtttttattggtcataacagtccaattatattcttggccaattttgtccaacggacaagaaaaaagcaaagtcaacgacaccattatcttgtcaagatcagatggttttactattgtggcagaagcgagaaaactttgtttattgaaaaaaaaagaaaaagaaagcaagaaaaaaagatactatggggtcaagtgtaactccatggaaatgccacgtctgctcttcagtgaagaagctggtttagagtctcacagaaaacttttgactgtatttatttattgttgcaaaaaagacgcttttttattgctgccctcatttgtcagctaattattttttcttataaaatccagccccggttacatataatcatctgtatcttatcatgattcctgtaggtaaaagtacaagacgacctctagatgtcttttctttctatgaaaggagctgctatgtacacatgtgcacacacacacaactgggaatcaacaatgagtttattgttcatggtagattaaaattaagcttgcataaaggttgggctaagtggtcctggactacagactctgttgccttgaatataacagtacaatttgtcaattactctgcaccaggctaaaatgagtaaaatctatttgaaggtatcttgtttgtaaacatttgtcagattctaatttttttcttttgtattaaaattcaactatggatgtatatgaaacaaaataaatggagataatttttctcccacagacagaggtgtctttgaatgtgcgctaatgattatctgtaagcctttgtggggagggaggcctgcaaggtcatgaaaggcagaagagtctaattgtgcctggatttctccaggacagcagtggcccctcgttttatcattcccagtccattgtcatcacgtcagagaaaaatcttcaggggtgctaatcctgttgcatcagttgatcatactaacgagaacggtaatgcgacaagatacacattgccttcatctgtacattctgtgataccaggcaaattaccaattacacacagctacttatattttatgaagggcattttttagatgacctcatcctctgtgttatttgttgattgggtttgttttctgtttgttggtttgtttgtttcttccacgtaaggaaaagtagtgtaaacagtagcgagaaaatggaaaccacagaggaagatgtattttgcatgtttttcctttcagtgttcttacacgttgtatcactgcattgtggtaatagcttctataaaatctgccatagttggattatgcagctttgcaaaaatttttactagattttgcactaactcatattagctttgtcctaccaacttctggaatttatctaattattgtttttcaaagtttctttccttttaatgtttccctgctatgcaaaacctttcccagacctcagtttcttaaaagaaagatgttgctacagttcccgattctttcttattacaggctcaggtgtacaggttattctgggttaattttatctaatgaagcccattcctttttgtacataaagatgtcacttaaacttatgcttacaaactaaagactaatcgctcaatatgaaaacatgaaaaaatttttgcttaaagtattaagatggaagtagttaaatatgggttattttgtccttttacttttttaaaaaatgttacatattgtatgcactgtgctgatgcaagaattctacattttaatgagttataaaattattctgcatctcatcacgtcacagtatttctgtactatttattcatatatataaatatatatgggcttaatcatttaaaatttgttgcagcaagaactttcctacctgtaggcaatagattgctatgtttttaacaaattgtggcaaattctaaacagcaattcttttgtacgtaataggacatttcatcctagaaaaataaagtaatgtttttgacattgg

SEQ ID NO: 6942 - DNA, 257 bp, Homo sapiens
atcatgtagctgagacataaatttgttgtgtactacgtttggtattttgtcttattgtttctctactaagaactctttcttaaatgtggtttgttactgtagcactttttacactgaaactatacttgaacagttccaactgtacatacatactgtatgaagcttgtcctctgactaggtttctaatttctatgtggaatttcctatcttgcagcatcctgtaaataaacattcaagtccacccttttcttgacttc

SEQ ID NO: 6943 - DNA, 195 bp, Homo sapiens
ggaccttcaaataggagtgattgaaataaataactacttgcatgttatgctttcatttgggtggaatacttcattggaataaactactgatcttgtgctgtgtcaaagtaacagactagaaccttctttcaagtacctgaattgaaatgaaactcattttgaataataaaaactctagaaactctttatcttctc

SEQ ID NO: 6944 - DNA, 396 bp, Homo sapiens
cagaccaatttttattccacgaggaggagtacctggaaattaggcaagtttgcttccaaatttcatttttaccctctttacaaacacacgctttagtttagtcttggagtttagttttggagttagccttgcatatcccttctgtatcctgtccctcctccacgccgacccgagagcagctgagctgcgctggctctgggcagggagtgtgccttaatgggaagcacacgggctttggagtcaggcacaggtgccagctccagcttttgaacttgggcaattgtttaacctaacctgcaagttgattttgagggttaaataaaggcatacatgaaaatgcctggcaaattacctgacacagagcagacattcaatacattttagtttccttgtttc

SEQ ID NO: 6945 - DNA, 2318 bp, Homo sapiens
aatctgcctcctgtgcctcccttttctcctctccccaatccatgcttcactcatgcaaactgctttattttccctacttgcagcgccaagtggccactggcatcgcagcttcctgtctgtttatatattgaaagttgcttttattgcaccattttcaatttggagcattaactaaatgctcatacacagttaaataaatagaaagagttctatggagactttgctgttactgcttctctttgtgcagtgttagtattcaccctgggcagtgagtgccatgctttttggtgagggcagatcccagcacctattgaattaccatagagtaatgatgtaacagtgcaagattttttttttaagtgacataattgtccagttataagcgtatttagactgtggccatatatgctgtatttctttgtagaataaatggtttctcattaaactctaaagattagggaaaatggatatagaaaatcttagtatagtagaaagacatctgcctgtaattaaactagtttaagggtggaaaaatgcccatttttgctaattatcaatgggatatgattggttcagtttttttttttccagagttgttgtttgccaagctaatctgcctggttttatttatatcttgttattaatgtttcttctccaattctgaaatacttttgagtatggctatctatacctgccttttaagtttgaaactaactcatagattgcaaatattggttagtatttaactacatctgcctcggctcacaaattccgattagacctttatccagctagtgccaaataattgatcagatgctgaattgagaataagaatttgaggtctacattcttggttgttaatttagagcgtttggttaaagtatgtccttcagctgactccagtataatctcctctgctcattaaactgattccaggagattggatttgctgtgactagatacagatggagcaaatgtcctaacagagaaatagaggtgatgctgctaaagggagaaatgccaggcggacaaagttcagtgtcgggaattttccccgtgacattcactggggcatgagattttggaagaagttttttactttggtttagtctttttttccttcctttttattcagctagaatttctggtgggttgatggtagggtataatgtgtctgtgttgcttcaaattggtctgaaaggctatcctgctgaaagtcctgctttcctatctagcatttatttctctggcaaacttttctttcttttcttttttaaagtaaacttgtgtattgagtcttaactgtatttcagtattttccagccttatgtgttacattattccaatgatacccaacagtttatttttattatttttttaaacaaaatttcacagttctgtaatgtaggcacttttattttcattgtgatttatatataaggtaatgtagggttatatttgggagtgactgcaagcatttttccatctgtgtgcaactaactgactctgttattgatcccttctcctgccctttcccaggtaatttaaattggtcatggtagatttttttcatagatttgaaaaacttttaggttgttaccaagtatgaagtataaatctggggaagaggttttatttacattttagggtgggtaagaaagccaccttgttacaaattttttaatttccaaaataatctatattaaatgagggtttctgatctgtactttgtgtttagctacctttttatatttaaaaaattaaaaatgaaaattacgttcttacaagcttaaagcttgatttgatctttgtttaaatgccaaaatgtacttaaatgagttacttagaatgccataaaattgcagtttcatgtatgtatataatcatgctcatgtatatttagttacgtataatgctttctgagtgagttttactcttaaatcatttggttaaatcatttggcttgctgtttactcccttctgtagtttttaattaaaaactttaaagataagtctacattaaacaatgatcacatctaaagctttatctttgtgtaatctaagtatatgtgagaaatcagaattggcataatttgtcttagttgatattcaaggctttaaaagtcattattcctgggcttggtaagtgaatttatgagatttactgctctagaaagtatagatggccaaaggaccgttttgtattgcttcctgattaccagtctgattataccatgtgtgctaatatactttttttgttatagattgtcttaatggtaggtcaagtaataaaaagagatgaaataatttaaattctt

SEQ ID NO: 6946 - DNA, 568 bp, Homo sapiens
aaagcagtggacttaatcggttgaccctactgtggattggtgggtttcggggtgaagcaagttcactacagcatcaatagaaagtcatctttgagataatttaaccctgcctctcagagggttttctctcccaattttctttttactccccctcttaagggggccttggaatctatagtatagaatgaactgtctagatggatgaattatgataaaggcttaggacttcaaaaggtgattaaatatttaatgatgtgtcatatgagtcctcaagcttctcagacttctcttattctttacaaaatgaatgcattggccctgacaaaaaggtgctacggtagtgatgaaattataagtagatttgtagtttgtcccatttattattttaatatttatgtttaagtgcttggttgaaaagattccattttatacaagaagggagattcaaaaaaaaaatataaggttgggttagcaatatttatagggcttttattttttaagttcaattgtgtctgtggtccagaagaaattatttaatatgcatctttgagaatattataaaaatatc

SEQ ID NO: 6947 - DNA, 2259 bp, Homo sapiens
tcctaaattgcaattatgagggctaccactgaatcattttatctttcagccaatcaagtcgttgtaaacgtggcttttttgaaagtgttatggctatgttttatgatgatgctgggtaagtagagtaagttaaacttggtaaaagataatctaaaaattccatagttctcagttattaaaatttttcttgttcgccaattttgtattaagaatgctattaagcctaattgattaaaatttatcttttttattatcttacatgcttgtatcttcagttggaggtgtagtattcaaaaacggggaatgaaggcaggaaggaggctggaataaataaaaataaaaatagacaagtaagacagcataaataatacatttttaaacatgtcaacattgataatacaatgaagatttaccataaaaagtatcatatctaaccaagatatgcaaaagatgcattcagtaagctgtaacgttgagaaatgtaactgtgaaatcagctcaccagttcaagtcactaggtttgccacttggaccgtcttggtttcagcgagcatagcgagtggctgtaagaaattgtccatgccaccaattccactgctacttgcccaggtagtgatcagtgagagttagaagcaattttttctctaaccgatgaggcagaagaaaagttaacagtatttaaagcagcatttctctcttaacgttcctgggagactccaacaaatggagaccagaaacaaggcaaccacgaccttgctaggttctctgaggaggggactttctatgttcacgtcccaccttcttcgaggacatgaccaagggacaggatcatacagatgaggtgaggggatggttagcagcgataaacattctcagacccttggagagaaaccgttgctagcttgctggtcccgaaagattgcaactttggctgctacagaaaggatagaacctttttggggggagggtggggagggagatatttatttgtgcccagaagcagttatgtatgcttcttgtcttggttactgtacaagatacaaatgactcgagttgtggattgcaagaaactcttttattaaacttggaacaaccatttaaatgaaggattttgtgagatagaattcaattaaagcgatttgaatgcacagtaagtggataatctgagtacaatgaaatttcttaagttttagaacatgagataaagttgtatactctactttcatgttaaaatgttaatcatgattactttaagcccacatccactgagtaaagagtcactttaaactttataaatcaaagagatattaggaacattcagaattatttgtgttttgtttttgttttacattgttgctgcactggcaataagtatgtggcactgtttttatttgtttatgttatttaaatacacacccagacacacacacacacagtttttgctttttctggaaaatctttctttctcttctctctccatgaaaattaaaacacacaagtgaatgaagtaattacatagtccaagattagaaatacaagtaaaatatataggtataggtagatagagtgcctttctgtttcttttcttttcttttttctttttttgttcttccttcctttcttccctcctccccctcatccttccctttctccttcttttcccttttttttttttttttgacctgggagtaataaagttactttttaaatgcacgtatgcaatcttttattcctcttgttttatggataagagatttgttcaggtcaaaagttgcaaaactgttctgaagcttaatattagagacccaagtaagattgtttttagtcttgcttgaggaatgcacactccatttaaaaaattgtgcgctctgtagatttggattttacagcagcaattacttggctaaattagagtactgcaatcttgtaagtagaaaacagccaccatgacaataaacaaaaacacttaaaaatatttttagcttgttttacctacatctagtttcatttcatcttgctttgctttgttgactctgctaccgctgatgtttgccttgtcaatatcagaataggggcatcagtgtcccgtgaaatacattttgttgtgctatgagcctctgtaatcaaatgcttgtactcagaagagagtgtaaaatcagcatttctatgtaacatatatctctaattatctgtgtaattttataacatactttgacaaccccagtgagttacttaataataaagatcttaaaataatgc

SEQ ID NO: 6948 - DNA, 3717 bp, Homo sapiens
ctgactgattccttctctggaatagttactttacaacacggtctgttggtcagaggcccaaaacagttatacagatgacggtactggtcaagatgggtcaagcaagcggccacaagggactgaggcaagcacaatggtttcaaagaaagactgtaagctccatgattagcataaagcactaaccatgtctccatgtgacccgatggcacatagatgttgtagaataagttatgggtttttatgttttgttttgtgtttttccaaaacttgaacttgcaggcaagccttggttgggtatttgatttatccagaatgcttctctttagggaacaaggatgtttttaatggcataacaaaggcaagactctgccttaatttttgaaaagctgctaactacatgaacacaaatgtgtatttttgttgcagtgtagttttccttttgtgtaattttaaagtcagtgttgaattttattgaaagctcatgatgcgcttcaaagtggcaagtatttggctattaactgccaaaacaagagcctgattttttgaggccagtaattcgtttgctagaattgattttttttctctctctctttgttacataagggcattatgtaacactagccgaatggtagcctctgggttgttgtttttttcttttcctccatgatgttaatgggttatctcaaattttaagttaaactacctaaaataaataccaaagataatgcatatttttgcacagtggagcttacacttaaaagaaaacaaagccccatgggctgccttgaaatcaagagacaataactttgaacctcagcaagaccttgaaccgccggttcattttgcaccttattcagaaaatagagcatcatactcaccgagtctagtcagtgtagtgcttttaaaaattttgtcctttcatgtaacttttttattttaagaggaagaagaagaaaggggcacacacacacaataccgacgtctatcctttcctgctaggcagtgctggccaggctcatgtgtagtgtgcgagatggtgatgtactcttatatttttctgggcttttccttttgcacattccaaaattcatttcataagacaagatcttcataggacctccttggcatcctggcattctcaaaactgagccatccagcatgaaagataaatgggtttaaacccttgctgctgaatttattgcctggactgtcaggacatcaccagcccaccttcaccttagggaagatgccacacctggcctccacacttgctcttctgatcagtctgtctggattgagtcctacagtgtcagatagggcggcaaatgccaaagcagggaaacagggaggtgtggacaagccagtttgatgcagcacttcagatcaagtgcttaggaaggagaggaaacttgccttttttatggcagaggatagtaatgaaaatgtctcagtattttagggtcaatgagagccataaaaatataacataatcacaagtaaaggagataatggtctaaaacagctatttcccttttctgtgtgcatacttatgactgaatgtgagctaagcattttctcctgtggagccctagagcaggttactaaggaaggacacattgttttccagaagcctcccctgcctggctgactgccttgctagaaacataattttttttttctcactgaagctcaataatggaactctttttttttttttttttaatttaaagttccctatttgtgaattctgggattactgacttttctttttaattggagtctcaaaatcaactctcttatggtattatatctctgtatgccattaaaaaacagcttgttctagaatcatgtattttgtaaactgatgtttgtgatggtctctggttcttgaacagccatatctgaatgccgtgcctgcaaaactatgacaatttttgctgttttcagccttcagatttgatggcttgggaaactgaggtgttattttcaatgaaacaaagaaagagatgttaagcaagtggttgttttagatccaaatgtaaaggcaggtttgggaaggtgtttaaagagttggaggaattggggattgagttgtaaagaaaacttacagaagaggcaacaatttggttcttgacagtgagaggatattgagggcttcagctgctgctattatgatgttttgcaaaggaaaataatcaaaccaaagagtattcagtgatatgtaaattaaatgaagatacagtggagaatgggggtgaccacaaaagaggctccccctaaacacacagtgctgccacttaaaaagacttgagaaatttgaaagggggtgggtatggggggggcaagaaagagggagggaaatctttcaacttatttctgaaaaagagaaaaaaatataaaatttctggtgcacaggtttgttttttcaagaaaattttgcagaagctatgtttttaaagtgtacattttataaagtttatcagatattttcatatttaaagccaaatgtaaatagaggtctgtaaagaaaaataattgccatagaaagtataatttcagtgcagtaatttctgagagctagtacctatatgctaccggttagcatggttttagcaaatatataccagccttataaggttcgtattgctatgttcttctgttatttatttcagcatggactgttcatttgaaacctttttctagttattagcgttttaacagttacaagctttaaatggcaattttttttttttttttttttttttttttttttttgtcaagagccaagacacaggtaatgcacgacattgattgctgcattttaccttcaaaatatttgtccttattgactgggtctccttaattaatgtacacatgtcattagaatgcagacggaggggactcaccatgaatatctggggttgattcccagatgtgtgttgcttctctattgcaagcagattccctgttggatttacttcggatttattcccttttaaagaatttttgcccatatctggaagggcactatatttttgggaggagccatagattcctggttatcctatttttaaacaaaatgtagacaaagtgaactctattttgattattgagaaaggagtagttttctatccctctaagagtatacttgaatcagacattttaaggatgtcactatggcactgttgtcatttccaaattcctagaaaagtttgttttactttgtttttattctgttaatgcattctttcttctctttacttcctttcttaccagtacactcctatctcaactctgtttatttgatgagttctgtcccgtaaatcatatttcccttacaattaataaatgtcacttcatattttataataaaccactcagtaaaagcaaaagcttgtcctgagaagtagagtgagttctttttcactctgtgtctaataatgttaaggtgggaaaaaaaaaagtgtggcatagctacctgcccatccccaaccctcagcaaagtagaatctcttttctggtaattttgggtttccgctctgggctctggcaagttgaacaatcctagccattgacaatcgtgatagttattattttcccatttgctgtctttttgtatctaaagtcttcctattgtactgcacaaaccatggattgtacatatttttatatattatgtcttattttattatttctaaataaaaaaattaaaaattg

SEQ ID NO: 6949 - DNA, 2024 bp, Homo sapiens
ggaggcctcccacgaagggcgaagatggccgagatgatcctaaaaataaccgaagaaagagaggaccaaccagaattccctttggacatttgtgtttttttgtttttttattttgttttgttttttcttcttcttcttcttccttaaagacatttaagctaaaggcaactcgtacccaaatttccaagacacaaacatgacctatccaagcgcattacccacttgtggccaatcagtggccaggccaaccttggctaaatggagcagcgaaatcaacgagaaactggactttttaaaccctcttcagagcaagcgtggaggatgatggagaatcgtgtgatcagtgtgctaaatctctctgcctgtttggactttgtaattatttttttagcagtaattaaagaaaaaagtcctctgtgaggaatattctctattttaaatatttttagtatgtactgtgtatgattcattaccattttgaggggatttatacatatttttagataaaattaaatgctcttatttttccaacagctaaactactcttagttgaacagtgtgccctagcttttcttgcaaccagagtatttttgtacagatttgctttctcttacaaaaagaaaaaaaaaatcctgttgtattaacatttaaaaacagaattgtgttatgtgatcagttttgggggttaactttgcttaattcctcaggctttgcgatttaaggaggagctgccttaaaaaaaaataaaggccttattttgcaattatgggagtaaacaatagtctagagaagcatttggtaagctttatcatatatatattttttaaagaagagaaaaacaccttgagccttaaaacggtgctgctgggaaacatttgcactcttttagtgcatttcctcctgcctttgcttgttcactgcagtcttaagaaagaggtaaaaggcaagcaaaggagatgaaatctgttctgggaatgtttcagcagccaataagtgcccgagcacactgcccccggttgcctgcctgggccccatgtggaaggcagatgcctgctcgctctgtcacctgtgcctctcagaacaccagcagttaaccttcaagacattccacttgctaaaattatttattttgtaaggagaggttttaattaaaacaaaaaaaaattcttttttttttttttttccaattttaccttctttaaaataggttgttggagctttcctcaaagggtatggtcatctgttgttaaattatgttcttaactgtaaccagtttttttttatttatctctttaatctttttttattattaaaagcaagtttctttgtattcctcaccctagatttgtataaatgcctttttgtccatcccttttttctttgttgtttttgttgaaaacaaactggaaacttgtttctttttttgtataaatgagagattgcaaatgtagtgtatcactgagtcatttgcagtgttttctgccacagacctttgggctgccttatattgtgtgtgtgtgtgggtgtgtgtgtgttttgacacaaaaacaatgcaagcatgtgtcatccatatttctctgcatcttctcttggagtgagggaggctacctggaggggatcagcccactgacagaccttaatcttaattactgctgtggctagagagtttgaggattgctttttaaaaaagacagcaaacttttttttttatttaaaaaaagatatattaacagttttagaagtcagtagaataaaatcttaaagcactcataatatggcatccttcaatttctgtataaaagcagatctttttaaaaagatacttctgtaacttaagaaacctggcatttaaatcatattttgtctttaggtaaaagctttggtttgtgttcgtgttttgtttgtttcacttgtttccctcccagccccaaaccttttgttctctccgtgaaacttacctttccctttttctttctcttttttttttttgtatattattgtttacaataaatatacattgcatt

SEQ ID NO: 6950 - DNA, 1492 bp, Homo sapiens
actgcttggggggtgggaaagaaccaagccatgctctgtctactggcaatgggctccctacccacactggcttcctgcctcccacccctcacacctggcttctagaatagaggattgctcagcatgagtccaattcagagaacggtgtttgagtcagcttgtctgattgaatgataatgtgctaaattgattacctcccccttaaagcgaacactgaaatgcaggtagacaattcaaagtctggagaagagggatcatgcctggatatgatctttagaaacaacaaaaatagaaaaaaataagtatctgtgtgtttgtgtattgaaaactcaatatgtaatcttgtgtttttatatgtatacttgtatattcctatttattctctgtataggcattacctacgttcctgtgtttacatacacaagtagcaaattcgagtatgcatagtgtagatggacatttgccacaacacactgcccgcagaaatggacttaccgtgaagccaataaagttcaagcttcagggatctctcttgcacgggccttgccaaggcccaggagggacttgggcagtatgttcatgtggtcatatgtttttgtaaaaaattgtgaaagtaagatatgtttgtattgtttttcttaaagaggaacctcgtataagcttcaagcctcacaaaccttctagcctctgcccttggggatttgcttcattaatttcaggcaagtgaggtcaatgtaagaagggaaagggagaagatatttgaagaaccagaatgtaaattcatgtgtttccacttctcagatatagtcagagaattattcatttgcccaaaaggacttaagtggttgtggtcatccatcattgtatttatcaagacaaagccaactttgttataagattgcatttttttcttttcaaattgctttagtttttcttagggagctatgagggggaaaaatcactaacatgaaaggcaaaaaatggactatgattcctgtggggaaacaatttcattctctccatcgtgaaaataagtgaataagagtgaagcaaaattacacctttatgagaaaccataaaattgtttttatttttcaggccagacatagcttcctaatgaaagaaaatggaaatgtaattcgacgactcctcaaaggggactttagaggacttcatacaaagctgggcattaagaaaaccacaatgcatggccgggcgtggtggcttacacctgtaatcccagcactttgggaggccgaggtgggtggatcacccgaggtcaggagttcgagaccagcctggccaacatggtgaaaccccatcactactaaaaatatgtaaattagtcgggcgtggtgtcacgtgcctgtaatcctagctgctcgggaggctgaggcaggagaatcacttgaacttgggaggtggaggttgcagtaagctgagattgtgccactgcactctagcctgagcaacaagagcaaaactcagtctc

SEQ ID NO: 6951 - DNA, 53 bp, Homo sapiens
catggcaacacatctgtctctccctaaataaatactaccacattatttcttct

SEQ ID NO: 6952 - DNA, 1615 bp, Homo sapiens
gaagcacgtttaagtaggagaagccttcgtgacttctctctagtgccttcgtgccctgtgttgcccactgaattgccctgtaacacctaagtgtagtggtagcattaagggatagcttttcagccctcaaggttatcaggagcatttgtatcactgctataaataaagtagtatcacttgtcataatcagggtgctgaaacataatgaaaaggtttaacttagtcacagtaaatattttatatccctgaaaataagttatttaatgagaatagaactatttaatgatccatgagtcctaaaaggatatctgccttgtattgccaagtttaaggcaaaggtgagatcctgtattaataagaagacagcttttttgtttgacattggtaagtaccaagaattctaactcacatatagtaggaaacaacaaaaagtctccactgacttctttgaattagatactgagaatccacaatacagtagtgtggataactttcaagaagccattggaaacatctccacattctgggatgacttgtaaatgtctacagagtaatggaaggaaaggcttccttgtctgctcattgctgccacctgggttgggaaaataattgaagatgttttctcaagtccttcaagaatctcttcttaatgttcagaatagtttaagagcgttgttgaggtaaactgatagctgattattttctgagatttagatctaaacaaactcagcatgacgaggaagcacacttcacagctccagggtgcaatactgatgtaaagttgcctcgtgaggatacatttttcgctcatgtatgcaaaattcctatcagttcatttgcacagccagttccaatcatgtatgtgatcaccagattaaaagcttcatccagaaagacaagactcctcagaacgaatagtagacaagtaagactgctacccacagaagccagtacgcttcaggtgtgaggcggggtaactactcatctcttcacagagccaaggaaagaaaaagaacgtctctaacatgatttaccattttaaacagccttataagttttgtctcttaaaatcatgctgcagaaggagggggtaaaagtcgtgttctgccctgtctgtggcattggagtgccccgctaggtaagaagcaacgcttagatcttgcttccaggcagcagcttgaattcccgaatcttcctgcaaggtgcatacaaatgcagcgtgagaatccatacacgtaatccatattcaccttcccatccatcccgcagaagaggcatggtgacacccaggctactgtccatgcttgagaggacgtatttgaaggttctgttactacaagttgggaatattcacggacatgcctgaataccccggctgtaactcacacgtggtctgtgtaagtggattaacctcggggcggccttgtttaatcctgaataatatctgaaagactgagtttacttgggaatgtgtagtttttctaatgcacattaaaatttattttagctgttaaaaataaaatcattttattatcagcagactcttttatactttatggggcatctacatactacttccgccactcttcataataaaattatttgtaaaatataa

SEQ ID NO: 6953 - DNA, 49 bp, Homo sapiens
accagacacactgattggaactgtattatattaaaatactaaaaatcct

SEQ ID NO: 6954 - DNA, 1807 bp, Homo sapiens
cagactttcgggggttcctgcctcctttttccgttctggtttttaattagtgcaaatacaagctgcgtttctttaatagaaaccaaaggcatctggagcccgagaggcctcctgctgtggcagaggagcagctgggattcccgaccaaagccccagggggtgcagaagactcaccacgcgggccagcctctctcttttgccctgctctccacaccagaaatgcccccaggtgcttggctgcctcagaggtaccatccctgagctggctgcctggccctgctcacccctacgcctcgcccttgccaggaggggagtggcagtgaggagggggccaggtcaggcaccaccatcaagagagctgtgtgttctctctggtcccacaacgatgactctgcctcttgtcagcccagccaagagcccagacgacccctctgtcctcgttccctgtcctcgttccctgcaggtaacatgagaagggctgatcaggagatgctctttaagaagttcgcacccctgctgacaccagaacagcccaaatcagagttcccagggccagacaggctcttcctgggccacagaggggaggcatcaggaaagctctgcagtggggggctggtggctccggggctgggggatcacaggctggtgaaccccggtgggaacagaggtgaaagcctgccacattccgcctgtctccctaaccctccattgcctcgcctctattccagaatcaatgctgcagaatgtgttagctgcagataggcatggtctcaggtatgaacagacactttgaaacgactttaggtctttcttttctccagtgttttaaacatgttgattatccaaagaattgaaactcctagcacatccagtttttacaacagatttgcagctcattccttaccctggttaggtcactacttttgcagattttgctggcactgatctggagatctgcagatctggaggagacgggaaggagtcgattcttaaataaggatcagtgaggcatcctgtcccaagctactgtttggtggggatctgggttcatctcacccacagagggaggatctttaagaggagaaaaaagccaagagggaaagccagagttccctgttctaggggactagccaaatgcctacatcagctgtcccctccctgttgtctccaagtaagtttgccagaaaaggttttagcaaagtgctacaactgtgtctttataggaggataggcctctgccctgccccacccccaccacctgtccccacccagtgtcccaggccacaggagcttattggccaggagggaataatgtcccccaatactgcctgttgagggaccagagttggggtctttggtgcttccaacctcctgccaacctggagttcacaacaccagagccccacggcctcgcacactgaagcaggggcgtgcggtgactcggtgcttctgttttggaagaaccacctgtcatcaaaacatggacagcagggtgttctcagctcccagcgaagcctccacaacagaatggggccacagggcagccgggactccctgtctcacctacattaacccatgcatactgtatgccataaactcactttggtatatccgcgtcacatgcagagaggaactctgcgacgtcaaagtgttgcttcttaaagtttcattattggcaactagagggttgtttttaatgcatggaaactaaacagattcctcggggagttcctgaaggaaccaggtgggcaaacctttgcttatatacatgcggcctcacctggaagagaaataaaccacttgtact

SEQ ID NO: 6955 - DNA, 295 bp, Homo sapiens
accctcaaccagacttgcatggccatggcagggcctcgggaagaccttcaggagtggggaagggtttctcctccatgatcgaccctcctcgtccacctacaaatcaggaacagaaagtctgtccactttgaaaatacctttccaggcagctccctgaccatttggacacattgccacgacaggagcctccaagtatgtgggaggggacgggcgggacgagcttggctgttctgctgcacctgaatgctttctgttatcctaattcttgtaaaattaaatgaatcgtaacaatgcc

SEQ ID NO: 6956 - DNA, 354 bp, Homo sapiens
gaggcaaggcggaggggccagggtgggggtagccgtgagacttgggaactcaggccacaaatcctgtgtgactttgctaagctctttaacttctctatgcgtcacattccccacctgtaaaatgggagcagtccatggtgcagccctcatggggttgctgggaagattacataaatgcctggcacataccaaggactcaaaaaatggtaactaatgttataattagggtttttcaggctgggcacagtgactcacacctgtaatctcagcacgttgggaagttgaggtaggcagatcacttgaggccaggagttcgagaccagcctggccaacatggcgaaatcccgtctttac

SEQ ID NO: 6957 - DNA, 399 bp, Homo sapiens
gtcagcggtggcgaggagaggcgggcggatttggggagggccctgaggacctggccccgggcaagggactctccaggctcctcctccccctggcaggcccagcaacatgtgccccagatctggaagggcctccctctctgccagtgtttgggtgggtgtcatgggtgtccccacccactcctcagtgtttgtggagtcgaggagccaaccccagcctcctgccaggatcacctcggcggtcacactccagccaaatagtgttctcggggtggtggctgggcagcgcctatgtttctctggagattcctgcaacctcaagagacttcccaggcgctcaggcctggatcttgctcctctgtgaggaacaagggtgcctaataaatacatttctgctttatt

SEQ ID NO: 6958 - DNA, 666 bp, Homo sapiens
gcttttgtcctgcctcgccatcggagctctcatgggccccaggaagtccagggacagctcccttatacctggcccacgtccttctcagcctgccctcgacaacagtgaccaacagacaggcagctgggtttcccaggccatccctctgttgccatcagcttgattggcttccccgagggccagcagggctgggggctccggagagcagcaggaagcactcccagccaccagtgcctgtcacctctttcccctttgcccctgcttcatcccagctctgtgtgtggaggacaaagcttcttcctgcgtggctccaggaaaagatgtggctcacgtaggtggcacctgccaatagctttgtcaatcacagccccataggaacgtctggaattgcttgggagttggggagaactgtcaagaagagtgaagagagtgccaaagcggagatctgttcacctgggggccatggaggggggacccactaaagatcaagatcaaagattctccccatctcacagacaaggaaactgaggccagagggaggagagaattgctcatggctccagaactggtggcaagtttctctggactcttaggtttatttttaatatgaaatataaaaacagtttcaaatatcttattgagggagaagtaaaaacttatttaaac

SEQ ID NO: 6959 - DNA, 1431 bp, Homo sapiens
gtcactctgaagccactctgaaatcactctgaagccaaagctgggctcagtggggaaggtcaggaatggagaaattgccttttctcgttagcctcctcttgccctgatttcatcctccctatccctgcacactttcccctggctgctgttgtaatctacttgttctgctgacgcccgaactgacttctttcccggtctctccccactttctttagatggtcccttccctctttctctccctttccctcctgaatcgattcattttttctctcctgttttatattttccatatctgtgggctttgttctacatttggggagctttttatattgtttatttcatgcttgtactttcccttccaatccttggatcaaatattgattttagagactgtatttttatttcgaaaagtttttttggttctttgattactgatgttttcaaactctcttctgttccttgaactatatccctccactcagtggtcacatctttgttttgttgtctgcttcttctatattatgagccttcctcaagtgtctgctgattcttggttatccaatcatagttgagaacaagataaagtgtagctaactgagacctcagagtatgtaggagtaaatagtatataaaatagctctggtggctcatgcctgtaatccagcactttgggaggccaaggcggacagaccacctgaggtcaggagttcgaaaccagcctggccaacatggagaaaccccatctctactaaaaatacaaaaattagccaggtggtggcacacgcctgtaatcccagctactcaggaggctgaggcaggagaatcgcctgaacctgggaggtggagattgcagtgagcccagattgcaccactgctctctagcctgggcaaaaaaactagttccaaaaaagacacttgtacacgcatgtttatagcagcacaatttgcgattgaaaacatagggaaccagcctaaatgcccatcaagcaatgagtggataaagacaatgcggtgtacatatacaccatggaatactattcagccacaaaaaggaacaaaataatggcattcacagcaacctggatggagttggagatcattattctaagtgaaataactcaggaatggagaaccaaatattgtacatcctcacttataagtgggagctgcgctatgaagatacaaaggcacaagaatgatacaatggattttggggacttaggggaaaggatgcaggggatgagggataaaaaaccatacattgggtacagtgtacactgctccagtgaagggtgcaccaaaatctcagaagtcactgctaaagaccttatccttgtaaccaaaagccatctgctccccaaaaactattgaaataaaataaaatataaaaagaaagagaaagaaaagaaaatagttccaatttatcatgcc

SEQ ID NO: 6960 - DNA, 1249 bp, Homo sapiens
atcccagggggcagagaggaggctctggaggcacacaggatgcagccttccccctcccaggcctggcttattccaagaggctgagccaatggggagaaagatggaggactcactgcacagccgcttcctagcagggagctatactccaactcctacttgagttcctgcggtctccccgcatccacagggagggtaaaacacttagcttttattttaatagtacataatttaataccaaaaaaggcgcctggatccccaaaaaaccgaggctgggagctagtggcccttttgctttctaggacttggggggccggccctccctcctaagcataacaaaggtggtgttgctccagctcagccccaggggacacagatgcactttgggggtgagggcaggtaatgactccatcgcaccctcagttcagctggacagaggctcaggtgaccccagccttcactgtctcccgctctccaggagcttatcttcgccccatctcccaaataagtgggcccttgtgctgtgaggaagaccaaagcctcagggaagataagagatatggagatgggagggggaggacaaggggcagagagtagggtctagctggctatctctggccttactaacacccccctggaggcatgccccttttctccagcacacaagcacattggggcacctggaaatattggttccaggctcctgttctctggacttcagatcctgggggagcccctcccccccctgaatccctggcttagctaccttcctgcctgtgcacctaaaaacctcaggtcagaactaggaaaagagttttgtttttatttttttgaaatggagtctcgttctgtcgcccaggctgaggtgcagtagtgcaatctccgctcactacaacctccactccctggggctcaagcgatcctcccacctcagccgccgaagtagctgggactataggtgtgtaccatcacacctggctaatttttgtattttttgtagacacagggtttcgccatgttgcccaggctggtcttgaattcctgagctcaagcaacctgccggcctcggcctcccaaagtactgggattacacgcagaaggcaccatgcccaggctagatgtgtcttatcccaatcctttggcaggcatgcagctccacaggcgatttcttcaagcagctgaagtgtttagccctcctgggttaagagccagataaggagaaatccctttcctaggtttggaatgtgttgtg

SEQ ID NO: 6961 - DNA, 569 bp, Homo sapiens
cacccatgccctttcctttaacttctcaaacagataccagggcctaaactgctttacctcccctcctactgagtcaggttaggtggtgggaggtcacccatttccgagttaaaccaatgcaatatgagtaaaacaaagtcatgtgggtatgtctggggtagagagaggggtagcaagttcatgtgtcctccttggtcacatatctcccaaagctccgatccctgccatgggaagtggacaggaaacatgaggtcatgacctgcaggcatctttactgcagctctgccggcctggagggggagagggggaggaagaagtatgcgctgcacatttctgaggctactgcatttgctttcaaggcagaaatcttgctctgagcagtcagcggctccagtttgggcccgataaggaagttctccgtggcctccctcaggcagagcagggaggaggctgacattgccagtctcttctggggcccaaggcaggttgcaggagatccaatcccatagacagctctgggcctcttgcatttgagtttttcagaattaaactgcagtattttggaaagc

SEQ ID NO: 6962 - DNA, 699 bp, Homo sapiens
gcgccctgctgccacccagtgactggcagggccgagccagcattccaccccacctttttccttctccccaattactcccctgaatcaatgtacaaatcagcacccacatcccctttcttgacaaatgatttttctagagaactatgttcttccctgactttagggaaggtgaatgtgttcccgtcctcccgcagtcagaaaggagactctgcctccctcctcctcactgagtgcctcatcctaccgggtgtccctttgccaccctgcctgggacatcgctggaacctgcaccatgccaggatcatgggaccaggcgagagggcaccctcccttcctcccccatgtgataaatgggtccagggctgatcaaagaactctgactgcagaactgccgctctcagtggacagggcatctgttaccctgagacctgtggcagacacgtcttgttttcatttgatttttgttaagagtgcagtattgcagagtctagaggaatttttgtttccttgattaacatgattttcctggttgttacatccagggcatggcagtggcctcagccttaaacttttgttcctactcccaccctcagcgaactgggcagcacggggagggtttggctacccctgcccatccctgagccaggtaccaccattgtaaggaaacactttcagaaattcagctggttcctccaaacc

SEQ ID NO: 6963 - DNA, 1792 bp, Homo sapiens
tggcaggacaggcaggtctagtgacaggaggcataggggccccagccccacccctcgcccgcagagcccagatttagttgctcccaggtcttcatggggcaggtgggactgtggctctaggggaaaccccctgtccagctggggttgttctccccacccaccttccacccagtctgcacctgtcctcactcccccgggcagctctcccaccaggtccttctgcctgggtgacgcgtggctgctcccaagttctaagactcattactggaatcacacctctcccacatcttccaacacgcttcacccccaaccctacttccagggcgggctactccctgcacaatgggagatgcagtgctggcactgccatcatttgtcccagacccatgcccctcccctctcctgccccatcctgcgtccttgtctaagaaacctccactagcagctgctgcctcttcagaggcgaatcccaggctggaagtatcctagccaggtctgcctgtgacggcagggcccaccctcccaccaggcctgggaggcggtaggtgccacctcagagagggcctggctggccccatgacaagaacaagaagtgctaactggtaccagagtccccagatagagctgcgagggccctcgctgtgggcgcgagctccggagtagcaggctggatggagcatcccttctacagggacacagccgcctgccagctgggcctaaagtctggagcttgtctctgaaagggaccgtctgctgccctcgctgccccactggagccctcagggcctcctacagtgcaggtggtcctactagagggaagccatccccacctggcacctcagcggcttggcagtgacatggcagtgggagggctctgaggttcccaccctgacaatggtcaggctgcccgtgctcccactccaacactaaaagcggctcccttaggggctgagcgtgggtgctcagtgttcacgctatatcccttgggcaatgtggggttggatggggcccccacttccattcccatggaaggaggccaggtccccagccacctcccactcagccatgcacgcacttgctgggctggcctcctgggaaacacaggtgactcgaatgaactctgcattttcaacgtgccttctactgcttcaggacctgggggtccccctgaccctcactggcttgcccccagccctgggcctggccccacctgtcctggagcccagagcccctggcctggagctacctctctggggtgggtctcaggccccacccctccctcttttgagttcagtgccttgctcagcccctcccctgtatctcagcgtcttcagacctctgacagagcgacgatgtagggtctcccggggcccaaggtggtctcagggtcaggggtgggatttgcagggaactcggggagcccacgggctgcgccacctctgccctggcagctgaagcctgggagagtccctgcgtggtgtaattggcctcagcccgctttctctgtgccgtcgcacctcagtgtttctcatagcttgtccccacgtgtcactttccatccacgggaaaaacaaatgccccttctccatctatcattgcgacttcctcccaggaggcctctcaggttgggtagagcaggggcctgcagtggtcaggccaagagcaaggaagacctggctgccccactgtggctgaaaactcaaaacatctggaactacccttctccaattacgttccctcttgcttaaagacaaagctaattaaatcatcctgccacccgaggctccaaacc

SEQ ID NO: 6964 - DNA, 1723 bp, Homo sapiens
cccttctccggcctgcagcctcccccagggtggaagccgtggggtccctcaggcctgggcggtgcagcttccagagagcgagcgccctttagcggcctgccaccacagcacgcggcctcctgatccggaagcacgcagcatgttccctgctgagcggaggcagcccacctgtcctgcctcccaggagcccttggccacctcgcgccagcccaaaggcgcagctctgagttcaaagccaaatgtccccactaccccagggatcccccagctcccccagcccctggcttcctgaccctgcgcctcaccctcagactggtgaccaggcttctgaaagccattctggatcagttggctttttttttttttttggttaagtttgttttttctaagagatttgcaatgcaaggtctccttgaccccttgccacaactggaaacacttgaaaggggaccccagggccagctgtttcaggggtttcctggaccacccactgcttctccccaaccctgatgcgctgacattcccttagcaccagctgtcccacctccagggtcctgaccaggtcagagatgtcccctgccatgcagagcaggaagcctcagctgggcctggagtgtccctgctccagccctgccagggacaggtttctccctggatactcttggcccaccgcagatctgtagccagtcagaggaggaggagaaggagcccctcagcagagtggtgcagtttcgctcagagcttgtctccttggcttccaaccccagaaatgcctgctgggccttaagctttccaggggccggggcagtggggagcccccatcccttcacaccgccaccaactaaccaagcttggcctctgactcccgtctctgtgcttgcccccatctcagggaccatgatgtctcagtcactccacgctccccacaggccaaccctggcacaggtcatgtctgcagcccccagaatgttctggacatgcaccaccagccggtggtcccaatgtccacccctgcctccccttcactggggactggggttttcgccccatgctgcatcgtgttgtattgggatggggctgaggaacatgctccctccctccctcccataaaatgcctgctcttcacctcccacctttgtggggggcttttgaggacccagctgcgtcaggagttttgcttcaagatgtcagaaagtcaagttcagctaagagacacccaggtccccagcttgccctgagcagcccttcagggcttctggttccttctgccgcccttcctgagaccttagaaaccagaagagccatacagtcagtggaaggcgggggggccctggcctctgcaccgggatcccagtgggaaccttcatgccttatttatttctaatgggtaaaggggttttcttaccaagcatccctgacctcctggagacaccacctgctttccgggcggcactgtgatgggagctggtggcgactgagtccttctgtacgtgcaactgggaaacttttgtcctttgaggctaggcagctccctgccctccgtgtgtgtctgttatctgggggagaggagtgtggaagggttgggggaagagctccagcctgtctgctccccagctctgtagtggcagaccagcgtcacctttgaagtatacgtgagagaaatatatttacaaatgctttattctcttctttaataaaaaatgcaccagtattctaaaagcaa

SEQ ID NO: 6965 - DNA, 255 bp, Homo sapiens
aatcaccctctgcagctgggagggctcttctgggcgtccgggcagctgcagctgagaggactttcacaccataaggagatttctgtttttctttttggctgttaatgcttgtctataacattggagccatcacaagaatgttcatttggaatgaaggctgcaggcactggttgcagacgtctttataggcagtcaccatgttgtcaaaccttaataatgcacctcatgtattagtcacaataaaaatcagaactc

SEQ ID NO: 6966 - DNA, 2837 bp, Homo sapiens
actaagaccccgaaaactccagaccttcaggagagcagtcagcagagcccctctgtgaagtgaaacctcactcctgtccagtgaccgagccactgcaaagcacagctgatcctggccccctgtgaagaagtgttctggtcaaaactaaaggaactccctccccacctgcaggactccgaagacagtgcgacttctggctgcagaataccttttcagaaacctgctttcatttgcttagccagtattagaacagatctttacaacagcagctgggctgggttcccagtcggagcctttcggggatctgggggatgagggcggaaggcctagctccttggaaatggcctgtactttaaggacgctggagccaagaggattgttcccgtgccgtgccatggtttcaccctatgtgtgccacaatggacgttagcagctgcttcggaacaccgtccctcctatgcaccctccaagacgtgcagcagatgcaaagggttctagctgcagtttgtcgaattgaggttttaggtaaagcatagagttgccagagtaccccgcattcccatgaatagagcctccaaggaaagggaggatggggtgtcctttgttgtggttggaggttggtgatcattgctctggatttggggctcccggctgccaccacatgcagctttgcctcacctttctccagcagccgggaccctctggagagcttgttttccctccaagaagaggtttgagacaggcggcatcctgcactgagtcagacaagtgggagctgtaggaactgcacctgcagcctcttcttactccccattgaccctgtcttccttccctggctttttcaactggaccaaagatgaaggcacttatggaccctttgatggcttggagtggggaaggctgtttctttgaaagttgccaaatgtgttatgttgtgtctcagagagagttatttctgtgactctcttggaaatgccttgactgaatgtgcaatatttgtgtctcttggtttctaaccttggcggacctgctcccctctgtactgtccccagtggtatgtatgtatgtgctaggcagtctggggaccccctgtgtctctgaccacccccctgacccccgccattactttcttttctggagtgccatgctggcgaggatccggatgcggcagcaccctctttcgggctgcatccacagagtttgtgtccacactttctctccgagcatgtgggtctcgctgagcagtcatggaatgcggtagagccaggggaccctgtctgccccgaataactttcagtagtatggcagatggcacagagaaagggaaggggctctggggacttctccttctatgaaagcctcctcgagccaggtgctcctgggcaccttcagaagtgatgtcctgtgtgctccacagctcacctgcttgccaaggtacgtctgggtagtagtttctggaaatgactgcagactgtgccaaatgtcttttgagcttctgacctgaccatgcccagatggcataacttttccctaggaccctcagtctccttgtttctctgtatctgtagcatagcatagaacccggtatacaggggtttctgctgacacatcaacgtctacacacctatgcgccacattttacagctgtaaagtgttagatgaactgccgtcctcagtaaaagcagccaccccttcaagagtcacaggcatccatccagtcgtatctttcagagaaaaaaaaagttagatgtagccaaggaaagtagtgatcacgggaaggactgctctgagccgggtaggatggaggactttggaagaggcgctccttggccaggtccaatgagtaacatcagactgacagaggaaaagcagcttggtttgcggccttgtgcccagtctcgttgaggcgcttgtccctgtctgctttcctggggcatgcctgatcagcgtgggctggagctcctagaccaaccccagctttctcaccaggttcagcaaggaggcctgggggtcagacaccaatgttgagcacctcctgagggcgccgtttccttcattcctcttagattccatagttgccgccatgaaaagactgctcttgagccccaaggcacaggcacgtgctctgggaaatagacaggagtggtatttccgccctctcggagggctggtgttcaccaagtttccctcctcgctgcaacccaatgacacctgtattgttccagcgctccaggactctgggttcttaagatttctgggagcgttgttcacccaccccctttaggaaccaggctggtgttcttgcttgaaagcgttgtgccctctgagtgtctggctgatcacatcagagaggtctgcgtggcagtttggggctgtcacgtgaccagtgacccacactctctgctgcccagtactgccaagtggggagggtcctgcctttttctctgccccaggtctgggacgcaggtgatgccagccaggcccaggagtgcccagcatcccccaactgatgacacagtagcactgattctgtcttttcctcagaatctggcctttttccatggcaatgaggtggggcccagcctcctctaaagtgactttgtttctgcacagttgtaactgctcttggggatgtcagtgaggctgggagcagggagccacgggatgctgagagaggaggcccgagaggacaccccaccctccagcgtggcctttgatccagacttagggacgaggctgtcactggtgggcaccctctgttcctgtttgtgtgtttgaatagtctgaaatgctgtgactttttttgtgtgaataaagatatgaaacttctgaatctc

SEQ ID NO: 6967 - DNA, 118 bp, Homo sapiens
gtgccctgtttgactccgccactatctgccatgtgagttgggcaaattgttgaccacctctgagccttgaaaaagtaggaggttactttgttagagcaaaataataaaatttaatttt

SEQ ID NO: 6968 - DNA, 1227 bp, Homo sapiens
tccatggagactgcgagaccgtggcacccctactgctggagaccacagtcctgatgtggacgcagggaacggggagcacatactgccccattggtgccttttcagccatctgaaaggcgggttctttcagcaggacaggcatttacactgatgaaacgccactgggagtgaggaagccagactccagagacacggagaagatcaaactggagctgcgttcataggctggcactctcaatcctacatcaggtgccaccaccaccagactcaggccctggtgtaagaagcggccaagtgcctggacccagaggctttgcaggacagtgttctcaggagctgggcctgaggcttaggagagctgccttcgctgcaggaaatcagggattatcccttaacagaagtgtctggagtagttttcaggtataggaatgagatgcctcgtggtgaaaggatctcaccctgggaagatgtggtgccccctccagggctctggaggatggatgcctcccccaggggctctccaagctgggcatttgggcctggtggatgccaacctggataacctgtggcccagcattgactgtccacccagccttgctgttaggcaccatgactccaagatgaagatgtggtccctgcccttgagtgacagcccagggacttaatgtggccatcgggcatcaagcacaaggccatgcaggtgatgatacgtcggaatagaggcaccagccctggtaactgcatcttctccccttgccaccccatggccccggctgaaagcttcggccctcctctgctgtcactcaatgatggggagccctaccccagaagtgtatcccacgagggcatcagggacgcagtgagtgttgctcaagggagtcaggaagagacggcaacgtaaaggatgtggctccatgtccatggtgccccctggtcaacataaggagcgtgggatccgatggaaaggtggagctcagggaaaatgggggtccttgcctctcgtgtaccccctcaaggctgaccccttagatggcccaggaatggcaggtgctacaaaaatggtacccacgtgggcatggaaatggggcagattaggggaccactggactcagaggggagggaagggctcatcagcacccgctcagggagcctgtccctttatgttcccaaataaagggtcctagaagactagaaagccaaggtcttttattaaaggtcccgactggt

SEQ ID NO: 6969 - DNA, 80 bp, Homo sapiens
gaactgcttcaatgtggtatctttgtatggcaatgtatatagatttttttaaaagaataaatgttgttttgcaaatgtag

SEQ ID NO: 6970 - DNA, 450 bp, Homo sapiens
agtctccaggaggagcccagggccctctgccgcaagaaacagtgtgagctactgccacgctgaaaactacctgtgggttaaggatgtagttcctttgtaagggtgggcaggcctcgtaagaaagatgtagcagcatattcactatccgttaatccttctttctttgaggctggaacttgctctctctgcccctatttccttgtaaagagggagcacattgacttgggaatttcctccaggaaactcagggctgttttctcttcccttaggttggggcggacctttggatatataaaggaagcagttttagtatcagaaaagatttattagaaaattctcacgctgaactggtgtagcatgtggtgcagcattcagtgaaactggctggaggaaataggcttgtttccagagttgtccttatacaaaatgtataaaaagcagtttctggtg

SEQ ID NO: 6971 - DNA, 751 bp, Homo sapiens
gccactggctgtggtggctgtagttgcccccgtccctggggctaaagccagacccatttctgaacaggggagtttgtatcatgaatgtttccaggtttgctcctgcacccgtggcactggaaacccagctccccgtgtcagaccccgctgtcttcctgagccctggggctcactgtggaggagctgacggcctgggcccttggccagtcctggctcttccctgggcctcaccagggacactcttgaatgtatggcctcaggcgctccctagaggggccctaaaccccctcacctgtgagctaccccctttagggatcccttgcccccttggagatcccttgccccccagtgcctctgctcgtgggtccctggacacggccttgaagccaaccttctttggaggagcaacagcagcagccttggccgacgcgtccaactcccaaggctgccgtggagggcaggggggtggtgcttgcctggatgtggccccgagtgcctcccctccctccctctgtgggggagtctcccgcctgaacctgaagatggagcagggcccccgcttcgccctggagcctcttcctgtgcctggctcaagctggctgcctgtcagtcttggggaatctggcccaggtctcctcagcctctgccccagttctgggagaagtttctactggtgtatattttttactggaaatgagccttttaggaatgaatgtagactggtttgtattaaaatgtgtcaattgctaag

SEQ ID NO: 6972 - DNA, 327 bp, Homo sapiens
cctcacagctctgcagaggatggagcttgctccgggggaccgggactgtctgttctcagggaccatctcggctgcctcctgtacccagactctaacctgtagcttcagaggccagtctgggccttggccctgggtgtctgatactcacagagtgaaactgtgaccctctcccttccctgctgccttgcagtgacccctctggaactcaggactcgattttaaggacccaggaggtggggcagaagagaggactgtgtgcctttaacgagagggtgcctgcttcgtgctataaagccaaagccattaaaaatagatttcttttctgct

SEQ ID NO: 6973 - DNA, 330 bp, Homo sapiens
gtggctgagcgtccaggctgcgcgatgagcacacactactactgatggcctttcgggggtccctgccccaaccggagaggccggtgcacagggccccgccaggggctgggggcatcccggcttccacaatgcagctgctctgggcctcgggagaggagagaccccagtcccctgggctgcccttcccgggcctcgtctgtctgggtcctttggtcaatgttgcacagtttttattgctcccatccctttttgtagtgggctgggttttaagttataaatgttaactgcctctgggtgaaaaagtttttaataaacacctattacctcttg

SEQ ID NO: 6974 - DNA, 181 bp, Homo sapiens
gtgtgggaggcatggggcaggaccatcagtaaagacagggccaggtgcagtggctcctgcctgtaaccccagtgctgtgggaggccaaggtggtaggatcgcttgaacccaggagttcaagtccagcctggacaacgtagggagacccttgtctctacaaaaaataaaaaaattagccagg

SEQ ID NO: 6975 - DNA, 1538 bp, Homo sapiens
cctgaggggccaccctaggacttgaaaggaccgtgcagcccagtgaccactgcccagtgggaggcgccactttgtatatttcaggactgggacctactccccagatgccacctgagaggagcttctgtttggcattccagatggaaggacaggcagcacgggagccaggcgctgtggacagggtctgtccacgcaccacctggggtctgccgcctattaaaagtgccgtattcttacctcttggcatctcagatgcactggcctctcctgcattctgtttgcaggcaaatgcttcagctcacatgtcccccaagactcaatagtcttggttgggactattgcctcagggttgacaacagggtgatggaggcctgggacgctgttcagaggggtgacccaagaagtcaccgttgttatccgtgtatgcctctgggcatggacaggcgggagtccccgagccccacgtatgccccatctgccgccttgatcccaaaacccagccagttctcgggtgatggtggagctgtgctcccttgagtgcacttgagcactccccagaccagatcactttttggacacacccaggaaggcttttgaagtcaagccagtttccagaagggctggggtgagatcctgacctgtgcagagagtggggaggcgtcagcgcctggccagggctgccccagtcctttggtgcccggtgagcgcagccagcaggagctgagcagcgggggagatgaatcacctcctgccttggcgaggcggcagctcattgtttacaggcaagccctgctcctgggagggctcctgccaccccacccttcctctgtgtgttatctctgccccacagcagcccctgggcagcaccagtggccactgggctccccccggggttgaaacgggtttcccagaccaggggttcagaggagactatttacccttcatgatctttggcgattctccactggagcggaagggctgtgtgtcaaaagaaggaagccaggctgtgaagggccgtgttgctttcagtgggtgggcagaggtttagaaaggtggttctgaaatggcacctggtactcttgtgggacctggggaatataaggaactctgtgcatgaggtttcaaaaataaaaattgagtccactctccccgtacacacacactcgggcacttcaggaggtcagttctcaccccttcctcgatggggctttaaagctctggggagaagagctgctccccactcatgccccagagggactgtgaaaaggcttcctgtgacctccgatggcggcccctcattggccaagggcactgtggatgttttgtgggaggcagcatggcaccgtggaaagggcagtagacgtggagccggcacctctggtctggattccacttaaaaccagttgagtggtctcaagcccttaacctctgtaagcctgtttcttctctgaaatcacagtaataaagcgtcgtaagatggttgggaagaaccagaggtgacttatgcaaaagctttataaactgtaaagttcctgcca

SEQ ID NO: 6976 - DNA, 262 bp, Homo sapiens
ccgcaccctgccccacccccgccacgtcccactaggcgtcctcccgactcctctcccggagcctcctcagctactccatccttgcacccctgggggcccagcccacccgcatgcacagagcaggggctaggtgtctcctgggaggcatgaagggggcaaggtccgtcctctgtgggcccaaacctatttgtaaccaaagagctgggagcagcacaaggacccagcctttgttctgcacttaataaatggttttgctactgct

SEQ ID NO: 6977 - DNA, 152 bp, Homo sapiens
gaatgtcaaggccacactcagatcctttctcgagcagctgctgccccagctgcctcctacccattgccaagagaggatgcatctggggagagcaaagcactaaggaattcagcatcagcctgcagagggctgagtctgggttagtcctgccc

SEQ ID NO: 6978 - DNA, 61 bp, Homo sapiens
aagcacttagcgggcgcgctgggatgtcacagagttggagtcattgttgggggaccgtggg

SEQ ID NO: 6979 - DNA, 13 bp, Homo sapiens
aggggcagggcct

SEQ ID NO: 6980 - DNA, 787 bp, Homo sapiens
gactggacgccgccgggcgctgggctggagctgggggcagcccagggttgtggggacacaggagggccagggaggggggagccggggagggcagggggtttcccgaagatcgcactggaagattttataaaagaatttttgtgggtcggggggacagtaaacttcctgggccacgtgggtccttcaggagtttttcaggcaagtttttcctctgtttttaatatataactataatatatatgaatagataaatataactaatgtgcgtgagaatgggcctggcacacctggggtgctcgggggtagggctgccatgctgcagagctgatggagtgatgttgtgggcacaaggcatctgtcagctgcctcctttaacagccatgccttctggaatctggaagaggacaccactcctgcagtcactgggcagccacatagcagctgcaggtcccaggagggcctgaggtcaaagctgtggaaggccctcttggtatcagggctctctccccatggcctcttccccacctctgattgctggttgtggccccatagctcatcacccctgtctcctgctgaatgtgcagggctgatgtggcactgaggagctgactttggtcaaaggccaggctctgcccagcaggggacttgactgccctgggcgccctgcccctcccgctgcgtgtccaggtccaaagtggagagcctgcctttgggtttagttcccgaatcagaatcccatctcaccagggcgaaattttaatttaaaaacttaaaaagagacttttct

SEQ ID NO: 6981 - DNA, 274 bp, Homo sapiens
cccctgggccgcgctgtgccttagtgtctacttgcaggacccttcctccttccctagggctgcagggcctgtccacagctcctgtgggggtggaggagactcctctggagaagggtgagaaggtggaggctatgctttggggggacaggccagaatgaagtcctgggtcaggagcccagctggctgggcccagctgcctatgtaaggccttctagtttgttctgagacccccaccccacgaaccaaatccaaataaagtgacattcccagcctg

SEQ ID NO: 6982 - DNA, 146 bp, Homo sapiens
actgggctgcccacctggctgccaacatgatccccgtctctgccctgggctcctcttagctcagctgagcatggagacagcagtttccagagagtggagagagcagggctaaataaagaggagataaggtggcttctcacggcctg

SEQ ID NO: 6983 - DNA, 902 bp, Homo sapiens
tctggtgtccgtgaggggacacgtatgacctcagaaacacagctggacacagagcttggtggaagaagtcgcctttgatcttcactatatattgggtgatgttcagtatggaaaatcaagggattaagactgttaaatcagccagagttggtgttcaagtttacagatatgagttatttaaagcaagtagaataagggaaagctgttctgtcaactgtaattgttcaaagatgttgtttttcatttcatctatctcaattcttataatcatgttatagaatgtaaatgttttcttctctctcctgctcttgttggaagatcctgccttgatttagaatactaggccatatgtcatataaatattttttctggatatggagtatgttttgccatgtaataatgggaagcatatgtcattccccatatgtgttggagaatgacatttaaataaatagcaaagctgggtgtggtgttgcaccgctatactcccagctgttggggaggctgagacagaaggatcacttcagcccaggagattgaggctgcggtgagctatgatcacaccactgcactccaggctgggcaacagagtgagaccctgtcttgaaaataataataggctggtcacagtggctcatgcctgtaatcccaacactttgggaggctgaggtgggtggatcacctgaggtcaggagtttgagaccagcctggccaacatggtgaaacctcatctctactaaaaatacaaaaatgtgttgggtttggtggtgcatgcctgtaatcctagctactagggaggctgaggtaagagaattcgcttgaacctgggaggcggaggttgcagtgagccgagatcgtgccattgcactccagcctggatgacaagagtgaaactccatctc

SEQ ID NO: 6984 - DNA, 1550 bp, Homo sapiens
atccgcctctgccgccctgcctggcacccacgctggctctctcctgccgcgggagaaagcaccagcaggttctgagccctggctgcttgtcctcctcgcaacccccccaggccggagcttccttccttagccgggaagctggcagaggagagccgtgcccgggaataggaggaggcagcatgccgagcccctgggacctcccaggcaggctccggttctctcctggggactcacagaagcatcgtggccaagcaggtgtcggactgctcagagtccgcatggcccaggagcaggtggtcggaggcccctggctttgtgcaaggccggatctgggccaggtggcgaaaggggcccagtcgttcttgggcccaggatggggcctctagacttgcaagggagaggaacagggaccaggctgccccacggtccctgaagggtccaaggaggggccctccccatggccctggagagtgggcctgggtggtacctgctccaggcagggaaactgggggctcgcccttctcctgtgaggggagccaggcacacagggcccattggtgtttgggatgtggacagaggggcagggggctgggagaaggctaagccgaggggtcctgtttgtgcctccccttagtcccttccctcccgatttcccgattcccccaccctccctctacacttgaggaccacagttgggggtgtagggaccacccagaccctggttgaattgtttctctctcctgcttgttccaacccttttcactctgggcttctcccaaaacccatcctggcatgacctgcaactccaggtggtggatttgttccaaagcctcaatccctaccccctccaaggggcaggtttccagtccagcctcagagatcaggctctgggacccctgcctggggggtggccttcatgcactagccacttccgcaggtgctgactcccgcactccctggcattttttgcagacaagggcttgggatggaccctcagccccatggtacgccctgcccagtttccagttgccctgtccacttaccctaggtagccccccaccccatcagtgccgagtccttgtccctacctccagcttcctccagcctcaaaccgcctctggatctagctgtccttctccgagtggcacgcctgccccaggatgccccctttccctcccccccatgcccagagccccgcctgcctcagcgggtcaggccttcagaacactgccacccacccagttttataatcccgctccctctccaggcaaccccacccaccagcctaggcctgctcctccacccttcccgggaggcagccccgggatgctgagagttggtggaggggccaggctggacgcttcctgtgggagtcccctccagacctggctggcccctgcagccacagaaaccacgatggcaaaaaatctcattggttctcaaggactaacctgtgggggaaagcaatagagacactctttttctctcttttttttaaagatttatttcttgaaataataaatattttattgggatgtgaggtgcagaag

SEQ ID NO: 6985 - DNA, 308 bp, Homo sapiens
tgccgcgctgcctgcacctagtgtgcagaggggacggccgcccctcctcggacagccagctgcacccgcccacccagcggcgacattgtacagactcctctcacctctagatagcaaatagctctcagatggtaaacgtagtcgtttgatcccaaaactaccttggcaggtagttttaactctgatcctaacttaactcaatagccatagattttgtatacgttgtgcacaaaatccaaccagagcgcaagggctctcttgaaagaaaagtagtttctgtaccaattaaaggattgacgtggtctcag

SEQ ID NO: 6986 - DNA, 1936 bp, Homo sapiens
acgccaccctgcccacccccgggatcctgcccccaagtcatttccgtccccccccaggccctcccaccaccccattttattttatatgattttctccatttgtcatcgttccccaccccttcgacatgctgccaggaaacaagggaaggggcctccctccgagtgagtcagtgatgaggccgcggcctccccgaggttgtggggaggctgcactggagccacaggcaggggtgagagcacccactgaattgacatgaccctctgtccccaggcctggctccccgagggctcagaagagcagcttcggtgtgcagatcatccgtctgtgtggggttctcagtgccggaggccttggggtgggggccaggcctcgcacttgcagaggagcccagtgggctgcacgctcccctccatccccatcggccctgtcccctggagtgtgtcagagcccaggggagaatgcagcccaccaggagcacctggaccccctgcccgccacatggtgtggccatcactcagcccctacccctgccctgctcctaagggtagaaaactccagggtcccctgccaccgactgcccagccactccaagccccctggcagctgcccctcctggagcagaaagtgcctttatctcagccatccgcagactgcttggccagatgcggggacaggctggaatgagggaggcgtcttcatctccctgccatccccctctcacgccacccccgcccccaccgggctgcaggtgctgctgatgcgctgggatctgattgaggataaaaaggaaggagagatgacccctaccccctcatcccccagttttgaaaaggtctaagcaagtgagtctggtggaggagctgagggagggagccatggaaggtgccagaaggaaggttggcgggggcacgtgtgggccgtggcttgggctggtcagagtggcgtgagctgcccggcgcctgccctgcccaagtgaccagggaagtgtgtgtgtgtccatgtgtatgcgtgtccgtctgtctgtctagtgtctgggtttggcccaagactgggctgtagttacattaatgcccagccagccacccctgccactcacccttcctggcccaggccttgctgactctctgagctggggaggtgggaggccaggcgagcctgactctgttgatctacccgtgcctgggcccctcccctcagagcccatggtaacgaacccctagaaaggagagaacgggcgtcaggggtgcacagtccacagctgaagagcaaggtttcgtggcagcacggcccggcccctcaccctctgtccccacgaggggacccatgggggctgtctttgcagggcacagatgaccaaagtcccttcctgcttcctgttacctgtcttgctcctggggagaaagaggggcctgatgagactccactcaggtgcacacatcaccaggtgcatctgcaggcaccgggctggctgcttgcagccaggagaaggtcagcgagaaggagtgtatgagtgtgagtgtgtgtgcatggaagttggggcactgggcgtctgactccctccccacccaagagaggaaggacccctcaccacccccactggtgagacagtttactttgccaacttgccatgtttttgccaaaaccaagattttgaaggaaatgagtggccagcgccagggcccaggccatgtggcctgcccagcctcaatgtcacttggtggcggggtggggtgggggtgggcagcagcatcccagccttgagatgcttcactttccttctctgtaaccagactttgaaaaattgttcgtttcatcaggctctgttcctcaatggccttttgctacgtgcctcccgagaaatttgtctttttgtataaatgacaaagtgttgaaaatgtatttcctgaaataaatgtttcaaatgcagaaacccag

SEQ ID NO: 6987 - DNA, 95 bp, Homo sapiens
gctctgccatcatcagcaccaggagagccgacccctcccgggacccctcccggctgggcggccccacagacccgctggaacccagcagcggccgc

SEQ ID NO: 6988 - DNA, 245 bp, Homo sapiens
cccctacccctgcctccccgaagcctccctggggccccttcaggcctccttactccatcttccagacccctggcgaccaccgcccctctcagtggctccagggcctccctcagaggtccccaaagatggacacacaaccccagcggcagcaggaaaaacatatgggaattttctttctatattttaatctcatccctttaaaatgtctattttttattgtgttttttataatatacataatctat

SEQ ID NO: 6989 - DNA, 992 bp, Homo sapiens
gcggcggttagcgtgggaagggggacagagagggccctcccctctgccctggactttcccatgagcctcctggaactgccagcccctctctttcacctgttccatcctgtgcagctgacacacagctaaggagcctcatagcctggcgggggctggcagagccacaccccaagtgcctgtgcccagagggcttcagtcagccgctcactcctccagggcacttttaggaaagggtttttagctagtgtttttcctcgcttttaatgacctcagccccgcctgcagtggctagaagccagcaggtgcccatgtgctactgacaagtgcctcagcttccccccggcccgggtcaggccgtgggagccgctattatctgcgttctctgccaaagactcgtgggggccatcacacctgccctgtgcagcggagccggaccaggctcttgtgtcctcactcaggtttgcttcccctgtgcccactgctgtatgatctgggggccaccaccctgtgccggtggcctctgggctgcctcccgtggtgtgagggcggggctggtgctcatggcacttcctccttgctcccacccctggcagcagggaagggctttgcctgacaacacccagctttatgtaaatattctgcagttgttacttaggaagcctggggagggcaggggtgccccatggctcccagactctgtctgtgccgagtgtattataaaatcgtgggggagatgcccggcctgggatgctgtttggagacggaataaatgttttctcattcagtctccagtcattggttgagccacagcctaggggttggaggaagactccactctgggtacacccttaggggctggctttatggaacttgtagtttgaacaaggcagtggcaatccgccccctccagcctgcctggctggcccccttccctctgtctggggtcgcattccgcacaagcctttcatcaacatcttaaaatagtaactgtg

SEQ ID NO: 6990 - DNA, 764 bp, Homo sapiens
ttctgacgatacttggagcctggtccacgtgcatcccaccttgggaagcctctccaaagagctttcggagctgacactgacagcttcagtttcccccagcacccaggagagccttgctgtgtctgtctgcccggcaagagtccattctcactgctgggacactcatgaaaatctccacgtcctccctcttcccagcctggatggagctccagggctggggaacgtccgcaagtcaatgctcagagatgcccggagctgcctcttagactcgtctggcccatctacctgctgacagagcatgacaaagatgacgctcaaaagtaatgccattacttcttttttttttttttttttttttttttttgagatggagtcttactctgtcacccaggctggagtgcagtggcgtgatcttggctcactgcaacctccacctcccgggttcaagcaattctcctgcctcagcctcctgagcagctgggactacaggcgcctgccatcatgcctggctaatttttgtatttttagtagagacggggtttcaacatattggccaggctggtctcaaactcctaaccttgtgattcgcccgccttggcctcccaaagtgctgggattccaggcgtgagccactgcgcccggccagaatggcattatatttaaatagttcataaagaagcacaaaagaatattatttcataacatgtaaaaattatataaaacgtaaatttccatgttgataaataaagttgtattggaacacg

SEQ ID NO: 6991 - DNA, 2080 bp, Homo sapiens
ggcctctggccggagctgcctggtcccagagtggctgcaccacttccagggtttattccctggtgccaccagccttcctgtgggccccttagcaatgtcttaggaaaggagatcaacattttcaaattagatgtttcaactgtgctcttgttttgtcttgaaagtggcaccagaggtgcttctgcctgtgcagcgggtgctgctggtaacagtggctgcttctctctctctctctcttttttgggggctcatttttgctgttttgattcccgggcttaccaggtgagaagtgagggaggaagaaggcagtgtcccttttgctagagctgacagctttgttcgcgtgggcagagccttccacagtgaatgtgtctggacctcatgttgttgaggctgtcacagtcctgagtgtggacttggcaggtgcctgttgaatctgagctgcaggttccttatctgtcacacctgtgcctcctcagaggacagtttttttgttgttgtgtttttttgtttttttttttttggtagatgcatgacttgtgtgtgatgagagaatggagacagagtccctggctcctctactgtttaacaacatggctttcttattttgtttgaattgttaattcacagaatagcacaaactacaattaaaactaagcacaaagccattctaagtcattggggaaacggggtgaacttcaggtggatgaggagacagaatagagtgataggaagcgtctggcagatactccttttgccactgctgtgtgattagacaggcccagtgagccgcggggcacatgctggccgctcctccctcagaaaaaggcagtggcctaaatcctttttaaatgacttggctcgatgctgtgggggactggctgggctgctgcaggccgtgtgtctgtcagcccaaccttcacatctgtcacgttctccacacgggggagagacgcagtccgcccaggtccccgctttctttggaggcagcagctcccgcagggctgaagtctggcgtaagatgatggatttgattcgccctcctccctgtcatagagctgcagggtggattgttacagcttcgctggaaacctctggaggtcatctcggctgttcctgagaaataaaaagcctgtcatttcaaacactgctgtggaccctactgggtttttaaaatattgtcagtttttcatcgtcgtccctagcctgccaacagccatctgcccagacagccgcagtgaggatgagcgtcctggcagagacgcagttgtctctgggcgcttgccagagccacgaaccccagacctgtttgtatcatccgggctccttccgggcagaaacaactgaaaatgcacttcagacccacttatttctgccacatctgagtcggcctgagatagacttttccctctaaactgggagaatatcacagtggtttttgttagcagaaaatgcactccagcctctgtactcatctaagctgcttatttttgatatttgtgtcagtctgtaaatggatacttcactttaataactgttgcttagtaattggctttgtagagaagctggaaaaaaatggttttgtcttcaactcctttgcatgccaggcggtgatgtggatctcggcttctgtgagcctgtgctgtgggcagggctgagctggagccgcccctctcagcccgcctgccacggcctttccttaaaggccatccttaaaaccagaccctcatggctaccagcacctgaaagcttcctcgacatctgttaataaagccgtaggcccttgtctaagtgcaaccgcctagactttctttcagatacatgtccacatgtccatttttcaggttctctaagttggagtggagtctgggaagggttgtgaatgaggcttctgggctatgggtgaggttccaatggcaggttagagcccctcgggccaactgccatcctggaaagtagagacagcagtgcccgctgcccagaagagaccagcaagccaaactggagcccccattgcaggctgtcgccatgtggaaagagtaactcacaattgccaataaagtctcatgtggttttatct

SEQ ID NO: 6992 - DNA, 1700 bp, Homo sapiens
ctggccggccacctcctttcctctcgccaccttccacccctgcgctgtgctgaccccaccgcctcttccccgatccctggactccgactccctggctttggcattcagtgagacgccctgcacacacagaaagccaaagcgatcggtgctcccagatcccgcagcctctggagagagctgacggcagatgaaatcaccagggcggggcacccgcgagaaccctctgggaccttccgcggccctctctgcacacatcctcaagtgaccccgcacggcgagacgcgggtggcggcagggcgtcccagggtgcggcaccgcggctccagtccttggaaataattaggcaaattctaaaggtctcaaaaggagcaaagtaaaccgtggaggacaaagaaaagggttgttatttttgtctttccagccagcctgctggctcccaagagagaggccttttcagttgagactctgcttaagagaagatccaaagttaaagctctggggtcaggggaggggccgggggcaggaaactacctctggcttaattcttttaagccacgtaggaactttcttgagggataggtggaccctgacatccctgtggccttgcccaagggctctgctggtctttctgagtcacagctgcgaggtgatgggggctggggccccaggcgtcagcctcccagagggacagctgagccccctgccttggctccaggttggtagaagcagccgaagggctcctgacagtggccagggacccctgggtcccccaggcctgcagatgtttctatgaggggcagagctcctggtacatccatgtgtggctctgctccacccctgtgccaccccagagccctggggggtggtctccatgcctgccaccctggcatcggctttctgtgccgcctcccacacaaatcagccccagaaggccccggggccttggcttctgttttttataaaacacctcaagcagcactgcagtctcccatctcctcgtgggctaagcatcaccgcttccacgtgtgttgtgttggttggcagcaaggctgatccagaccccttctgcccccactgccctcatccaggcctctgaccagtagcctgagaggggctttttctaggcttcagagcaggggagagctggaaggggctagaaagctcccgcttgtctgtttctcaggctcctgtgagcctcagtcctgagaccagagtcaagaggaagtacacgtcccaatcacccgtgtcaggattcactctcaggagctgggtggcaggagaggcaatagcccctgtggcaattgcaggaccagctggagcagggttgcggtgtctccacggtgctctcgccctgcccatggccaccccagactctgatctccaggaaccccatagcccctctccacctcaccccatgttgatgcccagggtcactcttgctacccgctgggcccccaaacccccgctgcctctcttccttccccccatcccccacctggttttgactaatcctgcttccctctctgggcctggctgccgggatctggggtccctaagtccctctctttaaagaacttctgcgggtcagactctgaagccgagttgctgtgggcgtgcccggaagcagagcgccacactcgctgcttaagctcccccagctctttccagaaaacattaaactcagaattgtgttttcagca

SEQ ID NO: 6993 - DNA, 428 bp, Homo sapiens
gaagccgccgggagctgcccgcaggccctgggccggctgtctcgctgcgatgctctgctggtcgcggacggaccctgcctccccagcttatcccaggccagaggctgcatgccactgtccccggcagcgccaacccctgcttggctgttatggtgctggtaataagcctcgcagcccaggtccagagcccccggcgagccggtcccataaccggccccctgcccctgcccctgctcctgctcctccccttcgggccccctcctcctgcaaaacccgctcccgaagcggcgctgccgtctgcagccacgcgggggcgcgcgggagctctgcgggcgctggaacctgcagacccggcctcggtcagctgggaggggcccgccccggcacaaagcacccatgggaataaaggccaagccgcgacagtcagc

SEQ ID NO: 6994 - DNA, 2537 bp, Homo sapiens
agccccggcgccaccagctgcgcggtcttactccccttccctgcctatggtgtcgcttggctaagtgactcccagcccaagccccctcaagagtctgggtcgggggaggaggagtgggtggcctccttgatgggcaggcttggaagggacttctcccgcaccccactctgtcccaggacatagggcagggggcctcactgccttgttggtctccaccttgttcctacctctgcaggcctctttgctctcccctcttgcctcaggaaacccggtggcacctgtggctccaggtgactgtcttgaacagagcgggcttcttcatggctgcgttgttgctgagtttgaactgctcctccctggcctgcgtgactgaatcacagctttggtccctgtcttgcaggggctgaggtgtcaggaggggacttctggcccaccttgccttcagccctggagtgggcagagagtattgtggggaggcatggccagtgggactagtgttccctccatctggccacagcttttgggagatggggtgggcaggggtggtcctggctggcattgcctgagccggcagtgatgaagtggggagcttgcccttgacaggtgggggctggctggggccttaatgtgaaaagacagtggcaggcagctggagtagagcgagcccagcagccctaaaaggctgccttcatggccatctagccccagttcagggcagcatccatagcccacaagccagcgtgggtggggcgggggtggtcccacagctgggttccacctgaagagcctccgtgcctcggagcaggagaggcaggctatggctgccaccctccctcctgcctgtgtcccagtgagaactgacctgagtccccttccaaacccagacccacctcctgccccaggcccactgaagcatgttccatttctaaaaagcccagagttcagtgtgtcccaaggaaaacccaaagtggaggtgctcaggtccaggggagtccagtgggcaggacccttggcaggcaagcccctcccttcactcccaggacctaccttctgctagtaaaggactggcttcattctaattatggcccacagactgccccggagacctggaggacagcagtgctggcacttgggtgtccatgggcccgtctgccggctctgcctgtgctgcaagtgttggccgtgggtccagccaacaactccctacgtcctgtgtggggccctgcccaagtggatgaggcattccttgaggagtatcattttccctgacaatccccatcacctttaggggttccctgcttggctcctttccagctgaaaaactagacctgtgccattggggaagctggacaaagtctagggggcccgcctggtagagggtcccgggaagctggatctgtcagcctcggccctgaggcccctgttaactcaagactgtgagctgcctctaggtggtcacgtctgggagctagcttgtatggcttctgaccagtatcaggatttctgttctgagagcagcgtgggcagcaaggcagggcagcccagaggtggcagcggcaggcaatctggtcactaggtctttgtgatgccaaaaataaaagagggtggggtgggtgctttctgttcctctgattggatggagtccgccagcaggcatggggctacattccagtgcctgactatagggaggcactcctgattccatggagcagcccggactttgagaatgggctctggtttgcggggggcaggcgtaccagactgcaagaccccccagtacctcaccgtgccaaataggaagaggtggccttggtgtagccaaatggatctttttaacagtgtgcctttggggagggacccatgtccatggcttcgttgagggccatccatatgccagctgggggccagcccacagtggccatattggctgcagcaggaatggtgcccacctcggcgaattgaagggctaagagtcccagatagctaggccagagctggaagcagacagtaaggggaagagctgctcccacaggagagggagagattccagctcactgcgcagcctgggaggaggcgtggatcctggcacgctgagcctcaggcaccagcctccctgtgctcgacagcaaagtcttgactccttcctgctgagcactgtgctaccttcactgctccaaagccagactaacagctctccaagcccttggggtgactcggcttccaggagctgttggagaaatgaggatgtctgtccctgtctgcctgggcaggccagattcctccccagcagccgggtctctccagaccctgattcggtgcctttctgtttaccagctacttcaatcccaaagtttgaatctgcagataccttactcccagccactttgccttcttactgtgttgtgtgtttttcctggtgcttcaagagcgtgtgcagggcaagtgccgtcactgggaactgcaccagatgctcagacttggttgtcttatgtttaccaataaataaaagtagactttttctatttttatttgctgct

SEQ ID NO: 6995 - DNA, 383 bp, Homo sapiens
gtgctcataggattgccggctggatgtgactcaaaagcctaagatttgggggctactccgggcccacctgcgggtgcaccttaaatcgaggtggccacgaaaggcagggctgactgaatagccagggggtgccaggaggggccttggaggagggcagaggcagtgtgggctgatgatgtgctttggccttctcgggactgtcctgtcacccctcctcgctacagtgatgggctcaccccgccacaggtatgcatgcgcccctggggtccgtggtagggcccctccctcccctgaggacaggtgaggcaggacaggatgggggaggagggcctggcctcagtcccgggtgtggctttgattccctcctccgggcactgtccctg

SEQ ID NO: 6996 - DNA, 548 bp, Homo sapiens
ccgggcggagtgtgttagtctctccagagggaggctggttccccagggaagcagagcctgtgtgcgggcagcagctgtgtgcgggcctgggggttgcatgtgtcacctggagctgggcactaaccattccaagccgccgcatcgcttgtttccacctcctgggccggggctctggcccccaacgtgtctaggagagctttctccctagatcgcactgtgggccggggccctggagggctgctctgtgttaataagattgtaaggtttgccctcctcacctgttgccggcatgcgggtagtattagccacccccctccatctgttcccagcaccggagaagggggtgctcaggtggaggtgtggggtatgcacctgagctcctgcttcgcgcctgctgctctgccccaacgcgaccgctgcccggctgcccagagggctggatgcctgccggtccccgagcaagcctgggaactcaggaaaattcacaggacttgggagattctaaatcttaagtgcaattatttttaataaaaggggcatttggaatc

SEQ ID NO: 6997 - DNA, 707 bp, Homo sapiens
tgcaccgtgccccttcccgggactgtgggggcttctgtgtgcctgttaatgcagtcctgttcctcagcccaggccctcttggcacagctgtgggctccttggcacatgaggccggctctccccactggctggggtctaaccttgaaccctcaccacgtgcaggtcacacacagtgaagccacttgtaactgcacacttttctgtggaaacatcttcaccctttaccaggcttggcatggtctgaactggaaaccctgagaatgtttctgcagtgggacaggagggacgtcttcccatgccttccctagaaccggaggccccggacttctctggaaaaccgcctgtctgcaggcccgattcaaatctatgggggctgcacttcccttttacattttgatgtgtcaaaggcttttggagtgaccaaaagcacagaggcagcgggtggggcgcctgggtggtccccaaggtcgctgccacccttgcccggggcagaggcagaagcccacatatgctgtgacgctggccaccttttctcagcttctgaggctgcgatgcctcaggaactccagtttacagagaccagtgtgtttacttgtaaataaagcctctgcgtggtggagacggtactttcagtgggtctgtgccccgtggcccctgtgcctgttcggtgggggtgtcccagagaagcctggcaccagtacccccgt

SEQ ID NO: 6998 - DNA, 167 bp, Homo sapiens
atgagagtcgtgccgtgcagaacccagcatgtcacccgtggtgctgctgccatgcggcgcttctgaccaggggtctttgcatgaggccccttgacagggctgctctgggtggtcactttgggtgtgtacagtaaaatacacgtgacataaaattcactattttaacc

SEQ ID NO: 6999 - DNA, 782 bp, Homo sapiens
tggggccacccgtgggcatccacagtttgcagggtgttccggaaggttcttgtcactgtgattggatgctggatgccgcctgatagacatgctggcctggctgagaaacccctgagcaggtaacccagggaagagaaggaagccaggcctggaggtccacggcagtgggagtggggctcactggcttcctgtgggatgactggaaaatgacctcgctgctgttccctggcatgaccctctttggaagagtggtttggagagagccttctagaatgacagactgtgcgaggaagcaggggcaggggtttccagcccgggctgtgcgaggcatcctggggctggcagcaccttcccggctcaccagtgccacctgcgggggagggacggggcaggcaggagtctgggaggcgggtccgctcctcttgtctgcggcatctgtgctctccgagagaaaaccaaggtgtgtcaaatgacgtcaagtctctatttaaaaataattttgtgttttctaaatggaaaaagtgatagctttggtgattttgtaaaagtcataaatgcttattgtaaaaaatacaggaaaccacccctcaccctgtccacttgggtgatcattccagacccctccccaaacatgcatatgtacctgtccgtcagtgtgtggatgtatgtttacagttctacataaatgggatcattttatacatggtgctctggaacccacatttttcatgcagtcatttgcagtgaattatttattgtgataataaatagcattagaatac

SEQ ID NO: 7000 - DNA, 1980 bp, Homo sapiens
ttctctccggattcctcagtgtgctgcacagtccctgctgctcgcaccatcctgcatgtgttccatatggaatcacggccgtgcgcgtgtggcacaagtcacacgggcttgcaggccgttcctcagatggccctgtcatcactgtggctgctggtttgattgattgttaacacttgctcagtaggtgtgcgggaagagactccaaaggttgacagaacatttatggaagcaaaatatgtgaaatggaaaattgtatcaatttatttagctcttttcggcaaaggggaagagattgtgcccccctgtctcccaggaacagtctcgcaggcaatgccacatgaggaagctccctgctggccacggctgccctgctcacatttcctaattggacacttaacccctgtacaagcacagccttgcggccacaggggaagtccagaaacattgaggtcattgaattccggggaccaaggggttctaattttttaagtgactgatacctttgataaggttttcctttccctttttcgttaactctttgttgagatattgttcgtatgccatacggtacatctgtcaaaagttccagttcagcaggttttggggtagtcacagatatgtacagtcatcaccacagttaatgacagagcattttcatcacttcaaagagaaacccggcccctttagccatcatcctcctcccctctagtcacccactcccctctgcaggcataaacaattgctgaacataaacaactgcttctgtggctttctctgttctgactgtcatatgaatggaatcatatcatatgtggccttttgggtatggcttatttcactgagcataatgtttttttgttgttggtggtggtggttgtttgttgtttttgagacagagtttcactctttttgcccaggctggagtgcaatggtgcgatcctggctcaccgcaaccgctgcctcccgggttcaagtgattctcctgcctcagcctcccaagtgctggaattacagctactttttgtttaaagagtcttttaattgtttaaagaacaatgtgccgccacactcggttccttttgtatttttagaagagacagggtttctccatgttggtcaggctggtctcgaactcccgacctcaggtgatccacccaccttggcctcccgaagtgccgagattacaggtgtgagccaccgcgcccggccgagcataatgttttgaaagaccgctcaggctggacacggttgctcacgcctgtaatcacggcactttgggagcccaggagttcaagacaagcctgggtaacagagtaagaccctgtctctataaaaactaaaaaataaacaaaaaaaattagccaggcatggccgggcacacctgtggtcccagctacttgggaggctgaggtgggaggctcccttgggcccagaaggtcaaggcagcagtgagccatgatcacaccactgcacttcaacctgggggacagagcaagaccctgtctcaaaaagcaataacaacaaaagtccatccatattgtagcttgtgtccgtttacgttaagtattccttacccaaaatgcttgagaccagaagtgttttggatttcagatgttttcaaattttggaatatttgcatttacataatgagatgtcttccagatgggacccagagtctaaccacaaaattcacttgtttcatatacatcttatacacatagcctgaaggtaattttatacaatatttttaacaattttgtgcatgagacaaagtttgtattaagtatttgtatgttgaatttttcacttgtggcatcattatactcaaaaagtttggattttgtagtattttggatttggggattaggaatgctcaacctatatttcatttttttccatggccaaatattccccgtttatccatgtgtccattgacggccatctatgttgcttcttcggctattataaatctgctgatac

SEQ ID NO: 7001 - DNA, 2780 bp, Homo sapiens
aattatttcctcagctatctttggatgactttggagagaagactcctctctcctcgtctgcggcgtggacttgatcatggactggtgcctttgcattcagaaggagagctgtcagcgtagcaccgaattcaagaccaaggcgtgctacctgagctgacagctttttgaaagccgagctgtttctgaaccatgtacatacatgttctgaaactttctcatcattttatgagtactgttcattgagagatgacaatgaagattagatgaaattggaaataaaccaacattgtttacattccaggagacttgtagctcagccacacacgcagtaatgacctgtgcccgttcgcctctggcactgcccacccctctttttttttttcttctaattctgtactcacaaaagagaatctcattttcttctttcttccattcccttaaattctgagtactgtacatatatttctgggttcccacgatgatgtgaaaaactaccagactgttttttgtcttctcacaaagacaagaaaaatcagggcattttgtgagtgccttaagatcaaactaacaagatctgaccctctcccctcacagtgagccactgccccacttcagagggtaagagccaaaagcctcattgtgaaaggcactggacttggaccagggacaccatcagggccttggttttctcacgcataaaatggagagtggattaatcgccaaagattcttctgatctgacattttgaaattgtgagagaaactagatgactgtaaacttggtcacaggcctggttctggcagttctttgcggacttttttctagcattatgccaaataaacatgcagtctcagtgtgctctcgcatgtatgaatatctagtcctttctgtggttctcagccaagacataaaaactaggactcagagcacatacaaaaccagttatgtttcggaaagagggaaaagagtccccgagcccggatcttgtgctgcttttctcactgacgtgttgccttttttctttacaaaatctgctttgatacttaggacctctctggactaatttctcttcctagacagctcagcacagctattgatatgttagaggcagtatccttaatattcattctaaatgagttaacgacttaacttgaaattgggcctaaggagtgagaactacaaaaatacaaaatgcttgtccaggactcagccatgcacaccttgagcagcgccggcaggaggcacggaaggaactgtgctccgttctcctcactgtcatggtgccaccagtgtctgatgaagggcagagtgacccagactgcaggcagtaactgacttcacacagtccctggcatttagtcatctgtgattgttttatcactctggactgtgcagagccacctgccaccgagatctgcattccgactgcctatgaacgggtgtgggggccgggggctggcttgctgaagtcttcaacttgcactcggagctcctttgatacctcagagctggctgtcaggtggcagctcacacccagactcactggccacacctcagcagggggggagtcgagtgtcagtctctttctgtgaaggctttttttttcctttggcctgggaatttttcccatttttatgaaggggttttaaattgtttcattttgtgtgctgtgcttcaaagccttaactgtcaaatcttgcattatcttgtttgtacagaaatatactggcctagcagaggcaaaaaaaaaaaaaatgaattttattttacttgtcacacctgtcttaataaactggagttttgctgctaaagaactcttctctctgggggcagagcttctatttatggcacatagacatcagctaggcttttgggaatcgtttgtgttctttgtggaaatgtcctttagaagcacccatgaagtagtgtgttcagactgtgcacacagaaaacaggctctgccttcacatgtgagacggtggacttttcctctggacaaaatgacagcatcctggcgactccacagtggagctgagcgccactccctgtagccgatctgggactgaaacgcttacacctctgcctcagaaggagtcccccatgccctgcctgaaatgacttcactggacacagcggggctgcagctaacggggtacaggtaggagctaactaacttcacccctgagtccacttgcggggtaagagataaacagtaacccttccaggagcccactgacgttggagtgctaaaaatgccccttcagggggaaaactgcattttctcttccaaaaaggaaaggttcttccaggcgagaaacctgtggtctagaaccacagcaagaagaggaggcatgctggcctgcaccggaagactcactttgtctgccctgcgccagcctcacctcaccctgcagttcccgtttccgccatggatgcctcatcaccaaccctgaccttccccctcccaaccctttattcatcctcactcccactcatacccgcctccctggacagttccctgctgcagagttctttctgctttcagccctaccttggtggtgatttacctgaaaatcttcacaactgatcattatctccttctctttgagacctgactgaaaaaattaggtgtgcacacctgtaatcccagctacctgggaggctgaggtatgaggattgcttgagcctgggagtttgaggctgcagtgagctatgattgcaccactgcactccaacctgggtgacagagtgagaccctgtctcaaaaaaaaataaaataa

SEQ ID NO: 7002 - DNA, 1940 bp, Homo sapiens
gaacgtggtggtgagagcacacgtcctcgtctcattcctgatcgaacgcggtggtgagagcacacgtcctcgtctcgttcctgatcgaacgcggtggtgagagcacacatcctcgtctcgttcctgatcgaacgcggtggtgagagcacacgtcctcgtctcgttcctgatcgaacgtggtggtgagagcacacgtccttgtcttgttcctgatcttaagggaacgtttgcagtctttcaccactagatgtgatgtgagctgttagattttcaaggatgctcttcatccagctgaagacggtcccttctagtcctaatttgttaagtgtttttatccttaaagggtactggattttgtcaaatgcttttctggcctctattgaaaagatcctgtgttcttctgtgaatatgaggtgttacattgattgattttcatatgttgagccagtttccatttgtggaatacatctaactcggtcatggtgtataatccatttactctgctgctgaatgtgatttgcttgtattttggtgcggatttttacatctgtatttataagggatattggtctggtgtttttttatgatgtcttcctttggttttgatatcaggataatattagcctcatagattgggttaggaaatgttctctcctccgttttttttggaagagagagattggtgttaattcttgctagaacctttggtagaatttgccagtaagcctatctggtcttgggtctttgggaggattttgattcgattcaatctatgtatttgttatagatcgttcggattgtccatccttgagtcagttgctagcttgtgtgtttcttggagtttttccgtttcgtccatgttatctcatctgttggcataccgtcgttcacgggattttattgatgtgtgtgaggtctctgagaacgtccctgccttcactcctgcttttagtcactggcatcttcttttaacttgggccatctggccgtgcatggttttgggagagtcctccttgactctgcagatgctgagcagtgatctggctgggaaaggggaccaggagtgcagggcacctgctgaggactcacctaagcccaagagtcagagagtcggagctccaaccacatctgcctgcatgcctttcccaggctctccccaggcggacagccagcaccccctccccaaagaccgggcagttcctgaccagcaccccaccaagtcctcagtaaggcctgtctttgggggagcagggtttcaggaggacagtgggggtggtgtagaactcatggctggcggttccgggcctctcaggaagctttgccactgggcttggggttaagtgggtgtggggctccgaaccctaaatgggtgagagttgaaatgaaagcggcacctgtagtccgtttggggtgcaggtgtgtgccaggggtcttcagccccggctgatggccacatgaaccacatgaggagaggcagggcgtgtcagcagcaaacctaagtgtgtgctcatttctgtgggcccttactctgtgacactgcagctctccagagagacgctttgaaaacaaaacaggaaagaacacacggccccgcgtctgttgcctgagtcactgtattccttaaaaggtgaaggaccctggtccttggcttttcgtgcacatgagaaaatgttggccaaggttagcgattatgcttctgtaatctgtaaccagaagtgctcttatgcccaaaccttgatgtgattctgctgtaatgtaacttcggagccagctggatggatgtgactgtgcaggtcctgagccccggcccccgtaaccaagcagtgggccgagacactgagccgggcagtcaaacaggagctctctaaggctgctcccgggctgggacctgggtctaggattctcagtaagacctttgaataaaactaacttgaattctt

SEQ ID NO: 7003 - DNA, 2043 bp, Homo sapiens
cggcgtgacccgggcccaccaggccacggccgcctgctgtacatagtgaagctgtcactcgccggggcacggggcgtcggctgctgcggccccgcagtgtgaacgttggctgctgccttagctgctgatgacggcaggagggccctgctactcgcttttgtctgtcttcgctgtcgtgtctggaatgtcagggaaggggagggctcgggttgacggtggcttcccactgagcaccagcatccaggtgcacccccgcggccacggcgcctctgtccctctcctgttctgtgtttctctgagacgctgaaaggggaaacacctcactttatttccatgtaatcagagcattagctgcagaaaaaccccccgacagagccctggcggagaggcaggcgctggggctcctacgggtccctggggcagctgtccccatcaggccaagagcgagcgagaggcgctgccccagccaggcccaccacctctcacagtcagtgcacgcaagcagggacatttcctagccagctgggggacactggaaattcgggaaaccaagagagaggaagaaggagacgcccctccaactggcgggtgtgaaggaagccgcccaggggtccgggctgtccttggccgctggcagcatcactgagcaggaagcgcacagcccaccctccccgcacctccaggtctctggactccagttttggcccctctcacacagagctgtcagcaggggccgctgtggcggtgcacaggggaggcaggtccttggcgaggtagcccctgccttaatccacggggctcctttccctccgaagggctgctcttccccacaggcgcggggacagcagcccgacctgtggtctccatgcctgtgccctcacacaggtgtagcacacgcatgtgcagatggcaccacggccggcacctgggggcacacacatgcaggcggcgtggtctccctgctctgtccccacacgttcctcacatacaggcaagaggcactgccgggtcccggacggctccgggtgacaccagccccgtctccagccttgagccgcccatgctgatgcgacctcggctgacagctgggcctgtggtgcagacaggagctgtgtggacagtcccgcccaggaggggccgcagggcgtgtatgagcagttttgcaaacagaacacaaccacaatgatggtattttgaaaagtgttctttccgtgttcgtcgggaatcaggattattgagaggtgaaggagccaggtggcttcattctggcggtgagaggcccacgaccacgggagtgagagctggtgtggcgaggcccggctctcctgcggtgtggctggtggcctgccgtggccaagagcatcttctgggtggatggaaccctgcctggtcacatttggccagagacacacctggccctcagggggctgagctggagactgagctggggctggccgggacgtgacaaggcaggacagaggcggcccctccgctgctcctttttggaatgcgagctcccaccagaagaaggttccggcacgaatcccatccccacgtctgggccgagaaagcagcccgggtccggaaggtgtagagagtcccggcctcactcagctcacagggcgtgccaggcggcaacaccagaatcttccagaagcccagctccacccgcacacgcagcttcccatccagtccttcaactcaattcttacccaacacgcgtttctgtttgttttgagacaaaatcaccacctgtcaaaaggcaggtggctccagaggggtcaagacccccccccgcccccgctccaccctggagcccacccccatgggcaccgcgtgccgcctgcacgtgggctgtcttcacaggtctgatgtgaaaattcaatcacgacgttaaccggctcgagagagcgccggcctagaggctcattatctatttattttaccaaacgcgaattgagacggactttgacaaaacacgaaatggtaatgtgaagctaagagcagagagtgaccaacagtaaacaacacgcgcagactccg

SEQ ID NO: 7004 - DNA, 979 bp, Homo sapiens
cgtggcctcgtcttgtgggactcacggggatgccccagggactgtggcccacagagagtttgggtcacggccagcccctgaccgggttccctggagcccagtgcgcacggtgctgagcagagctgcagccacgcaggcgcattgcaggaggactccagagcgtctcctggagaccttgagcctgaacgcactcaggcgccactggcctgctctcagtccggattaactctcgaccgagcccagcttctgccggttgtgggctcccccggtggccgaggcccaggcccaacgcctctggtgctgttcccctgcagtcccagccccgcgtggctcgcgctcgtctgtgaggaagacacctccagaccttggggtccccgcgcttcctcttgctcctcgctgctcccattagctggtgcaggcttccgttaaggggtccctcccttggcctggcttcccggcgcacctcagcttccctgctggtggggggatccccaggagaccagcatgtgctgaacctctctgtgcctctgcctccgcaccctagacacccacctccagtttgaaggtggcgggccaggggctttcttgctgaattgacgactccgagagccctgactcccgccttgccactcacggctctgtccactagggctcagccctgctgagaaaggacctccgatgcttgggagacgctgctccggcaggtgcagccccggaagtttgtccatgggggtccccgcggctggggctcatggaactgcgagacccgggaccctcctgccctgcgggtccccgagccaccagcagccaggactggaggctgtggggcatggcgtgacttctcgtgcacagggctggtttggttatgagacgatctcgctgggaccgcccctgcccgtggaaagccacaaggacaaagggagcggccacctcgacccccagacaggccggcccgtattaaagttggccctgcacgccc

SEQ ID NO: 7005 - DNA, 1663 bp, Homo sapiens
gaatccctttgcccacgtccagctgaagccgacagtgaccaacgacaggtctgcccccctcctcagctgatggccacatctgcagtgctgcccatctggtggcttcccccgcccttcccatgtagcctgttctgtcatcatctgtgcgttcctgtgtagagaacatccaggccccggctgcctggtcttgccccacttgagtctggcctggactggatcccagctgttctaggcagggccgggcagagtggggcgcaggcccctgaagggcgagacccagtggctgggctgcccagggctgaggggccgcctcttgagggtacacgcctctggtcacatggccatggagccttgggtacccctgagttaagggaggacatttggccagctggtggctgggaggggagcctggctgccctgctgcttctcctgcctaataaacaggcttctcctgcaccaggtgtgatctgtccgcccaagggccagaaggccgggagcacggggatgggagcgcccgcaccctggctggaagatgaacttcccgtaagcacgtaattccctgcaggtccggcagctacacctggagtgtggggcctggtccctccccatgcccctcggtggggctctcctgggcccctcactcccactggcaatgtcacaagggcctccccaggcccctcctgcctcgggcaggccccagccctcctccttacccaacctcccatccagaaccttgctgccagggcctcccagctcgctcctgcggccaaaggccagctgtcaggtgctatgcggggtcaccagcagagtgcccgctggcaggtgggggcttccccgcttccggggtctgccccaggactcctgggtggacctcccccccccacctccgctgactcctgcaggcactggggagctctgctggaattgggggttttaaaacttcattagcagatttgtgctcttccatactgtttgtttgtttgttaggtgaaatacagtgtggtgagctgcactggtgacaacagcccttacctggctggggaggtgtctccagcagagctcactcccgcctacagccactcacaccccggggacaggaagctgtagagttggcgggccaggagggcagttgagagctggccagcggagggtgcagggaagcccagctgtgctcaactctcctgcctccgccttccaccctgggcccagggacagacagacattgccctcagaagggcagggaggaggctgtcctggagaggcctgtaggtccattcttcacccgtccctaccaggccaactcggcctgcaggaagggagacctgcagggcgctacccctgcgcccccacacacagtagggccagaacaccatcccctccaccggggtgtgccgaggacagtggggaggagaggagaggggcagcttcctcctggccccaggaagggctggcatcgggttcctggcacagcccctcctgtccaggactttatcatcggcagacctcagaagacaacacacaaaggtttcttttgtcttagcttcatttctcttaaaaaacaaggaacaagaaaacattgcaccagcgttctaagcctcaaacaaaacacaaaacaaatccccctgcgaagcaacaataaactttacatctctttggcaacaat

SEQ ID NO: 7006 - DNA, 1514 bp, Homo sapiens
ggacgctgaccccgggcagccgctgctctgaagagcttccgcgccttccccctggtctcgtccgttttcctcctcagctctcgctggtttgttcttgggttgtttttcttttccacctgccccatgccttttggttggtgaccccagactctgtgatcccccagggtccatggtgctgctccatccgccccccctcccctgtgtttacgcgccccatcctgtgtgtcccagccttttgagcagaaactgccaggcaggacctgctgggccgtgcggggcaccctcggcctcaccctgcagtgtctgtggcactcactgcttttctaaggctcgccgtgagccaggtctaaagtttgaagaaaaagaaaaatcttaaaaaaaaaaaaaaaaaaaaaaagaaaaaaagaaaaacaggaaaaaggactttttttttcctgaaaaacaaaaaccgatctgcatggactccggtgtgcgctgttatctcgcatccgacttccccggtgcgatggcctctgtccggacagggaaggtgctggggtccctggccgccccggcccctgtggaggggtgcacagagaaagggggctcgtgccaagctcgaggggcctcctgaggaagccggccgctcctgtgagggaggccgggcccgggcacctgagggcttctccctctggacactgcgggccaggtgtacatagagcagcgcggcacagtggcctcacctcccgtcgggcactggcgggagcaaggtcgggggcaggcgctgcccagctggccgcacacggacattccaaagacctccagagaccaccccacccccacattcctttgaccagccttgtgagggcatcgatgctgccccgggctacctggctgctctgggcagggtgtgcgggccgggcccggctgggggagggcagctctgggcacgccgcacccacgccccccacctgggggaaacaggcggttcctgcccggttcttcctaaacgctctcgtctttttgtgtgtcttggtgactttagaaacaaacacagtggactcagtggctactggtattgtctcttcccacactgaactctggggaattgagtgcagggcacagcccggctcagcctgcccgctggtgggagcccctgggaagctgcggcgctcctttatctgatgtggtttagtaaaagcctcccacacacctccccgtggcctgggacgtggctggtagtgtttgtgtgggaagcagctcaagacgcggaccgcgtgacattaaggagagctcaagggcggaccgggccctgtgtagagacccttccgcgccggcgttcccgctccgctaaagatttcaaatccaggggattccatgctcaatggatgaatgtagacacaaaacagcaacacttgtatgaagatgtaaagtgctgaacatatttttttcctgtttcctttccttttttttaaaaaatctgaattgtgccctgtactgcagttacttgtttgaataaaagttttatttattgc

SEQ ID NO: 7007 - DNA, 49 bp, Homo sapiens
ggccgcgcccagaccagcctgtcgcgcattaaaaccgtgtctctcccgc

SEQ ID NO: 7008 - DNA, 454 bp, Homo sapiens
gcgcacgccccgaggtccgagaccgccacgcacagggatacagggggcgcctccgcccggctaaaaagcgcggcctgcgccgccgccgccgcctgatttcgctcgggcttcgggtgacttcgccgcaggacctacccagctcgctcacttcgctcgctccgcgtcccccatgccagcccccaacgcagggcgcccggcgaagccacgggactggcgggaggagcacgcggggccggaggaaatcctgaagctgaccctcacctccgagcccccactcccaccccagccgcacagttcccacctcctggcacctccctcccctggggccgccaccccttctgggctcgtgatggtggagctaaggtccaggcctctccctcccgagtgcatttttggggagatagtaaatgttttattcgggtgtatcattcatacagtaaagacaccaatcttc

SEQ ID NO: 7009 - DNA, 497 bp, Homo sapiens
cccaggccatgctcacgtccggagtaacactacatacagttcacctgaaacgcctcgtctctaactgccgtcgtcctgcctccctgtcctctactgccggtagtgtcccttctctgcgagtgagggggggccttcaccccaagcccacctcccttgtcctcagcctactgcagtccctgagttagtctctgctttctttccccagggctgggccatggggagggaaggactttctcccaggggaagcccccagccctgtgggtcatggtctgtgagaggtggcaggaatggggaccctcaccccccaagcagcctgtgccctctggccgcactgtgagctggctgtggtgtctgggtgtggcctggggctccctctgcaggggcctctctcggcagccacagccaagggtggaggcttcaggtctccagcttctctgcttctcagctgccatctccagtgccccagaatggtacagcgataataaaatgtatttcag

SEQ ID NO: 7010 - DNA, 278 bp, Homo sapiens
cctccagctcggaggacttgtgttcaggggtcctgggccccgggcgaggtcccgccctcccgtggtcactggctccgcccccagcaccaggcgcccagtggagccgtttgggagaattgcctgcgccacgcagcggggccggacaggccgcacagacctactgtggcgggagggaggggcggctgctgcctggtgacggcacccggaggcccaccaggacgcgccaccggtgaatgtgcctctggtggctgctgagaaaaatacactgtgcagctcag

SEQ ID NO: 7011 - DNA, 934 bp, Homo sapiens
ccagccgtgggaatggctgggctgccaggccagacacgctaggttcttccaaagagtcccaagcccagcacctgctcctggggccacgacctccctggccgtggccacccgtcctccgcagcaggcccctgctgtccccccacctgctggctgagctcctcctggcctcgtcccctctcagctgtagctgcaccacccccgctctggctaccaggctctcccggctgggcactgcgtggccttgcccctctcccgctggcagctcctcaggggaacaggggctaccagaggctgatttctcccctctcctgggccaggggaggggtattatccctgcctcctgcccccgatgcccaaagcagcatcttccagcactttccatcgaggacttgggtggcagagtgtgggtgcagcctggctgttgctcacccaagtgctagctctgcacttcgtgtctgctgagagcaaccagaccttccatgtcctcgggcagctgcaactccccgcgagaccccgcagctgggtgggatgaacaagcaacgcagaccacaagcgagtgcctgggagggagtggcccagggtggttctggagccattgtgggtgagggtcgagggccaccgaggtcccgcgcaccgctgcctgccctgcagtggctttaacagttagttttgccaaagcctctccactcaccagcaggcggtctctgtcttcagggattgtgcctgcgtccctcgggcacctgggcccccccgcttggctccctgggggaatggcccaggcgggccgcggttcctccttagggccttctccccgacaaggagtccgacggggcggatgctgcatcctctgcctccctggtcgctgggcttcaccccacctgggaagggcagtgtgctctgtgggggctgcaatcaataaatgccgggagctgcc

SEQ ID NO: 7012 - DNA, 422 bp, Homo sapiens
ggcccgacctggctctcgctggaggggcatcctgagactccttcctcatgctggcgccgatggctgctggggacagcgcccctgagctgcaacaaggtggaaacaagggctggagctgcgtttgttttgccatcactatgttgacacttttatccaataagtgaaaactcattaaactactcaaatcttgctggaggcctctgggtgcctgtgttctcggcatatagatgtggtctcggtgtgttttgatatgaaaactctcatgaataaacatctccgtgaaacgccaaggccctcgtcaaaccctgagtcatgactgggaggagaaggagcaggatcagacggtagagcctggggcatgctcttcaggcatgctcttgcctgctggattgccggcggcggccctgggaccctccctcagg

SEQ ID NO: 7013 - DNA, 82 bp, Homo sapiens
gagctgccagcctgaggtgcccactccgccagccacaggaccacctcctctgccagcaggaataaagacttgtgcatccctc

SEQ ID NO: 7014 - DNA, 345 bp, Homo sapiens
gacaggccgggaggacccgggcgcagtaggagtgcatcaggcggcgcccgagatggaccaggggctgcgtcccgcccgcgccgcctctttgagacccgggtcgtctgttccacgcggcggttgcggcgactgttggtggtgtcgcggctgcgggggaaccccgtgggaggcgcctgggaagggctccctaccggccccttcttcccggtcgacgccacgtgggagcacaccgggaaggggtcccgcgggcgcgtctccccctcgccttttgcgatgtcaccgtgaacgctgcggccgcctgcgcgcggcggggtttggaaatacagcgcgtttgcactttgtgat

SEQ ID NO: 7015 - DNA, 374 bp, Homo sapiens
agccctggcccacccgagcctgagggctggcggggagcagccctggacgtgtccgctgttgtgttgagacgtgtggtgtccctgagtcggctgtggggagcggtgggggtgggccggggggaagcatggggatgaggctgggtggcaggatcctgtcctctctgccgcctcattctggggtgtggctccagccttccctggcccccgccggaggccgggagggagcagggtctccctcagggctgcaggggcaggtgcagggaagccccaggatgggcttccctggagggggagggtgggggggagttctgttccttgtgccccgaggtggggcagccccttctcattttatacaataaacattctccacctac

SEQ ID NO: 7016 - DNA, 343 bp, Homo sapiens
ggggtgaaccttggcctccaggacatctgcaccccctccccacctccacggacctcggacctccaggcggctcagtgctgcctgcggcccagctaaggggcctggccactgggtgccacccagcctgtgtgccctccctggggctgaggaggcaggcggctgctagttgtggcccttcctggaaggagaggcctgcagggctcgaccctgtgggtttctgtccccagggagcagactgtgcggcacccaggcccagtggcaccatttcccagacccctcctgttcccgcctcagtcaggtgcagacaagtgggcggtgtccattaaagagcagactcagcgtt

SEQ ID NO: 7017 - DNA, 516 bp, Homo sapiens
gtggctgggcggggccggcaggcacagggaggaggtacagaagccggcaacgcttgctatttattttacaaactggactggctcaggcagggccacggctgggctccagctgccggcccagcggatcgtcgcccgatcagtgttttgagggggaaggtggcggggtgggaaccgtgtcattccagagtggatctgcggtgaagccaagccgcaaggttacaaggcatcctcaccaggggccccgcctgctgctcccaggtggcctgcggccactgctatgctcaaggacctggaaacccatgcttcgagacaacgtgactttaatgggagggtgggtgggccgcagacaggctggcagggcaggtgctgcgtggggccctctccagcccgtcctaccctgggctcacatggggcctgtgcccacccctcttgagtgtcttggggacagctctttccacccctggaagatggaaataaacctgcgtgtgggtggagtgttaggaccaacggtttcct

SEQ ID NO: 7018 - DNA, 1098 bp, Homo sapiens
caggggtttctcaaagtggacctgcccccaggggagcccgtggtgttgaagctgggcattacctgggcagtggaccctgccgaggctgaggcctagttactggccctgcagcttgtctccatggtgggctgctatgataccatctacctacagaagatgaccccagacagggccctgaggaccccagggcagcactggaaattgctgctggagcctggtgaagtgtgggtggtgagactccaagatgcaccccaagagcaggacctgcactggtggatgctgagcattctagaaacatcgttaacaggacacagggcagagctggtccctgcagcctcagccctgcagaagaggattcaccatagtctcttattcaccctggaccaacagggagagcaagaagggagactcagcctgtaagccacagtcctccagccaagaacaggatctcagcacccctgagacacagagcaggggtcctgaggaaagcctggctgttgcaggagcctcggccatgggggagctgccctgtttccagcctcagtccagggccccagaactgagagactaaggctcatgtagctgccattgtcctgggcacaccaggacatcagagactgggaagggccagcaattgctgttccacaacagccaggggagcagttggcaaaggaaacatggggagcaactttaggggctgggagatagggcctgttgtggcctcagagggaagcattacaaatattcataacctggaaacaagttcttaccagttgattgtcacatagttctggatgtgttggcctgaatggctgttgtgctgcttgtgacatggggggcagggcacagaacttgtgcctatttcaccttggccatggggagggacattgcttgtaaaacacatgctctgcagaacacaccagaatctgtggtgacctggatgtgttctcgactttgccaggacaatctcaggggtgccacaagaccctgtcagcagcactaggatctctggtctacagtggagggagagctggttttaaatgttggccgttgatgcaatttaaccatttaattcctgttgctctatatgttgttttt

SEQ ID NO: 7019 - DNA, 48 bp, Homo sapiens
tctgcatgtgtgacactgattctttggaaataaagagtggaagctgca

SEQ ID NO: 7020 - DNA, 110 bp, Homo sapiens
agtcaggccagggccttccagctgctcttggggccagagccaagagcctctcagtagagggaggggctgccctgagtggagtattaaagacacttaagaaaaccgctcaa

SEQ ID NO: 7021 - DNA, 3106 bp, Homo sapiens
cgaccgggagagcttttctttaacgatatcaactctgtggtgccaaaaggagacgcggcctcccgccagcactcgggggtgcagggccctgtggttggacttcacctctcagcactgaaaacccaaaacccagctggccttaacactccttaaagacagaagtcacacttgaacaaaacccacacacaacaaaacctgatttgggagacggtgtctccactgagcacctgctgggctgagcttctacctacgagtgaaactctgtcctcccgcgaggaccaggcatcgctgtgtgaggacggcacggccagcgcctgctgtgagtgggtctcccaagactaggcctcaggacgcggggggagccatccccgccgccctcacaggacccaccaggcagcggagacatgtggaattagagtattttgaggtgtcctttctttacaaaataatggggtcttgggcatttcacatcactccatttctactgagactttcagaatcacacaggccctttccgtggatttcatttggggcaaagaaacaacgtagttttgtttttgttttcagcctatggaatgatttccttttgtctgtcttgttcaagttcagacgaagctactctggcatctgcacatttccgtgttacagcagctgcctgatgaattttatccacctccatttcagcatgtggctcgcgtggacaggtggacggacgctgtggccgcatggaaccttgagaacccagggacgagccagtgccgggaaggaactgccgggactcaccgagctgcacttaactgttctctttctggctattttttgttgtttgtttctttgtgttgactttgtccctggcaaaattttccactctgagtaaaacaagtctcctaagtattgtgtatgtttaaaacgacagaaccatttctacttcatttggaaaaagattcagtcttttatcacaggcccttttgaaactcagatcccaggtctctccgtggtatgtttgtatttggggtgtccctccggctctaggcggcctctgacctgctgtctactccccaccttcggtgagcggccgccatggtggagcagggtccgagccacgtcctgcagggcacgtctggggcatttcctgttttgtggtaggaaatgtccctgacctttcagaaccgaacccaatcctgaggctgactcctctacggaaaatgaggacaggacgggggtgagggaatgagagtgggaggtccctgcacctcctcgcccggctcctcaggaagaaaaccgctggcccttcccgagtgtgccggccgagggccgagggccgtgcacatggggagagggcgtcagcctgatggctgagcttttaaatgtcatcatcataacattatttatttaaatgtagttattttggtatttaatttttttttagagaggaaaaaacctgtattttcctggtgggatgaaatagggatgaaatggctcagaatggtatatttaggcaattttaaaacatttattatttacataaagaccaaatatgatgaatctgttccgtgaattgtgtcggccctcagcatggggctggggcagcgtcactgcggtgacgcccattgaaaggtatgaaatgactgcacactagctggattatcactcagccgtttaagaaataaaagcaaaaccatcacgtgactgagaccgtgtgtgtgaccgcagcaaagcgcagcgtgtggatggatcagagcccctcggtgcagctgtctgcatcttccaagcactttacagataccttggaatgtatatttttgtcttcttactcagaaggtttgcagtttgtaaaataatcaggattctgctctgtcctgtgtgtggggtcagctccctccacagagggctccagctctgttggtcacagctgatggggttctctgattgataggagacgagctcttgagctctaaggaacagtgaggtcgccggtggggagcttggctgggacaccaagcaaatgcatcgtatgtccccttggagacgtttttatgcagctgtgtatgttactatccagaaggagtcgggggtagactttcccgtgtaagctcagtccataaactggttacttctgatcctggaacgtggacttcacatgataggtctggatctgtttctgttgggatcacaggtaaggaaaatgtccattcaaatggtaaagaagggaggagggtgttttttttttttttttttgccgtaggcaccattctgcatcttgaacccagactgaagtgtgcctctcacagatggaaggtgcacacgctcctgtctcctcctcactctgccacgttcacttggctttttcattggtacctaggaatttaagaatatcgaagcgagagcagtaacaaaccatagatgagcagactcccacaccgggttttcttgcccgtctttaaggcactgtttctaaattttgaacttagctctgaatccccaagaacttgagcacagcaagggttgctgagctgctgtcgccgcagccctggcccctggtgctggagctgcagcacctttgggagaggtcctgcgtcgtcctcagctgcgtcgctgtgaactcccgctctccactgtgttcctcagtgtctgcttttcaggaagtctgctgtgacctttgcccaacttctgagctcctcagggactaggaacaatttcagtagctttgccctgaaccaaacgagaaaacaaaagggaactcccgtatgacccacgtcacgtggtgcactcagagtgtgtgcggcatgatcctcggttgctcctcctctcactttagtagagtacgcggtggacagctgatctccttcagtcgtctacccacttccgtcattgtcctccgctagaataacagagtagttggtagtcatggccagaaggggggtgggggcagtgtgaggacttggggtttctgtgctgtgtgacacaaggagataagtgacaatcttgaagtcctaacttccactattctagaaagtatagtggtgatttgtgtgcaaagatttgaagttttaaaaaagtaccaagttcctgaaattcaataaaatatttttattaattttaatgg

SEQ ID NO: 7022 - DNA, 808 bp, Homo sapiens
gcgggccttactctggaaggaggcctcagaggtttctccacagtcctcttctgggcaaattcttgtttcttcacatgctggactagcttaagaccaatgcagtagcttatttccaagccttgcaaagtatataatatctaagaggaaaggttttgtcatcccagcgttgtccactttgtggggctttgtaggtagacggagccacactacaggcagggtatgagcagagggatgtatggagtgtgggtgactctgagcctcactgctgctgcaaggtggggaaactgtaagtgaacccctgtgggtgcgggggagggtatccggtgcgcagggaggtggccagcgcccccgggcactgctgctcataggtacctttccactgcctcctccctgctctcctgtgcaggaatgtctctgagctgttcacgttgatgcttcttggttggcaagacttgggtgtagacatgaaaccatcttactaaaagcgtcttaaaatgaccaattccagaatcaagcgtattccgttttcttcctgcatgatccctgggccctcccgcaggctgagcaagtctgtaaactgattctgggagaaaccaagctgctggccatagggtgtccttgggtacatccaggagtcttcattgcttctgttattaccccgtctcctctgccattttctacagcttgctgagttgtcattcctttgcaacattaaaatacatgctgaactcatatttttccttccttcactgttgtagtaaagagacatatttcatgaatggcattgatgctaataaatcctttgcac

SEQ ID NO: 7023 - DNA, 442 bp, Homo sapiens
cggcccctgccctcccttcccctgtccccgtccccgtctccgtctccccgtccctgtccccccgtcccccgtccctgtgcccccgtccctgtccccctgttcccgtctccccgtccctccgtctccatccccccgtccccccatcctcctgtccccgtccccccgtccccgtccctccatccctgtcccccgtccccctgtccccctgtccacataccaatccccctgtccccgaccccccatccccgtcccccatctccgtccccgtcccccctgccccgtccccgtctccgttcccccgtccccatcctccatccccgtctcccatcgccgtccccccgtccccgtcccccgtccccgtcccccctgtccctgtcccccttcccccgacccctcccagatcctggggaccaataaagcccgcagcgggtctcggctggcg

SEQ ID NO: 7024 - DNA, 721 bp, Homo sapiens
agccagtcctggagcccatacctcacccctgcctggtgaggatgtcttgttcctgagggaggccggtgtggaaagcctcgcacagtggtgcctccagctgttgaagggtagcgctggcccttggaggctggcactagctgacagcttttcctctctgcacctgcgctctggtgacttggggtggacgcctctgccttcacttgaacacaaatgtgcttcctataaaatcatgtaccaagaagttcctgccttttgtctctgagcctgatgtgtgtaggggtgatggaaaggctcactgcccaggggtcagccagaggggaggtgggctgcactcctcctgcctggagaccaggcccccttcttgcctggtgctgtccctgctgtgggagacgtctggccacaggcagtgccccacccagtcttggagagagatgaatgttaaatcagaggttcaaatgctagagaactgagaagccctggtggcaggcatggtctggagtgctgggcagatgctgtttctgggcccgtctgcctggtgggggtgctgtcctcccccctgtgcacacgtgagcatcgtgcatgtggcccctctgcagtgcaggagtcactgattgatgggtgtgccgaccagcagcttcacaaatgtctgctgcaaggggaatcgtcagagtccaatgtgtgcctctacagtaatgtcggaaataaataccattcttgaaat

SEQ ID NO: 7025 - DNA, 1349 bp, Homo sapiens
ggtgtctggtgcctggaacagacttccctgtggaggattcctgccagaccctgcccggctcctccctgaccggtccttgtgccctcaccagacaccctgttggccatgactcaacaaaccagtgttgggagccgtctgcctccccagctcagtgcctttctgcaccccttctctcctggggagctgtctgcatccgccaccccctccaaccactgccctcagcccccgaccttatttattaccctcccctcccacacccccaatctacctggtgatgattttaagtttgcgcgtgtcttgggttgggctggggggtttcccacatgcagtgtcagaggggccgcccggtggggctatctccgttgctatattaatggcaagactaaatgaaacctagggcacggcctccgaagctgcgtgtggccccttagaggtgagcatcagagccagagcagtgagggggagactcacccaccctctccctctcccttcagctctgggaggcaggcgcagtgcccccctcccatgggctggcccaggaccgtgggtgaaacctgggtctgtttagtttctttggtttttgtatgtttgtttgtttttgacacagtctcgctttgttgcccaggctggggtgcagtggcacgatcgcggctcactgcaacctccacctcccgggctcaagcgattctctcacctcagcctcctgagtaggtgggattacagatgcccgccaccacacccagttaatttttgtatttttagaagagatggggtttctccatgttggccaggctggtcttgaactcctggtctcaagtgatctgcccgcctcggcctcccaaagtgctgggattacaggtgtgagccaccgcacccaatcctattaggtttctttgaatcccctcatggcctgcctggtttttgctcagcctgtcttcagcttgaggagctgggaagctctggtggatgctatgaactcacttgctgaagagcagcgttcaggtgcatccccagccagggcacgtggctccctcagccatgaattcacttctcttcaggaggtttggcttggcatgaaaatacttcattcagagtatgggcaaatgcttctggaaaacccttccctgaagagagagaacgtgtgtgtgtgtgtcggtgatcacaccctcccatccttcctgcctcctgccccaaaccccgggttcctgggtctggaagggccttctctccaagctgggagctcctgggcccccaccattcactttttgtccttgctgctggcaaacagtaaagaaactcactttccctgtggcacgttatgcttcagaattaaaacaatgaagattaaa

SEQ ID NO: 7026 - DNA, 3178 bp, Homo sapiens
cccagcaggctgggctggggtcggaccggctctcccgctgtcctgcccccgactgccctggccaagctgggcgaccttacccttcacgtcattccagccccagaggagtctaacctagagatacctccaagcgcggccgggggaagagaaaaaaaagaaaaaatcactgcatctcataattattgagatctttgtgttgtaattttcaagctgtttttagagggaatatatgtcctggtttgctgctgtgttgtttccccaaagtctcaatcagatgaggcaacaaaaagaccaccagaattgcaggaaagcagcagcagtctgggatagggaggggggaggagagctctccctccgtggtcagtttgtcagaagaaaagcatggaaaaagtgagatttaagaaatctcagccacgggtgtcttcactgcacaaaagtggtgctaattcagtaaacagtgacacctgtgtgggttcaatctgtggagagttgagttccattcctttgtttttaaatttccacctccatttgtgtttcctattaacctaaactcttgtaattctctaaatcttttttcatgatataaaaaaaaaagaaaatcccaaaccacaatttaagatgccttttttttttaaaaaaaaaggttctccgtgttgccacctgctccgggaaggccaggccgatgggcggccaggtttgggagcagcggcttcggctccgattgcttcctgacggtcagttccaagcacaggctctgagaaacgcctcgaacccttggtatctggtgaccgtctccgcaggcttccgtgagtctccgataggtgttttgggcttttggaatactttcagaatactttcccattttttcataaggcaaaacggagtggacggcctttttttgagagaaacagcattctaagagtgtgcttggaaaacacactttttgggagtccacgtggggagtggacactcaggacaggaagcggtggccctaagacctgcggccacccggaggaggcagacgcaggcgatgacctggttcatcatgagaggagctagagttgactcagtcttaggatctcgatggcgtcagaattgcagagggtttctgccagtgccttaggtctaattcagaaagcaaggaaggctgggcacggtggctggcgcctgtagtctcagctacttggaaactgaggcaggaggatctcttgagcccaagaattcgagaccggtctggcaacatagtgagcctccatctctaaaaaaaagtggcaaagctgaggaaatctgtgcccccatcccccgacaccagacaagctaaggtgcattcagagtagggaacgatgtcaaaacctggccgccgtggtggcgcgcattcctctcacaccaccgtacggaggcaggtgacagtcaactgaaatgtccccaaggaccgtgtgaattcggctggcgtggcccagcagcggggtggaccagggtgcggtggcttcagacctgcctcccgccaccccgtcctcccctaaccccttcttgggacctcctgccaatccctgtggtgtttgagtaaagaaagtggctgatggttttacttttttcttccaatattggaaagaacaaactagatattccccttgaacacatccaaattatttccagtgcctgagggttaccgagcactgtaagctcagctcggctgtagctccgggtttctgccgatggcctccatctgcgccgaaagctgaactgagccccgcggtgccccggagccacagcagcaggtgcagcgacaatcgccgtcgtgcgcagtcgctggagtcctggagagccacgctgtcctctgcagacaacagcatcagtccgctgtgccccaatgcatcgacgccctgtggacggggcctgcagtccacccgtggtctgagcttgccgggctgaagctcggctgggacccagggaggggccaccctgggacccacagtctcctcagtcacgtgcagagcaaaaaatgcttcctgtgtttggaagagcaagtgacgcagcatttattgataaaaatggatttttctgtctgatttcatgctgtggtcgtttaagtggtcaatgtcttttttttttttttttttgacatggagtctcgctctgttgcccaggctgagtggaatggcgccaactcagctcactgcaaccttcacctcccaggctcaagcgactctcctgcctcagcctcctgagcagctgggattacaggtgcccaccaccacgcccagctaatttttgtatttttagtagagacggggtttcaccatgttggccaggctggtctcgaacacctgaccttgtgatccacccgcctcggcctcccaataatttgtaagttatgttagcgggatcctcaaggccttgctttgccccgtggagacgcttgctcggatgagctcaggaaacagtaccggctgcgtggcaggtctgggtgttgtgtgcgaggacgtggcctttgaacaccgctgtgttctcagaggtccttaggagatatttttttttgtcttagggggactgtgttaagttcagacaaatcatgctgggtgtgtagagagtgtgaaatacgtcagtgaagtaagtagcagtgagcgattgtgaatgtgtaatgtaaatggaaaaccgggttttaccgtgttaagttattcactagggagccagtcgtagttctttgtaatcctctttcttccaaacctgctttgctgaaagttgcagaaaaggaagtgtgtggagagaaacagaacccttcagggtgggtcagaggacgccatccacagtggattcgtgttcgtttgcaggtggaagcagtgatttttaggacccactgattaaaaacaaacattcccaagtgtctctgagagatgctgtttatttgttaattaaaaagcttttttctctgtcttttaaattatggctttcatgtaataaggatatttttagtgaaaaattgttttcctttcaaattacagaccttttaaaaaaacttaatttgagcgagtaccttttcatttgacacttttcctgtttctaaccttaggaaaccagaatagcgtttggcagacacgacgttttcagtttacctttgacacctgccccactccattttgctttgtgatgtcttcatttaacaataaattatctgaaa

SEQ ID NO: 7027 - DNA, 118 bp, Homo sapiens
tatcaggcatttgcctggcagcttttgttgtagatcaagcacatattcttctagtccagatctacttggcaggaataaaattgatgatgtcccctgtttggggacagtataatgactc

SEQ ID NO: 7028 - DNA, 445 bp, Homo sapiens
cttggcgtggggagctgggccccaacatggcgggtctgcagaagatcagcagcttcttacctgtgcgggagcgaaaaagctgggcttcaacatggcaggtctgtaggggtcagacccgagcagcctggactttacagttatgtgaaactgtccacaaaaagtcatggcaataatggtgtaaagaaaatagtttcttgggtatttgtaacgtacaaactatcataaaaattctcctctttcgcatctcactttgtctcttctaagtcggcctcagcaatagcccaggattaaatatgctctgaaattgggtttagtgtcttcaagatcaaatccagccaggaggaacatgttcataactggacttttccatcctagattttggcaaataagcccaaagttgaaaccatgtgagtggaaaaagcattacatggtacgtataaccccc

SEQ ID NO: 7029 - DNA, 841 bp, Homo sapiens
cggaagacatgatgcagagcaagcctctgtgattcctgcccagcacctgtgaggcctgacgtgtcagttcccaataaatgctcttctgatttgtttcccgtacaggcaaggaggcttgggtagtgcagatttgtgtatttcaatctttgaaagctctgatgtaatttagaaatgaaatccaatcatgagtccaggtagagaacgcctgctgtaatctacactgttgctgggactgcgcattctgtatataactgtgttggatgagtgacagatgattgtccagactaggacagcggcatgaacatgactttggttgggattgcggatagttagggttacctctgaatcgtgtagcttttatgagagcagctgtgcaagtgaatccacattaatgccttgtcgtggtgccattcccagcgcctgacgatacgctcttctattgtcttattctggcaggttttgacgttttaaattttttaaagaaattttattccttggaccaaaaggtttggttaaccacccccctcttacttgctttcacattttgagtgtccagaggaaacagaaaggaatgagtgtgtgacgttgctgcacgcctgactctgtgcgagcttctttctgtgtatatattttgttttatttttttccgtgtatatttttaatcccgacagaacatcatgtgagatttctttaaaatggattaaacgatttcttcagcctgaaaaaaaaggttttgaaaatgttttcttgtagttttgtttggttctaaacaacaaataggttttaatcactcgaaatggaattatattgtgtattcattgaataaattttttttgaaagt

SEQ ID NO: 7030 - DNA, 1603 bp, Homo sapiens
cgtggctccggcctcctgagacgttatttaaaactcagccttctcctcctccccctccttccttccgcccttggacttacccagcgtgccccgaatcccaccacccaagtgtccagcctctctgtggtgccttgtttctgcagtaaactcctcagccagcaccctggggtgtggaatcagcagcggcagagtccaccgtgtttggagactctgtttgggagcacgggatggccgggggcccggccagagcggggctgcatggctttcgcaaagtcactagcttttggtgaaggatctgccagggtgtcctgggcagagtgagcgtggagggccggtgggtcccgctcgggctctgactctgacgtcggcacacacggccccggacggccagaggggaaccgccgggtgacacctgcgtggaggctgagctgagaaagggcctccgcttagagctgcgggtgaggacgtccttttctaagcaacacagtcttcctcggtctgagagaaaagcagcccactcttgtgttctcaggcaggggatctccaaatgcaaaaggaagcttgtagaggttttttgggtgagaagaaaaatgtagctaaggtaatggttcatatcatacaaacagctcccacgatcctgaaattctgttaacgaatccttctctttggacatcttcccaagaaacttagccctgagtcctaggaggagcacctctgcaccagcacggacctctcgctccacccagctctgtgcccaaggcccctgatctctgctgaggtgcccacacccacgttcgatcacccctgccattcccttttattttcttttttttgagatggagtcttgctctgtcgcccaggctggagtgcagtggcaccatcttggctcacttcaacctccgcccccaaggttcaagtgattctcctgcctcagcctcccgagtagctgggattacaggcacccgccaccgtacctggctaatttttgtatttttagtagagatggggtttcaccatgttggccaggctggtctcgaactcctgacctcaggtgatccacccgcctcggcctcccaaagtgctgggattacaggcgtgagccgccgtgcccggcccccttttcttttcaaagcagaactacaaagatgagaaattaccagaagcctcgccttttcctaagcaccagcggaaggagctgtgccccgggatggagtgagggtggagggcgcgtcagccacgggtgggccttgtgtcgccttgtatcggcccaggtaggttgttggcctcttacttgggctgacctgacccccgaaagagaaacagacaactctgttctcaggattggggatggacggcttcggccaagcgttttagcctcattcactcaggccccactcagcactctgccagccaagaccattgatttggaaaatccggtccccacccgctaatgagctgttgacactgttgttccttgctgaattggattgttgacttgtagttcagaggcgtacaactagttggcgattagacttgttatgtgatgttaccagcctgaaatgcgatcaccccgtaggaaataaagcaggcatctctggacctc

SEQ ID NO: 7031 - DNA, 2560 bp, Homo sapiens
cccgaggcagggtggctgcgggcgggtggtggaaccagcccctccagcctggggtccaactcagacttgaaagactgcaatagaaaactcccaaacccagcactccagactcgagggaagccagcttccaagaactggaatgcgtacgtcttttgtgccaccttgtacaaagccggctgcccagccccagcctcaccaccgcatcccacctcctgccctccatacctctagttgtgtctgatgctccgtgctgttcgggaattgttttatgtacacttgtcaggcagaaaaggtagtgaccggcccggcgtgggcacacagacagcccgctttgttctttcatttcctccagcactttctttccgcctgagtccagcccaaggccttttattttgcgctgtgtaactgctgccagcttctctcttggccctgctcccagatggcggtctcctggcagcctcccctcagtcttcctccacccgctcttccttcccagcctgcctgcatgcatgtgcacccttggtcttcgctccatcgccttgaaagctctgaagaggccctgggttgccgcggcagcagtggtctgtttgatgctgccgtttgccgctgccggcccctcctcagactccgcctttgggagcacacctgctttgccttgctgcctgtgcaaatgttggacaagcagacacactcacactcgtccccagcttagcacagagctggagcgcccatttctggaattttccgtttgggaatctccacttctggggtttacctgttcggcctcctgtctatcagtgaggcatctctgactgtttcttctactgcttttcagttcccttccctgctgttctatttcctttgagtgtaaagactcacaggtgacctgctatcgagatagccagagggtcaggagagaatgggggaggaggcggtcaggctgctgaggaaacaccacaggctgaacgggggaggaatgcacatgccacgctgggtgtcccgggtcgcggggaggcagctcagctcttaggagcaagttgtgggggcttttcaagaggggccaggcttcctggagggtgactgatgtggccgaagcaggtgtccaggcaggtaggctgcagccaggagctccctggcaccgcaggacctcgtggtactcttgccttagattttacacacactccacagccaagcactgccacggtcctccaggacctgggaagcaaaggcacaggcccacggtggccagccattgtggtgccgccccagcttctggatacagccttttgggtaaacactgggaactccagaagttgtggggagagtggggaatcagacagccgcctctaggggctgggttctgctggggcctccttgttggtgctgtaggcacccgccagggagcagggacccgacttgcagacgcattgcccggtactaggaaggagtgaggtgtgttcccaccgtacacttcccacacgagctgcggctgccagcctcgggccatcagcctaggagagcagatgcagctccaggggctcgacttatagccagttacagctccccggctcttctgtgtggcagagcgtcgtttccgggccctcagggctggggagctcagttcccattgcttgtgctcagggctgagtcttaaagaagggtttgccggccctaacgctgcagcgcgtgcgcggtgagaggccctttttgagcctgtttactcctgtggccttgggcagaacagtaaatactctgtgcacggaggaaagacatgcccaagaggaaggaagtactgaccatcggctgcctgtgagcagcttagcaaggagcccttgctccctgggaaaggcggtgaacttgagtctaaagatgcagtgcctggcccttcctaaggtccctgcctggcatccgagtgtcggtgtgtggcacagaaggctcctgcttgcttccaaagtgatggacaggaaggggcagagtgagtcacggcccagactgggcaccttcgcgtctcagcctcagggagccccacagccccaagctcgctgaggcaacgtgagaacaggctatgggaaggctgcaaaggctgagaaatgcaaaggctcatatttataaatcccacccccagagtggggagggtcaggtgccagacctggactaaactgcaccaaggaaacacccagcagggtctcctgtgagccggggaccatgcagcccgaaacctccagtcactgcgcccggcaggagtcaggagccagggactgtgcagcctggaacctccagtcactgtgcccagcagggtgggctgtgcccagcaggagtcaggctaagaaacgccaggtctgcctgttcttgctgggcaatggctgatggctgccagtttctgctgatacacaggtaggatgggacccttcatgaatatctgactttaataagttggtaaggatatatttttttgtctatgttctgtttcaacttatgtagattattataaattgatgtaaaccacgtgagaggaaaatgttaataaaaaatgcaaagccccatcatttgcacaaaactc

SEQ ID NO: 7032 - DNA, 896 bp, Homo sapiens
gacataagccaacaagagaaaccatctctgaccaccccctcctccccatcccaccctttggaaactccccattgtcactgagaaccaccaaatctgacttttacatttggtctcagaatttaggttcctgccctgttggttttttttttttttttttaaacagttttcaaaagttcttaaaggcaagagtgaatttctgtggattttactggtcccagcttttaggttctttaagacactaacaggactacatagaggctttttcagcattactgtgtcgtctccgtgccagatgtggcaagatcaccattagcaaatggaaattacatttgaaagccattagacttataggtgatgcaagcatctaagagagaggttaatcacactatagaggcataagtggtatcagttttcatttttctaattgtttaaactgtgttttataccagtgtttgcaagtaattgggtgttagcttgagatggttaaaggtggtttggggagggacttcgttgtaatggttttgctgtaaaaaatgtttccaactccgctgaaatgttgctgaaaagcatggtgctggtaacagttcaacaatccgtggctgctcattcttgcctactttactctcccactgaagcaggttagcgttgaaggtggtatggaaaagcctgcatgcctgttcaattcttttgtttcttctccttccccctccccctacctccttcccctcactcctcccctccttcgctcgctcaacctcttttgttcagtatgtgtaacttgaagctaatttgtactactggatatctgactggagccacagatacagaatctgtattgttcttactgaaacacagcatggaattaacattaaacttaaataaaacaaacctaaatt

SEQ ID NO: 7033 - DNA, 1477 bp, Homo sapiens
gctggtaaaggttacgaagattaatgtgagtggtcagtgggaaggggagtgtaatggcaaacgaggtcacttcccattcacacatgtccgtctgctggatcaacagaatcccgatgaggacttcagctgagtatagttcaacagttttgctgacagatgggaacaatcttttttttttttttccaactgccatctatacaattttcttacagatgtcaaaagcagtctagtttatataagcattctgttacctgtgatattttttagactgaactgctccattcctagtcttaattaccatattcagggtacgaactggagggcttgtgtgttagcttctgaattggcaattggaggcggtagtggtcgtgcctgtgtgtatcagaagggataggtatcttgcctcctttctctcaggcagtgcaaatcaccctgtggaaaaccgatggacaggaaggagtgttacacactgcttaccctgatttattcagtggttttgttttcattctggaaccatactatcaaatggcgacagactgttccgttccacccccgtgaagtaatcatgcaccgtgtgaatagtatcaagcaggattgctttcattgtatggagcatgaccagcgtgtgactcattctgacatttcagatcctaagaattctaagaacactactagaagcatttgttccctcctagtcaatgcttcatactttttcttgggattcttttagcccttgacattcttgtcccccaaacctgtaagtaggtgaattcctaagataagtgtgtattttcattccaggtgaaaagcaggatgtaccgagcactttattcagtgcatagctttaagccagtgttggattcactaagtggacagccagtctcccagctctctgccttccccaaaagggtcgtagtaggtcacccttctacagcagctaactagagtcctaactaatgggatccagcagggccatttctccagagggccagtatcctattaggagactcttggaattcttaggttctactcaagagtggaaggaccaatcacctctgatattctgtggaaggttttggggtcaaattctgccctctgcattctgtgcaacttgtataaaagtcaagttagtattacatgaatttggggtagggttagtgctttgaaaaaatgttgaaccggctgggcgcggtggctcacgtctgtaatcccagcactttgggaggccgaggcgggtggatcatgaggtcaggagttcgagaccagcctggccaacatagtgaaaccccatctctgctaaagatataaaaaattagcccggcgtggtggtgcacgcctgtaatcccagctactcgggaggctgaggcaggagaattgcttcaacctgggaggtggaggctgcagtgagccgagatcgcaccactgcgttccagcctgagcgacagggcaagactcagtctcaaaaaaaaaaaaaagg

SEQ ID NO: 7034 - DNA, 1540 bp, Homo sapiens
taaaggcgcccactggaccctcccaacgcccaatgctttgcttttctcctcctccccttcccagttaccaaagactcgaacttccagacagggacccagggacaccccgaagcccacctgcaatctcccacctcctgcccatccctctcttgagggagcagcaggggccaggagctaccccaggagtgggccaggccgggccacagcaataggaaagccagggccagagcgagccatgccagccctactgccgatgccaaatatttgagagaagggaacttttgctgaggttttctctgaggtttttttgatgctttataggaaactattttttaaaaaaagccatttcccacccaaggacacagtggatgtgttttccctgactccagcagggcaaggaatgtagccgagaggttgtgtgggctgggctctggtgccctcttccctggccaggacacctctcctcctgattcccttggcaccttgtctttctgtctgtttacctgtctccctgcctgcccatctgcatcttttgcagcccactctgacttccatctgggggctgagaccacccttgcctgcccccttctttctgccttaagaatgtccttttaggctgggcatggtggctcacgcctgtaaccccagcactttgggaggcggagacgggcagataacctgaggtcaggatttcgagaccaacctgacctacatggagaaactccgcctctagtaaaaatacaaaattagccgggcatggtggtgcacgcctctaatcccagctactcgggaggctgaggcaggagaatcacttgaacccgggaagtggaggttgcagtgagccaagagtacaccactgcactccagcctgggcaacagagcgagactccgtcttaaaaaaaaaaaaaaagaacgcccttttactgtcctcatcatcccagtttgaggcagtgctggagtggggaaggccgtcttagaccatagaggttggaagacgctgagagatcatccagcccagccccttgatgttacagagcagaagacagatgcccaaacaggagaaggcacttgcccacggtcatacggcaggttgccacaaaaccaagatggcagcccttcctcagcgtgcctcactgccactcccagagccagggagccccataaaacccacatcatgtcttaagagtatatctggctccttgaccagcaatcggccctgggagccaccaggtgggaaaagcgcctctgccagagtccaggccttgggatgacagacagcttgcccgcacactcgggccccactcaaggatgtagggccttttctggcccctgacccctccctggcatgggagcgtggggacggggctggccttgggaggagcggcaggggcatcacctccttctgctgcttctccctgctcctaccctcaagggcctgggggctgcccagctgcctctatgcccttctgggggtctcagcccactgctgacacttctgcaatccagagaaacactaaataaagcaatacgtgtttgccaa

SEQ ID NO: 7035 - DNA, 1245 bp, Homo sapiens
gccaggatgggagtgaatcccaggcggaggccagagctggcagccagctctgcctttccactgccgggagtgctgggggcccagcctggccccctgaagagacagccaagtgtcgtccacatactcctcccagagtgagctctaaccaggctcatttgctctctccactactcatctctggaattagccgcttaaatacaggtttttgttgctgagatgtgagtgaaaccagctagtgtgtcaacagtgaagacctggggacagttctgcgtctcatttctggattcctaccccctcttctagtcttgcccaagtagtcctgccaggcacatgccccatttggcacaggcctgcattcttgtcgtgccgtcctgggcctcaggctgtctgggaggggagatgctcacatttgtacaggctacatagactggtgcaagcagtgctggattccaggagtcttggcatctcatagcttgtccccgtgaggagtgagcagagggtctgggatttctgctttcagcaaaagcagtctgactcagtgggcagaatggaggggcccctctagccaggctcttacgccatggttatgagcaggttgatgagggtccttcggccagcacaaccttcctccctactcacggcatggagtctgactgcatggaagttccagatcctgacagagagaactgggaaggatccaggttcgcttccgttggtagcttgagtcccatgcctccaccctgccatctgaggaaggggtgacaagtggtcaaggagctgtggccacagacttttccagggtggtccttggcaggtgaggtgcgtctgtgccacccttgtcaggagccattgacgacgggccccccctggaccccccgggacctcagagtgggggcaggcagaagggagaaccagctcaagacattttggaggatctggccctggggttcttcagagaacaccctctaggggctttggggacatggcctgtccccacatccagcacttgcctccgccatggtcactcggcagcccttttcccaggagaagacacctctgggagcctgctcagtgcttgtcctgccatcctgtgtcctgggactgagggttactccagttgctctgtgttgcatactctcccccgcaagcctgtgtatgaagaattgtcccctggcttccagcaggccatggctggctgttttgtgactgttacattgtgcaggggtaattattagcgtggctttt

SEQ ID NO: 7036 - DNA, 2548 bp, Homo sapiens
ttttgcaagacagtggtcaacaggaagacccagcagctccaccctcccaagtgacaggccattttcggacgcagccgttctgtgcccattcttcaggcaactttcgattccttactgtagctaattctagatgcccttcagtattgtgaacaaatagaccgtctggtgtcacagagcccgcgtgtgcaggagcctgctcctccgagatacgtggcgtgtaggttgctgtagttacagcgcctccgtctctctccattgtgttccgatccatttctgtgtgttcccccaacctttatttccaagtgacattttcagtctttcaaatagctgccttttgtgatgtggtgatttaaatgatttaagttcatttgttctcaaccttggggtaaactgaggtattttgcttcctgggaagatcttcgcaattttgagtgctcctgtggggagcggggatgagctaaagatacaatgtttccctgccccgcaccgcttccacaaaatagcaatgtggttttgcagctctgacttctgctcccagtaacccatcgttagggcactctagcactatggaggtacccaaggctcagccagtctctatttaagaaaatttaacaaatacgagtaaccctgtcccaatcactgaatctctagttactactcttagaaacacctgtggcttcttggccctcctgttgcccgctctgaatctctctgcagtctacaaaatcgccccagtcaactctccacttggagggaattgtccagtgtggcccctagaattgagtcaccccctagataccaactgtctgaccccgaggagctctgtaagtccctgctcctcctcttccctttggggctggtgctgccactcagcaataatcctcttttctctgtgctttcttaggtccctgtcctctgtctttgaggctggttaggaagcaagagtcctgatctttcatgctgcacaatatgagcatgcaaaaagctttttccagcagaacatgttccctcgtctccagttgccggaaaggaatttggggatcaagaacttagctcgtcctacccccatgttgagttctgccctggaaaacccaaagcaagtagtgatcatagtacagaacccgaccaaagtaggctggtgaggaagtccaggctccaggggaacagacgctgcccagtgttcatagcttcctgcaacttgacagagcctgagtttgcctcttagtgggagaatgagagagagctgtagtgtcacctgacattccccaaaccttgtgaagcacgttggcctaagtgtgccgtgatcccagcccacactagcctgggtgcatctgctaatgggagaccaaatctttgtccgggaagcaagaagtgggtgggagaatgtatcctgtttttgtcagtttgtttgccttactcatttctaagtgcaataagggagtgtctcacaggattgcacctgtgacatcctgatggatgcttccctgtggccctcctggggcaagggtggacagactcagacccccagcatggttagcgctgaccttcattgaggtccctttggaaccagatgtcttgttacagacaccttcctctgtgtaagtctcctcaccttgaggggtctttagtaatgcatctgggtagcatctcaactgctggtagcatttatctgacttggaaagttggagaagaggcattcctactggagaaaaatgtcagtgttttcctataagctctgtgttagctattcattatatttgtgcttaaagatgttccttcattcatcaactaggggaagtccagatgcgggttatcttgaaagaaacaaactgacattctaggcagacagttgtctatgtggtctgagggtcagcagctgttagtctccttcctttggctcttgagacccacacatatcactttagccctaacaagggctcctcccacctccacctgttgccccagttgaaaagcatccattatgagctgaggtcagcctggatctggaattgcagcccacataaacataaaggaggatgtccctggtctgttccatccccacggatggtgttgctgctgggcaacagtgttggcttcttttaagtaccccctttcctcctcacccacctccaaactgactagcactcagagggacttatgataaaggttcagctccaggggtagtacctgagtgtgtgccatgccccttcagaccagctgcttccatcagaattccagggtcacagccccaacagaagcagcagtgcctctgtaggaggggtgctgggctctggccttctcatgcagagaggtccgggacagggtcagtatcgtgggcatgtgtatagcttcccaagttcttttacagtccctgctgggactccctgacttactttggttggttcctagtgctacttgttttacaaactacactttgtagaattgattagattaccttgtttatttaatgtgagtttgtgcctttttgtctcaatcttccaatacaggtatattgagaaaaaaagcagtctaataaaatcctagacag

SEQ ID NO: 7037 - DNA, 1202 bp, Homo sapiens
tggctgccgcctcggaactgcggtctcctgcctgtgcttcagtgactgacccctgtcctgcccctccagagtaccccacgcacccccaggaccttcgccgtctccgtgccagcgttcacgctccctcccggggccctgcctcggagctctgtggtggaaggacgggagagggccccggacacgcgcgttttctcctgccgaacgcaggggctgccctgactttgctctgccgccccccggggacccggggcctggggtctctgtggtgcctgcagcaggagccaggaacgcccggcaggcaggcgctctcccgccagtgtctggattctgcctcttgccaaagcagagggggctgccatcccctgcctgccacctgcccctcggctgcatgcccacagccgtacctgcctgaggacaaaggcttgcactgtctcgcccgcgcctggcccccaccccctccccggccagcctgaggctgcctgaggaaggaaggacccgcttcctgttgtcggtgctaattcctttgtaattccagccccctgtcgcctgtccagggcctgcccacccgttggaggccggtggagaagccccacctggcttatgccctggagagggtttagcgggctgggtggacccctcgcctcctccccgagggccaatgccgcggacacgttttcactgtcaccctcgttctgtctgccacctgaagggaatttgaggaccgccgccagggcaccccgtacatacacacagctgcttttgtggaggtggacgaaaggctgtggccggcagacgtggaggtccaggccggggtggggacgtgggtgggtccgaggtgtgtgtggggtcggggtgggctctaggagttagcccttatccccactgaccaggcgggagccgccaggcctgcagctgggccagtgcccaggagccatcctggcgtggggccaggagcttgtccaaggccacaggcccacagcaccccctgccggcgggctccgtggggccctggagctgatgacgggggaggcccgtccgcctggcccaccaacccgcccaccttgactgcccccagaagtgtgtcttgagacctcctgggcgtgcttagaggggtgagttgtgtttggatttttagttattttctcttcagttttattagacttcttttttataaagcaataaatccattttcctccgggtaa

SEQ ID NO: 7038 - DNA, 1760 bp, Homo sapiens
ggatggtccctgtggcccaggcagggtcgtcagaggccagcctggctgcaggtgctttcccgccccctgaggacgcctccacgccattcgccatcccgcgcacctccagcctagctcgggccaagcggccatcggtctccttcgcggaaggtaccaagtttgcaccacagagtcgccgaagctcaggggagctctccagcccgctccgaaagcccaagaggctctcccggggggcgcagtcgggtcctgagggccgggaagccgaagagtccacaggcccagaggaagcagaagcccccgagtcctttccggcggctgccagtcccggggattcagccactggccaccggcggcccccacttggtggccggacagtggctgagcacgtggaagccattgagggcagcgtccaggagagctcgggccctgtgaccacgatctacatgctggcagggaagccccgcggatccgaaggccctgtccgctctgtcttccgccattttggtagcttccagaaaggccaggcggaagccaaggtcaagagggccatccctaagcctccgcgccaggccctgaatcggaaaaagggcagccctggccttgcctctggctctgtcggccagagccccaactcagccccaaaagctgggcttcctggggccacagggcctatggcagtcagaccagaggaagcggtccgggggctgggggctggcaccgagagttcaaggagagcccaggagccagtctctggctgtggctccccagaacaggatccccagaagcaggctgaagaggaaaggcaggaggaacctgagtatgagaatgttgtacccatctccaggccaccagaaccctgatgaccttgaatttggggagtggggagagtggatggactagactgtgctgtgtgctggaaaatgatcccggggccaggacagacaaaccagagcctctgcgcctccacagggaaaaggcaaggcttccaggccagttggcccaggcccctggcagtgctcccggaggggcccaggaaggcctgggcagagaccctgtaggatggggtcaggaagggttgcctgcagggacttttgctctgctgtcctggaccctgtgtgcctcataagggctattctttctttcacgtgcaaaacatttttctgaaatagcaaacaacctacatgtttgctgataaaagattggctaaacaaatttttttttttttttttgagacagaatctccctctgtcccccaggctggagtgcagtggtgcgatctcggctcactgcaagctctgcctcccgggttcacgcccttctcctgcctcagcctcccgagtagctgggactacaggtgccctccaccacgcttggctaatttttttgtatatttaatagagacagggtttcaccatgttagccaggatggtctcgatctcctgacctcgtgatccacctgcctcggcctcccaaagtgctgggatgacaggcatgagccaccacgcctggtctatgaactttttaaaaaggatgtatgtgtataaaaacagattcaagggaaaggcactaaatggttttttcctctggaagatgagattgtaggtgatatttattttcttctgaaacttttgtatagtttgcaaattttctacagtgaacattcttttttacttttgttactagattgaatttgataaagtataataaaaagcaatgatctttgttaaaaaaataaaaagtactaacattacagacatgta

SEQ ID NO: 7039 - DNA, 289 bp, Homo sapiens
cttaggggtctggctgtggaaggatgtgtggcctcaaatgaggacagggctcccgccttcacagccctcgccaggggtctgccccaatcctggcctgcatcagggcaggacggggtctcagcccgcctccctctctacgtctctgtaccgagcctctggggccagatataagagtgcctctctgagtctcagtttccccatccatgaaatgagagctgactgcctagctcccagggctttgtgcagacggcctgagctcatgtaataaagaactgcccgtaatacacag

SEQ ID NO: 7040 - DNA, 172 bp, Homo sapiens
ccgtttccctgcctcctgcttcagcctcccgaggccgaagcctcagcccctccagacaggccgctgacattcagcagtttggcctctttccctctgtctgtgcttgtgttgttgacctcctgatggcttgtcatcctgaataaaatataataataaattttgtataaatagg

SEQ ID NO: 7041 - DNA, 860 bp, Homo sapiens
tgcggtgccctgtggcttcaccgccctacttccacctccgcccagcctgtaatgtttatataagcagcctcaaggaccaagaaccatctgcgaaaggacacacacaggaaattcataaaagaaatctgaatggataaaaccatgaaaaaaagtatgcttcattagtaattaaagaaaggcaaatagagctggaagcatttttcccttagcaaaccataacagaaaaaaataagacccaatattggcaaagagactactgaaaaaacattcccatacattgcgtgtgggagtatacatcggtgcaggcttcctggatgacagttgggtgatatgtgtcatgtggcctaaaagcctccatgtcatttgacctacgaattctatctttgggaatttatcctaagaaaatacttaaggatttagttagtgataagatgttcatcccagcattgcaatggagaaaaatgggaagcaatggtttggttgggaatttattccttttctgctgtaacgaaagtttgcaataggggattgcttaagtaaattattgtatctccatccagatggtggagtaccgcgcagacattaaaagtcatgtaaaagaacatctgactgaaagaaaaatgctccttgaatattaaaaggttgtaaaaatagtgcatgttatgtgatttcaattttgttttttaaaatatgggtgtatgcttgtatacgtagagcagataaaaaagacggaaggcatactaaaaaatgttgagtggttatctttgtatggtggaacaaagtcactgtaattttcatctttggtttttctgtaatttccaaattttccacattttgtatttcatataatataatttaag

SEQ ID NO: 7042 - DNA, 1734 bp, Homo sapiens
ggttccaggaggattttgacccacagaaaaggagcccatggaacacaagttaaagaggttttgctggccaggtatggtggctcacgcctgtaatcccagcactttgggaggctaaggtgggcggatcacctgatgtcaggagttcaagaccagcctggccaacatggtgaaaccccatctttactaaaaatacaaaaaactagccaggcgtggtggtgggcacctgtaatcccagctacttgggaggctgaggcaggagaatctcttgaacccaggaggcggaggttgcagtgagccgagatcgctccactgcactccagcccaggtgacagtgtgagactccatctcaaaaaaaaaaataagaggccgggtgcggtggctcaagcctgtaatcccagcactttgggaggccgaggcaggcagatcacgaggtcaggagatccagaccatcctggctaacacggtgaaaccccgtctctactaaaaatacaaaaaaattagtcgggcgtggtggcggacgcctgtattcacagctactcgggaggttgaggcaggagaatggggtgaacccgggaggaagagcttgcagtgagccgagatcgcgccactgcactccagcctgggtgacagagccagactccatctcaaagaaaaaaaaaaaatattaagaggttctgctgccagatgtgggttctgtgggtcgggtgtgggttctgtgggtcgggtgtgggttctgcagaccaggtgcggattctgtgtaggttctgcaggcccagtgtagaggctcacacctgtaatcccagtactttgagacgctgaggtgggaggatcacttgagcccaggagttcaaaaccagcctgggcaatatagtgagaccgtatcactacaaaaaagtttttttagttcaccgagcatggtggcacatgcctgtagtcccacctactcgagaagctgagatagggtcacctgagcctggtaggctgaggctgcagtgagccaagatcgcactactgcactccagcctgggtgacagagtaagaccctgtctcaacaaaaaaataacaggttctgttgctgctgagctttcgtcaggaagataagactttcccaacagtccgaagcctaggatatgagggctgaggaggactcaaaccgttgcagtcagagagacacctattttggtgaatattttttgaaatagttaagtggcctccagtacaaactcccagttcccagaaaagacttaaaactagtatctggagattccaagtcctttaaaaggattttagctgatctgcaggcatctggatgttagcctggggttttggctggattccacctcgctcagtgatgatagtctgtttccctggaacattcctgtggttttagtagtaatgagatgtgtgcaccactccagtgggaactgaagctcttagtagttacattgtaattaaaaaagaattataaaacaagaaatcagcaagcctgcttacctccagagacacaccgttccacttacagtatctagcttcctcgactcctttgttaaaatcgtggagtatgaaccgtgaccagagaagtaaatatggagccgttttattgagcagtttcctccagggatgacggctgtcagtgtgtttcctgccagttttccagtccttactctctgcccttcattctgtactcttggcagagtcagtaaccaaccactaataaaatcaaagttgtagtaa

SEQ ID NO: 7043 - DNA, 1817 bp, Homo sapiens
ggacccagggcgtcagcacccagcactgccacatgtccaccaaggaacagaatttattttcttctttttttaacaagtggaagatctgctgggtttcaggaaaaggctggtagagccttcggctgctgtctggacgtctggaccctgccatgtggattataaacccaaagtgtacagccctaggcgggagggggtggcgcttctcagccggctgtcccagccagccccgcagagcgcccacggacagtgtccactctggcaaggtgggaaaaggcactccaagtgcatcctccactggcaacagtgggacaattgcccccgacggcggcaccggggctctgtggaatcccgatcgttccgagaggtctggagggccccgtggttcctggagaaagcaggacgcagagaagaacaaatgaggctcacccacgaggctgggtggccagcagtctgggcacacacgagcaggtggcatcttggctcttgcctgaggccagtcaccctgccctgaattctatcctactccaccttcagcccctccctcgggggtagcgcctctcattcctgatgtctcaggcaaccctggcagacccaggtccaactgctggggtccaagaaccaattaccaaaggaaagatcatcagaggctgaaatctagaacttcatcccgggcaatgaggttctcacagaaggtgcagttttataactaactacgtccacttatatatattcacactctacatatatatatatatatatatatatatatatatatatatatatacacaaatgcacagtccccctcccactccgttacctaactgtacgtcttttcatgtttataaactatacagaaaactgtatttgctgaactaaggattgtattggtgatttctagcaaaaacaaagtgatagaatttttgtctagaatcccaaactggcaacgatagtctccaagggacctggccttgccaagggcctggggcaaggtgtcggcgggacggtgaggaagggggaggcagcaagagtcactttgggggaccaatattcttagatatttagagcatcaccttgtttttatatgcaacacaagcctgtctgccaccctggagcgccctgtcacccctgctgtcgtagctgttggcttcagggtgagaagtgagaagcagcttattgtatatgagggagccaggccccgagggtgagcgagatggagaaggggaaggaaggggctttgggatctggaaaccagcaggccaggcagcatccacagtgttagtccaaagggtcggaccgtgtcgtcagcctagcgtttggtcagtgacggcctggacgggccaaggagactccgggcttgagcccaggcctcccgcacggctcagctgctgaatttttccttgaggctgtttggtgtgtgacccagcaagggccctgtgtgggacagcaggagggaggcgtcgggggccttagcagaaggggaacaatgagggcatttcatgaaccatctcaggcacttctgcatcacggaagacctggccctcccagccgtcctggggatgctcagggtgcaggcagaggctcgggaggccggactcaggggtcagaagcagggactggggcaggcgagcccggacagggaagaggggctccgatcaaagccggccgtgctgctggccgggggcccaggtgggtacaagctcctttgtgctttgcacaaacctgaatcccccaccagagaggatgtgtgtgaggagccagaaacgctgaatccaattaagagagaaaaataataataacaataaatgatcttggacaag

SEQ ID NO: 7044 - DNA, 1653 bp, Homo sapiens
gggagccacactggggccccccccccgtggaaccgttcctgaaaggccaccaggcgcccagtgtagcacggaagatgcccacgtgcctgagccaccaatccacccagacaataaaccatcctcttccaacccacgccacggccatgctgtgggggacctgctcctcacagagcccctcccaaggatcgggcggaagctgctgggaccctcctgggctgccaggatttagcagggaggtggctggctacagcaacagcagctgggcaagccagataggccgcccatgctctcagcctttctccctcccccgtctcattccaaggctgagggagggccttctcgcctggggacgcagccactttctccagtggagacagggcaggggttctgagtttccgtcagatgcagtgaaatcacagttccctttcatcttcagaacctctgtcgtgaatgtgttcaagaggctttggttaagtcaggaagaagtgcccagggtgtgtgtccccagtctccctgaggcctggactcgcccatgaacccaagtcggcttctagacagcatgtccctaacagcagccctgggcccccacctcttctaccatccaccccagacttaccacacacccttcctgctgctcctcttcctgcccttatcaacctgggtccctcacacttcgccagttgcgtccccgtggacagtcatgagtctagaggaaaggggcatctggtctcaggcccgtgctctcgggtggcctccacctgctccctctctcctcactggcctttctttccgtctagcttcctcttcaggaaatgtcctgactcccctcagctcccccttcacccctccttgcccgcctaccctccctccagaatagcccctcacccttcttccccttctagttgatccttttcacctccctgatccccttcatttcttcaccgcggttcctcgtcataggggttctcactctgaactttccctctctactacccatggcaggaacctagtacaggtctcccacccagggccttccaccctcggctcctgtgctgggagaaacttccaggcgtggacagcccagcctgaggcattccagtgctggggcaccgtcgcctaacctggtttctagctttgccctcactccccggaaaaactgacactgacacaggggccctttccttgcccctttagctggtacctcagtggggaggcttccttaccaagaatgagttcctgaaacccagggccagagacaaggacaacttaggggaagacggggttttcggtggagccaggggcaaatcttaatgggaccagtgggggataccccagagcccatggcctgactgcacagcctgcctggaggatgggtgcgcagctctgccctccctgaggcccaggactatgccagaagcgatggggtaccgtgtaggggagccaaggccagtagtttgggggtaggagtcccctagagtctcagaagactgggctctttggagtacagggtccccggcctctcctttaagattctctccccagctggaaggccgatgactgggtggtcgggagggagacccagctctcctttctgtcccgtttgcagcactggttttgtttccttaataaatttttagttatgaaacatacctg

SEQ ID NO: 7045 - DNA, 1498 bp, Homo sapiens
tggattcaaagagattctgtcttaccggtgccagtcagtactccagggatgggaggcacaagttgtgattgggcaaagtttattttctatgtcagcctgtcagtccactgccccattttgcaagacttttttttagccttgacaaaatgtctcagttaagtataaaagtttttccactacttagtccaaaaaaaactattaaatcttaatgaaatagccactctccattaagaatctgataactaagagttgacaatactaggaaacaaaatgtcttcagtatctaaagacactgaattcccaccatttccttttctgtaaattaaacagaaacagactgataagaagctggcctttcagcctgcttcacccaagttatggaggaggttaagtctacatttccaccactgagcacaatacaaatgttctttacttctggggaaacagtttgaaaatgttgagacagcacagcagccactccaacaccagctgtaggttcaatgagtagtttcatcctctcccacaccagctgggttgcacactgttgatatggaagggagtaggaattagtgaaaggggagtctagttggtttacctataaagttcagatgagaatacgtgtccagtttgaattttcttatcactgtgtacacacgcttcccaaagcttttctttaattctgactctgcttctgtcaagagggttgtcattaatacatctagggtaccctcccatgtcatgaagttacctagtcaggttcccgtgggtcacttgctactcctaagggaagtttcttctgcctaagaagttacaccatgctttgctatttcttttcttgctggagcctcaccttaatttcatcctctgtgacagtgaagatatcatccacaaggtccctgataataggccaggtgttcaagccaatgctggatttgacaccatctgctatggtttctggaggataaagattgggcatcagtttccccttcagcttggactggtagcagtcatctgcatttgagggttcagcagcatataccttcacactaggtttcagagcctgggaagaggaatattaagacatcttaacaacaaaccacaacattgcctgcatgtctaaaagaaaatatgggcctggtgtggtggctcacacctgtaatcccaacactttgggagcccgaggcgggtggatcagctgaggtcaggagttcaagaccagcctggccaacctggtgaaatgcagtgtcaactaaaaataggaaaatcagccaggcgtggtggcagacccctgtaatcccagctactcaagaggctgaggtaggagaatcacttgaacttgggaggggtaggttgcagtgagctgagatcacaccaaaatggggtggggcgcagtggctcacgcctgtaatcccagcactttgggaggccgaggtgggcggatcacgaggtagggagatcaagaccatcctggctaacacggtgaaaccccgtctctact

SEQ ID NO: 7046 - DNA, 2840 bp, Homo sapiens
ggacgaggccactcagaggcccccagtggggacagggagggggacctgtcccccactctctcacccaccagctccacacattccagccaggcccaggccagcccccccacccacccccaggcctcctaggggaagggggtgcaaagactctgagccaagggagggaagggccaccctgctgcactaggacttggtaagatgactctgagaaaatgcgagactctgatggaatgtgccacctgtccggcccagtgccagctccagtgccgctcctgcttcccctccctaccctcggaaatcagtgcgatgtggacgtcacgctccctgacttctcccccgccctgccccgccttcgtgtgctgctgctgctattgctgtctggtgaggtggcccaggcccccggctttcctccggagcctcatgttctcttcccaggcctttggaggggaaatggggaaagcagaactgaagccacttggcccagaaagctgcggattggggtgataaggggccttgctctgagcacaggtgacagatcataggaagtggctggtctggagtcccacccggacaggtggggcctcagcctggggctctctgacccggttgcagtcactgtgattcgttaccgtagatactacttaaaatgattctctaccaacaataaaccaaacccagccactgccaagcttcctgtgccctcaccccaatccctgccactgggctctggacctcaggagggcaggctgaggtggggaaggagggacttggctgtccttccccttccccgtcccctgcagcctgggtctggatgggaggagagccactgggcccctgtccccagtccccagtccccagccctgggcttggctcttggcttccagaaggcagcaaagaggggcgctgtcctgcgttcagcccctgatctctgacctctgctgagtgctgggcactgctccaagggacaggtgggcctggcggcctgtgggtttgggtgcctcctgcagtttgggagacatggaccagcatctggtcttgtttccaggagcatagaagccacatcgttgagacatcaggaaggtaaaaacccagcggcttagccaagccctaagcctgtccccagaccaaccctgggacctatacagaacagagggccagagctagggctgctgcttctgctccagcccctttgcctctgtcctcccatcccctcaacaccctgcttctcccggggacgcttttgagtgggccctgcccggggagctgcagagcagcagcacctttctctgagaagaggtccttggttgggtcaaggacagggctgagcgtggaagggggaggagtcaggggctctgtgttaggatgcggctttctctgcctctgggcagcctgctttggcctttccttgtatgtgggtgtttattacaagtggctttgtgtcagacacgctcggctccccacctggacacacactcaccagtggcctttcagtgtagcgggaggaagccggtgtccctggatgtgaagctcacactgatgggctggggcaggggcctgggccggcgagggggccggggggaggggacagagctgaggatttcctggagtgccctgcaggcacagaggaggtcagcaaaggtcttgaatagattttctctggaaataaagaatccttagatgcctaaaaattcccttcctgttccctcctggtcctggacacctcccaggggactgttccttatttctctctcctggtgtgggtaaagggacagttacaaaccaggtcaccatcctcagaggctgagccctgtacccaccccagcacagccacctccgccagaccccgtggctctgggagagccagctttgctattcccattgtgacagcgatggcaggcctgacccacggggcagttagagcagcctcgtggagctcgcccctcccctcagcctgcccacctctccctgcatcctgaggccagtggcccccgggcctgcacagatacctcatcatccacccgctgcccctccccgtccctgtcccccagcatcgggggcctgcaaatctagtgccgaatgactatgtccagattggtgacgatgggtgttgctgtttttcttgtcgtttgtgaacgctgtgatgctgtgtgcccaagtgggcagtcaccacccagcccttccttgggcgtctcccccagagtgctgtcgggaccacatctgtcctcaccctgtgggaccgcctggccctccctccctagcccttccagcctgggacacacacacacacacacacacacacacacgcacgcacacgcacacatcttacctctcatgcgtgttttaccttttgatgttcagagtggctcactggctgggagtccttacctcggggagagggggaggttggttccttggggggccaaagaaggcagggaatgcctggagggtaactggggggccaccatgaccccttctctctccagaaacagctgcttctccccccatcccagggtcccacccccaacccccagaggtggcccttgtttacagtgaggactcggccactgtgtctctgtttcctgaaatataaactgtagcgaccccagactgtagagatttttatgtgtttggatacatctgctgtgtggaaaaaaaaaaaaactacaaaaaccctaattttgtacatactgtatttttactattgaactgtattctagtggctgttcatgctccaagactttagttaccgagacatgaatactatccatgtaataagcacttgcctggaataaaatataaaactgaaataaacctgcactgaaacctgagatggagctgcc

SEQ ID NO: 7047 - DNA, 23 bp, Homo sapiens
aaatctgcccctttctcccgtca

SEQ ID NO: 7048 - DNA, 3916 bp, Homo sapiens
aaacctcctgcacagttggaaacgtgttgatagtaacttgctttggagtggcctgtggggtggcaagaggaatcctaccagcggcccattagtagcacgatgtggaattatcttcgaaaacaaaaacctatgaatctgtcccccacctccccccgcctccttcccgctttttgagttacagggagtcgtagtgtggtcatttacaaggaggaattgtggtcatcagtaacaacagaaagccctcagtaaactcccgagggattgcaagctggctcaagctggcccctcagctctggactgcctctgcaaggtcagaagggttgtttgtggagtctgggctgggcagcactgcctagaatatcatgctgtctctgtcacccaagggtgtttcttgaggaggggtggctctctctgcctccagctggaggccctggtaccctgttctaggtcactcttcaagatggggcctaccttgcatcaatcccacaaagggagctgtatggtgggtggtggggaatctgggagagaaaccttagtaatgctgggaaggagcagcagagtctggggaccacccggtaaatggcacattcctgacacctggctgttttgatgttgcttatttcagaagcagaattaggtaagcaaaactccccggtgtgactgaggcacacagaaggcacccatacccccacctccagcctgttgacagtaccattttgtagcagttttactactgtgtgatttttgtttggacatctgaagtagagcttgttttgtttttaaataagaatattcacaaattaaaaaccagcggtcctatttgaatcctggggttagctgagtgagcggctgatgatagaaatgagaaatagaacaaaatagtatgtgccgtaggtagcttaagaaagtctcagatattttgttgctgatcaaatactgtttttttgtggcttcacttgtaatcccccctgtacttacctactcacattggagagttctgaggccggagtaactgtgtccttgaaacacgtttctaattggaatgccagggttcagtagccgtccccccggaaaggggtgaccttttgctgtgcttgatgttgcatcagcagcctagggttctgtttagactaaaatcttggccagagctccttgccatctgctaagaagactggggctgagtagttaagccagccttctgagaggtggctgttggtcaggacgggaagctggtgaccttggcatgtcttggcagcagctagatcaggccctcggcagagacacaggaagcggaactgctgtgccttaacttggctgtggagctggagctggagaaggcagcatactgaccagtggctttttgattgattgtttgttatgaggtggagttttactcttgttgtctaggctggagtgccgtggtgcgatcttagctcactgcaacccccgcctcccgggttcaagcgattctcctgcctcagcctcccaagtagctgggattacaggcacgcgccaccacgcctggctaattttgtgtttttggtagagatgggatttcaccatgttggccaggctaatctcgaactcatgatctcgggtgatccgcccaccttggcctcccaaagtgctgggattacagccgtgagccactactcccagcctctgaccagtgttcttaacctggtccgtggacctccagagagtccatgtacctcctagagttacttctaaaagctctgtgagcatgtgtgtgtgtgtgtgtgtgtgtgtgtattttttttcctggagagagggttcccagaaccctcagacacagacaaaggggtcaataacccactaaggattaagaatcattattctagtccaagcattcatgtgtcaggctgcaaaaaacaatacccagggtcacacagagccaagactcaattcaggaccgtggattcccctggtctagaaattttctgctgtgccagcccacaccaccccactgtccttacctcgagtgaatattacatttgagtcatttgctgggcccaaacctagtttccttggtataattttaggataattgtttaagtggcaactattcattcagtaagtagtaagtacttattgtttgcttgtttcattatgaaagagtggcacatgctcattaaagatttggaaaaatgaaagtcaaaacaacaaaatcaccccgagtcccaaccttctgtaacataaccactcttggcattggcgtgttcctttctagtctctctgtagacggggtgtgtgagtgtgtgggtttaactttggttgtcctcatgctgcgtattcagttttgtattctggtcctttgttcatttaacatcttacaagtatttgtccatgttgtaacagtagtgtattagcttacactccttgcctgttcaaaatgtctttcaggcacagcactggcctttaagcctgtgtcgtagggatttccagagaatgctctgtgtattgaagcacagaaggtgtttctgtgtctcagtgtgtttctgtccctaggtttaaggcttcatgtcatggaggagattttatagatgtcaagctaatgaccttagagttttaaaaaatccgtgaccgtggccaggcgcagtggctcacgcctgtaatcccagcactgtgaggctgagatgggcgcatcgcatgaggtcgggagtttgagaccagcctggccaacatggcgaaaccccgtctctactcaaaatacaaaaattagccgggcatgatagcacgtgcctgtaatcccagctactcgggaggctgaggcaggagactcgcttgaacctgggaggtggaggttgcagtgagccgagaatgccactgcactacagcctgggcgacaaagtgggactgtctcaaaaaaaaaaaaaaaaaaaaaaaaaaaggaacccatgagcaggccagctttcagtctggagccgagtgccttctgtgcatttggatgtttccatttccttccctgagaagattttcttaggctacctagtgagagaacattgaaaatatttttaaaggacatctaagcattgttttggtcatgcatatgctttataattgtgtgttgtttcatagcatatacctctggtacaggtgggcaagtttttctttgaagaaatgggttattgactcatatgtcataaccttgagtgttactctcccggtgtccagaggtcacattcatgttgcggggttggtatgaaattaaatcttggtgatgtgaccctacattctcttctggtccctagaatcggcttctggtctcctgataactgaagtggagacagaagttgagcctgttgcccaggcaaactaaagctgcttttgttcttcggaatctgctttgcctccgtcagcctgcttccttccccacacatgctggccgcactgtccccactccagacctctgctgtgtgtcctgggcagggccgcgttttggcagtaccctttcaactcatcctaagcttcgtgtagattactttagtatatattttttataaaacataaagcctttcctctcgatggaaatcaaagcttaccatgtgagcactcgaacttctaagttgtgacaggaataacaaaactgcaaggagtggaaaagatggaaaagcctgtgggaaatccgaggccttttgaaagaagggagctgatgacttcacgaccagctcctggagcccctcctttctgctgaagccgcggcatttccctccgtggccacacgagggcacccttggcccttttatcaaagcgccttcacttccccgtgggaatggagacaagtctgtccacggtgttttcttgaaatacccagttgctacccagatttgtatttttatgtaaacaaatacattttcacagaaataaaatttgaaaaataaaagtagaaagagaa

SEQ ID NO: 7049 - DNA, 1208 bp, Homo sapiens
agagggagccagacggacagccagccagcggccccgtcaccagggagcccgactgcgggagaagggggcgagcctgcgggcggaagaggaagcaaggccctcttcctccacgtctcaccccaccccacccccgtgtcctcctgggagcctggcctgcctgccccgcagaaggtgtttttgcgctggttcaatgaatagatgatgcagaggccccattggagacacgtgaatggcgtgtgcggccatcagttcccggctggggggcaggtgttgcttcggcccccgccgtccggccggcgtgtgcgagtgcgcccctggctgtgagtgttgaccgttcctctcccctgtacatagcccgagccagtcctgagtgggtgactcctgagtgggtgacgcgcagacgggatttctcaggtcatttgtatggtcgacatgatggctgctgctttggctgccaccacccccgggcccagcctgtctgaaagttcagggtttaggccgaaaaacccggtggggaggggtggggagccggagctctgtggcggggctggagggctggggtgcactttagtttggggcgggacgggagccgccgttgtgactggcgtggtctggctgctgctcccgaacggaggggtcggggttggcttgctgggccctcagagcccagtgggtggctctgactcggctccctactccctgcacccagctgggcgcagccttggggcctgcggtctgaatgtatccctcccctcagttttaacctgagctgccgaacgcacagtgggccgggggcgaggctgggggaagcggggcccaattacggatcccgggagttacaggtgccgacgtgatgtcgcttctctggtgcccagctcccttcctggtctgagactagctctgggggtggcgggggcccccacacgctgctcccgctccaccctgcccgtgctgctgctctgtgcctgctgtcagagccctggtgggggaggatgtggccaccctgagacccggaggagacgggcgtctgcctgggtttgcggagagccgcttatgggtgtggtccgtccagacaccttgtttcaagggggatgggcgtgagcgggcaagcagagcatccccaccgctgagcaagaactttttcttgtttttaaaccatcacgtcctcatttcacattggaataaagtgagtttttgaaacctgcggc

SEQ ID NO: 7050 - DNA, 79 bp, Homo sapiens
gaggtaatggggtccctcctttcctgccttttctggactgaggaaaatttcccatgaagacagtaaccaggaaaaattc

SEQ ID NO: 7051 - DNA, 127 bp, Homo sapiens
gtagtgataaaaggaagtttagcataaattatagcagttttctgttattgcttaatttaccatctccatagttttatagctactattgtatttcacttgttgaattaaagtatttgaattcttttaa

SEQ ID NO: 7052 - DNA, 725 bp, Homo sapiens
aagcggaacccagagctggtgtgcgcgtgcgctgtctggcgctgcaggcggagtcaccgactctgtgcagagaggctttgagggatggtggagtccggctctgctggcctagaagcagagtgcaccctcgtgctcagtgctcagtgggtgtctgaactgaggggcagttgtcaatttgtctgagtgggaaacatcctggattttgttacttggcaaacagctggtgtaaacctacagccagcagcagtctggagcctgggagcctcctgaagtcccgggtgaagcctctggttttaccaattgcaggtcggcttggctgggagagatggatggcgggaaaggggcagcagtcttgaggagcagggagaggagtctttcctcctgccagcttcccccgtcagccccaaccccagcccacacattgtaccatctcttctgctgtgactgggttgcctgaatttgtgggagacccgtgatcccatcccagagtgtgcgggggacggaggtaagctggatatcctgggggaggaggggaatgcgctctggaaacacccttccggaacccttcggggaaaaggagaccatccttggagtgaacgtcccctgacaccccaaggttcaaactgtctcaagctgagagatgtttttagtagcagaattaacacagggttttaacttgcaatacggaaaagacatttcagttgagaatgaaaattactacaatg

SEQ ID NO: 7053 - DNA, 1368 bp, Homo sapiens
ggacgtcacgcagacagcactgtcaacactgggccttaggagaccccgttgccacggggggctgctgagggaacaccagtgctctgtcagcagcctggcctggtctgtgcctgcccagcatgttcccaaatctgtgctggacaagctgtgggaagcgttcttggaagcatggggagtgatgtacatccaaccgtcactgtccccaagtgaatctcctaacagactttcaggtttttactcactttactaaacagtttggatggtcagtctctactgggacatgttaggcccttgttttctttgattttattcttttttttgagacagaatttcactcttctcacccaggctggaatgcagtggcacaattttggctccctgcaacctccgcctcctggattccagcaattctcctgcctcggcttcccaagtagctgggattacaggcacgtgccaccatgtctggctaattttttgtatttttttaatagatatggggtttcgccatgttggccaggctggtctcgaactcctgacctcaggtgatccgcccacctcggcctcccaaagtgctgggattacaggtgtgagcctccacacctggctgttttctttgattttattctttttttttttttctgtgagacagagtttcactcttgttgcccaggctggagtgcagtggtgtgatcttggctcactgcaacttctgcctcccgggttcaagcgattcttctgcttcagtctcccaagtagcttggattacaggtgagcactaccacgcccggctaatttttgtatttttaatagagacggggtttcaccatgttggccaggctggtctcgaactcttgacctcaggtgatctgcccgccttggcctcccaaagtgctgggattacaggtgtgagccgctgcgctcggccttctttgattttatattattaggagcaaaagtaaatgaagcccaggaaaacacctttgggaacaaactcttcctttgatggaaaatgcagaggcccttcctctctgtgccgtgcttgctcctcttacctgcccgggtggtttgggggtgttggtgtttcctccctggagaagatgggggaggctgtcccactcccagctctggcagaatcaagctgttgcagcagtgccttcttcatccttccttacgatcaatcacagtctccagaagatcagctcaattgctgtgcaggttaaaactacagaaccacatcccaaaggtacctggtaagaatgtttgaaagatcttccatttctaggaaccccagtcctgcttctccgcaatggcacatgcttccactccatccatactggcatcctcaaataaacagatatgtatacatat

SEQ ID NO: 7054 - DNA, 2298 bp, Homo sapiens
acagcaaactctttcgccaaacgactgctgtgaattttacctgattaacattcctgacaccatctgtgggtcatcctttccctggaccgttcagtggacagctttcaagcagtgcttgttgtgaggtcccatctcggccaagaacttaccttcagaacatactctaataatgcagccaggagccgtcagccagatcccaaatgagtgccttccgaaattgacccacctgggagctatttacaaatgtccatgtgggagagagagagcatgagagcacagtagcccagcctgctggtcagcaggctcatctgtggttcacctgtagacagagagcagatcaatgtgtacttcagacaccagaaagtctggtggctttggtcccaagtgggaaaagagaactgccccatgcccagcttgtgattatcgtttttggagacctgaagcccacactcgggtcgtatggacttctggaaaagttcttgtctcctggactgaaccatgtgaccggaggcccctttcctagtctcatcctcccctggctgcagatgcttagctgggccagggattgacccaagcgcgatgcagcaggcaggctcagaagacgatgcggggctgtgtgccggccttcttgctgcatgtactcagcctcaggagagcttgctgcacccaggccgcccaggtcttcacagcacaactgcctggaaggcaggttgcgagaaggagaggcggatggcatgagcagcaagggggaccgatgctgtgcagctcacaccactccagaacctgacaaggcaccagcaggaccccttgccaggagcatgtctgtgcagcagtgtttttgcccctgcacattccagaagccctcatgggaagggatgcagccaggcagactcctgccagatggggcaggtagtttattcaaagagaactctgtatcccataggcccaggctctcctttcgcttggcgtgggctttgctggcccagtgtgtgctcctggctcagcagaaacatccatttgagttggcatccctgtagggatcccagagcgttgtaagccttcttgtgattggtagggatggctgtggggtggcttccaggagggggccaccattgccgcatctacttctagactcccaaaggagcccaggctcaggcaggcctggcccagagtcacgctggcaaccacgagtttgggaagcagtcgtattctctctctctctctctctctctctctcagtatccatgacaggtatgaaacatattgtctctttataaatgtcattttacaaattatgtgattatctggaagctctaagatgagagcaaatgcctgatcactctggccaaatgtcagatactaaagcccattcttggccgggcatgttggctcccgcctgtaatcccagcactttgggaagcccaagtgggtgaatcacctgaggtcaggagttcaagaccagcctgaccaacatggggataccccgtctctactaaaaatacaagccgggcgtggtggcgcatgcctgtaatcccagctactcaggaggctgaggcaggaaaatcacttgaactcgggaggcagaggttgcagtgagctgagatcgcgccattgcactccagcctgggtgacagagcaagactctgtctcataaataaatacaaagcccattcttccagagtcttgtgccttaaataaaacacacctctctgctgtgggaagactgtgcaatggcacagccgcagagcttggtttgggaggttgaagtgctctggggagaattcgtagatcatcctcagaaaagccttgccctggtgttctaccagaaaaacgtctcccaatcacccaggaaagctgtccacagtagtccccccttatccacggtgtcactttccatgggttcagttatctgcggtcaaccacggtctgacaatattaaatggaaaattcttcaaacagttcccaagttttcccttgtgcattgttctgagcagtgtgatggagagtctctgccgtgccatctgggatgcaaaccgtccctgtgttccccacgtccaggccgtagatgctccccgccggtcagtcacttagtcgtcagatcgcccgtcctggtatcacagtgcttctgttcaggtcagtctttttttacttcattagggccccaaagcaccagagtagtgatgctggtagtgatgctggctgttcggatatgccaaagagaaaccgtaaggtgcttcctttaagtgaaaagatgggaagaaaacagtcatatgctgaatcttctatctgtgaaattct

SEQ ID NO: 7055 - DNA, 852 bp, Homo sapiens
cagccaccaccatctgcgactcctgcctgccgcctctctgtacagtaacgccacttccacactctgtccccatctggcttctgctgaccgctgggccccagctcagaagggctatagctggtcccagaggcctggcctggccttccttcccttctcccatccctggcctggggcctctgggaccggctttctctcctggacaccgaggattggaaataagggcctggagctgagtagtagccagtctgctgtgaccacaggctcaggtccgaccctgctgcttggccacagcagtggctgggcaagtgggaaccactatctcttgggagcccccaaaagctgggaaatgctggaggaaccaggcctttcccgcttttgcctggctgcagggttcggctctgcccctgccccccagccctcgtgtgtccacaccgcagtgcctctgcccctcgggggactggacacacatcctgccagaggcgctacgaagctttgcccagatgaagccaggtgggctccgcgttcactcccactctcccgaggggtgctggcctccccagggtttgccttcttacggatttagacgaggttcgaggctcacctatcagggcagctctcaggattgtcattttcctctttgcctgtgggtttaacttttgtatttttttaatcacaagtttgatacaaaatgtttttatcgtactctttggagatgcccattctacttttgaatttagcttttactaattcgcatctggaagctcagcaagtgcacaagccttactttggttaccgtggaaaccactgccgcccctccccgatgtggtgcgctcaataaaaatgctggaattc

SEQ ID NO: 7056 - DNA, 638 bp, Homo sapiens
attgcctctgcttacgttcaggccctgtcctaaacccagccgtctagcacccagtgatcccatgcctttgggaatcccaggatgctgcccaacgggaaatttgtacattgggtgctatcaatgccacatcacagggaccagccatcacagagcaaagtgacctccacgtctgatgctggggtcatcaggacggacccatcatggctgtctttttgccccaccccctgccgtcagttcttcctttctccgtggctggcttcccgcactagggaacgggttgtaaatggggaacatgacttccttccggagtccttgagcacctcagctaaggaccgcagtgccctgtagagttcctagattacctcactgggaatagcattgtgcgtgtccggaaaagggctccatttggttccagcccactcccctctgcaagtgccgcagcttccctcagagcatactctccagtggatccaagtactctctctcctaaagacaccaccttcctgccagctgtttgcccttaggccagtacacagaattaaagtgggggagatggcagacgctttctgggacctgcccaagatatgtattctctgacactcttatttggtcataaaacaataaatggtgtcaatttc

SEQ ID NO: 7057 - DNA, 137 bp, Homo sapiens
gtggctgcagcctcaggaccctgaggggtttcccagccccgtgcggtgggtcccagcctgagggtggagtcctgcccactctgggagcctcacgctgagggaggagtcaggctgtcccagcgaggcccgacggcctc

SEQ ID NO: 7058 - DNA, 222 bp, Homo sapiens
gacctgctatccactgggagaggctatcagccagtcctgggacttggagacccagcatcctttgcattactttttccttcaggatgatctagagcagcatggagctgttggtagaatattagtttttaaccatacattgtcccaaaagtgtctgtgcattgtgcaaaaagtaaacttaggaaacatttggtattaaataaatttacacttttctttgcagta

SEQ ID NO: 7059 - DNA, 1518 bp, Homo sapiens
tgcccctggggcctatggcagctgccctaaagcctgacattcttgcacagggtggggcgcgcagtaggaacctcccccgcaggagctggcgccctctcgctcctgctcacacagtcaccctccgctcttgctacttcggcaagacatcttaagaatgtgacacattttcaagggcatctctatctttcgctgcagagttgtagttctgggccctcgattcctttcccaccaccccacaggctttaccctttgagaaaaaggcagccctccagattttgtagacatttttcttaatatttttaacattgtgtcttttaaaagaaatgttttacacagttcatccaaagagcagagaactgaacttctcactattgccttggccctgacagctgttaccagcacccttttcccaagaaaagtcaattcccaggtgcttattggacatccttcgagggggaagaggagggaagcggccagctcacccttccgggaccctagtgtggggcgaatctcacggacctgacctcagaggtgcaccagtgccgcccaggtagataagagctgcagcattgactgtgcttccgttcttccctcggggattgctcatggcatgggcctcttacgtgctgtcagcttgatgtgaagatcaagttcagtgctgtgggatttttaggaacaaaaaactgtgacgtctggatttggggttgatttttgtgctggggtgggattatgggtcaatgttgaagaatttttaagtctgtattatgtttaaaacatgaatgatttgaaagtttaaatttttaatttttatatgtggaaattcttcctgttggctaaaggggaagctcaagtggtgtcgtcttttgtgctgttaaatatatattctattctttggaagaaggcagagagaggagtcttattatttttaaatgctcctagttgtatagtctgtctgttgtacatagagttcagcttgttttttggctccagtaggaaaaaaaatccatccatctgagatggggtcctgttgtttattatcactctagaagttatacattgatatttattctttctgtccccacgttgtggcacctgaagacatcttcaaaattggcagaaaagataatagttataaaaattttagttcatttatttttaaactcctttcagattattttaccattaggaggaggtagattgtttcgtcttcctgtctgatttttgttttgtagtatttaattttgtattcctctgcagttttaagaaacagtgtttttcttcggtttgctggaacatgggcgttagagatggtaataaaccgtggtcctttttgcgatgtcacgactcttcacctgcctgggctgttgtgcacacagtgcagcctggatcctgtcgatctttacttgtggcggagctaatggtcacattgatagttgattacactgtggcacgaattaatgcagaacactgttattaataaaggaagtaaagggctgcaagatttgagagctgcaacaa

SEQ ID NO: 7060 - DNA, 1880 bp, Homo sapiens
gcccctgcatgcacccagggccacccggcagcacactcatcccgcgcctccagaggcccacccctcatgcaacagccgcccccgcaggcagggggctggggactgcagccccactcccgcccctcccccatcgtgctgcatgacctccacgcacgcacgtccagggacagactggaatgtatgtcatttggggtcttgggggcagggctcccacgaggccatcctcctcttcttggacctccttggcctgacccattctgtggggaaaccgggtgcccatggagcctcagaaatgccacccggctggttggcatggcctggggcaggaggcagaggcaggagaccaagatggcaggtggaggccaggcttaccacaacggaagagacctcccgctggggccgggcaggcctggctcagctgccacaggcatatggtggagaggggggtaccctgcccaccttggggtggtggcaccagagctcttgtctattcagacgctggtatgggggctcggacccctcactggggacagggccagtgttggagaattctgattccttttttgttgtcttttacttttgtttttaacctgggggttcggggagaggccctgcttgggaacatctcacgagctttcctacatcttccgtggttcccagcacagcccaagattatttggcagccaagtggatggaactaactttcctggactgtgtttcgcattcggcgttatctggaaagtggactgaacggaatcaagctctgagcagaggcctgaagcggaagcaccacatcgtccctgcccatctcactctctcccttgatgatgcccctagagctgaggctggagaagacaccagggctgactttgaccgagggccatggacgcgacaggcctgtggccctgcgcatgctgaaataactggaacccagcctctcctcctacaccggcctacccatctgggcccaagagctgcactcacactcctacaacgaaggacaaactgtccaggtcggagggatcacgagacacagaacctggaggggtgtgcacgctggcaggtggcctctgcggcaattgcctcaccctgaggacatcagcagtcagcctgctcagagcgggggtgctggagcgcgtgcagacacagctcttccggagcagccttcaccttctctctgggatcagtgtccggctggccgacgtggcatttgctgaccgaatgctcatagaggttgacccccacagggtcacgcaggactcggacactgccctggaaacatggatggacaagggcttttggccacaggtgtgggtgtcctgttggaggagggcttgtttggagaagggaggctggctgggggagaaacccggatcccgctgcatctccgcgcctgtgggtgcatgtcgcgtgctcatctgttgcacacagctcactcgtatgtcctgcactggtacatgcatctgtaatacagtttctacgtctatttaaggctaggagccgaatgtgccccattgtcagtgggtccacgtttctccccggctcctctgggctaaggcagtgtggcccgaagcttaaaaagttactcggtactgtttttaagaacacttttatagagttagtggaaggcaagttaagagccaatcactgatccccaagtgtttcttgagcatctggtctggggggaccactttgatcggacccacccttggaaagctcaggggtaggcccaggtgggatgctcaccctgtcactgagggttttggttggcatcgttgtttttgaatgtagcacaagcgatgagcaaactctataagagtgttttaaaaattaacttcccaggaagtgagttaaaaacaataaaagccctttcttgagtt

SEQ ID NO: 7061 - DNA, 747 bp, Homo sapiens
gtactggtgggccagggactgccgggcactccctggagttgggtggggaggtctgaggcccatcctcccactctcactgtcgttgggccaaggccagagcctggggacttggccaggtctcggtgttggccccatttgcatctctgtccccaaggttagtcggggctagaagggaccttttgggcccagctcttgcttcattcctggggccagcatccctcacacacacacttccagggatgaggagctcacgcagcccctccatgggacaggaagacccttcttccatgcagcttgatgtcactctctcactgggtccagcccctctggggcttcaaatctgtggccccctcagcccttggcagcctggcagaggtttgcagacaggctgatgttggcttcctgtaggaggctggcgggctgtagaggaggggtgctggcccctctgcctggccctggggactgttggctgctctcccaagtggcccaggctgcctgcagccattgctggggctctgtgcccagtcagcactttgtgagtgcttgttcagtgagtaagcagggacaggctggccggtggaccacgggagaggaacccgcattggccgagggctccctatggtgagccacgcctgtgggttcaccacctcctaggagggtccagaaaagcagctccccaagcctgtgcgcctcgtcctcagcagatccaccttcttcactataataaaagccagtctgggatgctaa

SEQ ID NO: 7062 - DNA, 1219 bp, Homo sapiens
tgctcgggccccaactcctgactgggtgcagcgtgaggcttcagcctggagccctggtgggtcccagccagggcagaggggcctccccaggaagtctcctaccctctcagccaggcagagagcagtttgccagaagctcagggtgcatagtaggagagacctgtgcaaatctgagctccggctccgaccccacacaccctgagggagccctaccctagcctcagccgctcctggtggggaatggctggggctgggcaggaccctcccacacacctgcaccctagcttcgtgcttctctctccggactctcattatccaacccgctgcctccatttctctagatctgtgctctccgatgtggcagtcagtaaccataggtgactaaattaaactaaaataaaatagaatgaaacacaaaattcaattcctcggctgaactagccacatttcaactgctcagtagatacgtgtggttagtggctgccatactggacagctcggggcattttcactgtcaaagaaagttctattagacagccctgcttgagccctgtttcttcctggccttcggtttccctggggaacttatcgacaatgcaagctcctgggcccacccccagacctcctgaaccaaaagctccagggctggccgtatgatctgtgtggatggcaaactccccaggccattctgggacctaagtttaagaagtgccgtcctcgaactttctgactctaagctcctgagcgggagtcagacttagccctgagcctgcacttcctgttcaggtgcagacactgaacagggtctcaaacaccttcagcatgtgtgttgtgtgctcacgtgccacacagtgtctcatgcacacaacccagtgtacacaccacctacgtgcacacagcatccttccacactgtgtatgtgaacagcttgggccctgcaaacacaaccatctacacacatctacacccccaagcacacacacatggtccgtgccatgtcacctccatagggaaaggcttctctccaagtgtgccaggccaggacagccctcccagccatgaatccttactcagctacctcgggttggggtgggagccccagccaaatcctgggctccctgcctgtggctcagccccagctcccaaggcctgcctggctctgtctgaacagaaggtctgggggaagcgacgggtggagtacaataaagggaatgaggac

SEQ ID NO: 7063 - DNA, 1558 bp, Homo sapiens
gccagaagtgagcgctgggaacagagtggagtctccggtgtgtacctcagactgatggtgcccatgtgttcgcctccgccccccacccttgccaccacactcgcccacttgcccaccgggtcccgccggataaatgacaggcccgaggtcagaatggccatccccgggccccgtcctggggtctctgtccccacttccttctggcctgggaggtctgtaattcctgtctcctggactctcctgggaagttccctgctctgcagctctggcccaggagctgcaggctgggagggggcagccaagaagccggagctggcagcatacccagagatccggggcccccccacccccaaatcacgagtgcagctggagcttgctcccccttgttcggaagctggacgttcacttggtgactggtgcctctgcactgacggaggactctgggggtccttcttaccggctctgacctctctcttcgtgcctggtctgggactgggtcagccctgggggatcagaaggggccatctgggcccagctgtgtacagcgagggtgggcagccccctccactccactctgcttccacaaagtcggctcccgagagctcgaggctgcttctgtttatatgtgcagggcccgggcgggtgaagggtcagagagacggacacaaggagccggcaggagggcggagcgaggatgtcctttcccgggagacaagtcgggaaagcctggctggactgcctcagccccgcgcgcctcctggactcagggttccccgtcctgagctcgggagatgttcagagtcacactgccgcccggtctgccacgcagaggtccaacttgccacccgcgtccctggtacctgagaccaccgacatcctcaggttcctgaccgtggcgcccttctacccagcccagtgtgcggccgccgcgctgtctgcacagctgggggcctctgagcctggtgggcttcctggactcttggcctcactccttgccccctccccacgacacccatgagccgaaaggatgtcactaaggatggctgattccccaagggcacccgctctccctccctccctgctggaggaacacgtcatatcagatgagaggaagatggcctctgatggacagaatttttctcttaactcagcttttgctactttggcaaaaactagcgaggggtagcagaaacctgcaccaaggattgtccctatgtcttggccactcctagagcgtgtgcagactgatgattttatatgtaaatcaagactcacatccctttcctagtcccccacatccaaagcccctcagcctgccttgcagaccaatgggctccatgttctgtagccccctcccctacgcctcacccctcctccctctcacaggttctgggcggccagtgagagaaacgcagtgggggaggcagggagtctggtgcctgcagagattctctgcttctttcctggggggaggtggggaggtcttagcaggagcgggccctgtacccacctgctgacctgctgtttggtagagaaataaaggttgtgtgactggggg

SEQ ID NO: 7064 - DNA, 2444 bp, Homo sapiens
cccttggtggggcgtgcatgggactagttcatctgccacagggattttagagcagacatctaacctcattcaggaaaactcctgtagcgccagtgcccagctctccttgagctgaccactccagttaggatgccaagcagccacgtctccaagagctcccgtgcgtaggctggacacaagcacaggctgtagcatggtgaaaataagccaagcagtgcagaatgcctcagaaagggtgggcagggggcccttaagaaggttcagagaccagccttctccagaggctgtcactgcaggagccgtgggcctgggaagacttggaagcggcctctctcaactggtttctgtctccgtggagctggaactgcctgcacttgccttcagagggaggcacagtccacccagatccacctttccagcaagacccccagtggctgcccagcctgggagcacctctttgcttttcacaccaaaccaaaactggcgagagcccctcctagccaccagtgatccccaagcatccagtacagaaccaggcatcgagctagctccctgcacggccgcaccctcccagagaactccttgaggagaacaagtgcccttggggacagccggcaggcgcccctgtacgtctgctcatgcaccaggcagcacagccgcagttcctcagttgttgttttgacatatttcagtttccacctcacgtttttagagcagaaccacactgtctccctggaggggctcgagggcatgaccggggactgaccattctgtgaaaggagcagaatgtgaggagcacgcgtgagcttatgtaccgtgaagatgatcagaggatatcttattttaagagtaaaaacccacataattttatttctgcttgatagtcatggtagtctgtcatacccacctctgggactctgcgtggctgtttggctgtcacttgtagcaataacgacattagttctagtcagtgctgttttacatttttcttttgatgggtttagtcttgccctggagtgccgatgatgattctccctccagagccacgcttgggaacatgaagcaagtctggcgtgtgggctgcgtgccggccttagtgggacccgtggggttggagcatgcctttaggggcagtgtctgggccgaagcacgtcccaccacacagtgccagagccagagaaggggccccaccaccaaggccaagcttgaccaggtcagcattgccatggcccagtgtgccccgtggcctctgaagatccctctgtgcagggtctgcagggatctggattgcaagggcccaagtctgcaggtctggaagcatcttcctataagagcactttcgccttctgggtcaggactccaaggtgcagcgggcttcacagccctacaattgggttctcagctaagccccagagttctggtagaaccatcccggggcgggtggagggtgggatttaagggagacgggaacacatggggcaggtcctggaacttggtggcctgaggactgaggccattgccctggtggaaaggcctggcctggttcctgtggcttgggacctgaataggcaggtgctgctggctccgtagaaacccttttcccatcttttgctctttgccaaacctaccttgctttgggagctgcctgcaccaccccagagaaggccccaccttcttcatccctcagacccgaggaggcctcccagtaaggagtttcccaagaggggactcacaggaaacaagtcttagtgcttgggagggaggccccgctgcgtgctcagactcacagccaacctggaaggtagacgagatagcgccacccacgcccctccacaccccagactccgagtaaagcgggcggtagggccggagtcacctcccctatggcagtggccgccgctgtactccatcctcccgtcaggaagatcagctgtaaataaacgctgggctccccagagcacctgtccgcccactgcccttgctgttctgggatcttcgctgcagttcacgggaaacaagcctgagtccgctcgcacccgcggctgctctcccggctcggcccggccgcctctgtctccggccaccgggtggcgctgccgagccagagccgccgcgtcccggcgctttccaggagccccaggcccggaggaggcgaagcccgcagagcaaaggtggaaacacgtgcctacgctgtaaagaaatcctgttccagagcatacctgttgtacaaacagacactgttcctaacgagaggagtgacgtattttcatcaccgtttttaatttgttttcttacgggtttacgattttgaatttttcttatttggttgaaagaattttgattctatcagcctgagtgagttcagcctgtaaaaaggatgttaagctgtgggtaaaatatgcaaacgaaaagaaatatattgtacaaattctatataataaggt

SEQ ID NO: 7065 - DNA, 4406 bp, Homo sapiens
tgagccccccggagggtccaggccacgtccttggtcacctccccagcagctgctctgctcaccagcctgaccccacccagagcaggagctggcgggtgtcttcctgcggcaatagactggaacgattaaggaccatggtgtgatagatcccatttcaaatgattccatatgattgtcagtgtgtgtgtcagactgtgatcgatttcactagatgtctcactcatcagaccaggccattgggcctaagtggtaaatgtgattaggaattagacctctccccattctgctagcaacatacagggacacttggaaaaccatttccccttccagtagcttggtgtccatcccagagcattcatgaagtcttcccgcctgggctgactgatgaggcagagcctctcagcgtaggaagctggctgcttaatgagctggctttactctagggtaagtggctgtggacttttctgcacagtgttttcataaagataataggatcctcttgccctgaagtctttttttctttttacgctaagctgtatttttagtgagctaccccttttaaaaaggtgaaatctttcttaacagggttcaaagatgagagctgaaaaatcgtggccttaacaactgaaagctttacagtgttcatgctactgaggtgtcaggagtgcagctgggccgcttgacacctcgtagcagccgtctcattctctcgtcttgctgcgtcctgtctgtggagtcctcagtcactctgctgttggagagtgctggaggaaatgcacttttactgtgctgcactttttatagagctgcattgtcggtgattccaatttaaaaatccatattcaaaaataccctcacacatccctgcatcagtgattctaatgatcagctttgactggacctcagctcacacgaatctccaaggaaaaactctacagagcatcttttagagcaagagattcatacaggccaagtgatgagagggggagtcaccaaggcttcagccccaagggcatctccagcctcaggccggcaggtcctatgtccttgacacaaatgcttcttgctgaaatcctccctagtgatgctgcgagtgctgttggtcccagttctgtgtagcttgccctgccccatgaagggccaccagccaagggccctggccacgtgtgcgccaccttactttggaagtctctggcttgtgtgctggatgaggctgccagaacttgttgggcgttcatcgctgttagtacatatattaaccgtgaggtgttaaacttttcttttgaaggtttggccagtttctaaaaaatgcacatttaaagagaagcatctaccacggctttaaaacaaaacaactctgagatgaacaatatgtgttatactcagagattaacaatctcaatcatacatactgattctttcagacatttaataaccactacatttttttgcattaatgaagtttgactatatgtgtaaagggactaaatatttttgcaacagcctgttctttgttcattcttttctggatagtgtgtcctctgtattgcggtagatttatacattctgttgcctaaatatgtgtgtaaaatgagctgataaactggagtactacttaaaaaaaagtctgtgatttataagatgtatatgctttctatgtgaatataagcttgtgcacaatgtttaaaagaaaaacaatgaattagaagagatcccccgtcccccagtctgacatatttcatacagaatgtttaaaagaaaaactctgctagtcttggcaaacatttggccatgtgaggcatgtggtcagtttccattttctattacctggaaagggccataaggaagcaggcagggcttaggtagcttggttacctaagttagaaagtaagagaatcatgattcggatatgaattgaagtggttggtacatggatacctgttctttaaaaggaatgtgggagatgagtcaagggtgaggccgattgttctgcccatgccctaccataccaatttcaataacaatcttgcctgtcattgcactcagaatcttaagatcatgtttcaaatatgttgattcaaacttgcttctaagcctgagtccagggatagcaatggtactgaccagctatggactgggagaacattgagtcctgttttccattggcttcagggcgcatccatgtggatataggaaaagcctctttccacagacttaggaagccccccgaccacgcggacgctcgctgggctgcactcagcaggctgcttgagtgggagctgactccaacatgccctgccctggctgggactaggcatgcttccagcccttcccgtgctctccctgctgtcaacacttgcgtacaaacctgcctagctgttgtaagttttcatcagtagcttaagtactagtagcaaaaacttaaattcattcagaaagttgccacttctgaatgagtagagcaggaaaagtaaactttactgaaacataatttgctgcaacagtcaacattgttatgctgaatgtgctctcaactgccctttgctcatcgccagatttattatccagtgtattcctaacagtcttttgttgtcgttgtttttaaaacaaaggtacggaccatgtgctatatataaatcgaatggcttaaactaatttgctatgatcctctaacaccgaaatttcccataaacttaagtgcctacacttaggacttttgaactttcagtcatctttttcgtggtgtctcactgaacgatgtgttagaacatgtgttccatttggagttttgggcctgtgcacggtcaaccccaattaccaatttagttgaggctggattcgattgctcagttcacctgccacgttctctccaaggagtggggtctacgtgacctttagtcctctacctcagagccccgagtcatttctgaccaccccgttctgtgtcctcactcttgtccctgaatgggtccctgtgtggatctcagtgtgtgtgtggtttctccactcctccccgctcatgtcccacacctgccatattgaaccgtttctgcactaatcttctccacgggcacggagtggagggaacgtcttgggaaaggggagagcttgacctccatctaggtttcttttatctggagaaaaagaacacttttgaactatgtaatgcttcaccctgaaaggcaagctaacgctaacttcccaggtgacagtagcaggaacaaggaagggtaatgtttccatgacagacacttgcttcccttgggacaagtcccagaagaactacctgaagcaccaaagctccccaccccagcctggtggcagaggaagcaggtggcaccaactcaccaaagggacttgggagccaccttctcactctgtggaagtactttagtgagagctgactggcaagataaaaaccctgaaattcccagaagttacagatgccttaaagactttctttggaagatcattgcctgtactattccttttttgtgtggcataaataatatattaacctgttacaactgacaacattggttttctgcagctagggagtcttgagtcgagactgctcgccttgatgacttgctcttttttggcagatgtgtggagttggctgttacgacatccctgtgtgatcccagaggaggggcagtagctgggcagaaactgcaggcacacatttgggtggatcacctggcttccagccccttcggggtggtgctcagtgtggggtgatggtatcatagaggaccacggcgcttatcagcattgtttctttggagtctgtgtaatggaatgtatttttcaaatactgatatttgcattttctgtaacaattccttataataaaatgaagtaaaattgtgcatttaaagtggaaactttaataagacatttgtagttacttctaatgcagaagtaccaataagcattaaaaacaaattttagaaaactcctgacgtgaataagtttcttgaccagctgccctccagaaagtttgaattccaacatttttcaggaacatgctgttgacagcagtaaaagtagctattttatgtatgtatttttaatttttaaaagtttcagtaggtttttggggttcaggtggtgtttggttacgtgaggttctttagcggtgatttccaggattttggggcacccatcacccaagcagtgtacactggacccttttatccctcaccccaaccctttcccctgagcccccaaagtccactgtatcattcttaatgcctttacgtcctcatggcttagctcccgaaaagtagttattttaaacatactagctgcctgaacttactgtgcccttggcccagatttcagctcatagcaccgagcgtgatcactgaggcagtctcagtcaccgtcacctgacccctctg

SEQ ID NO: 7066 - DNA, 406 bp, Homo sapiens
acggcatactatgaggataattattttgtacttaattttatatacagtaaaagcctgggttgtcatttttaaaaatcctgtgcttcaaacaattgagcagacatcaagtccctgaaactgaaacttccatttatttaatgcggcgactcgcagactctttggactcaagaattcctttgaccgtcttaaaaattgtaccccagagagcttttctttaggtgggttataacttcagtatttaccatattagactacactttgagaacactgttttaatgtatttccttgatctgactaaataaaataacagggatattttaaggagagggatttggtgtaattcagtattgagtactggcaatgcataaaacatgggtaggtgtcactcacacaggaagacttgacc

SEQ ID NO: 7067 - DNA, 3298 bp, Homo sapiens
gtctccaattgagaaacatggcactgtttttcctgcactctacccacctattgctggacttctgttgtacaagttggcaaacactggctggaactgggctgcaataaaacatgccagttatcaatgctgacaagagcctaacaagtgccaacttacagatgattacgcattttgaattctaatgaactgttttaaccttcaggaagaattgtaaagacctgtacatagcacaacatgatccggataatatatatactgttcatgtacatccacaaatacaccttgtaccaaataatgctttcttgtagtagaataagaatcgtgtaaattctaagagattttagcaggttttctttcctattcattgtttcttatcagtttaaaaggattcctttaagcatgtcagatgaaaagcaattaggattaaaagtttccatttaatttcccttaaacccttgaggcttcattaaactcttttcacttactaaacttttgtatcttctttgttttgacacactcccctttgcttttatctcttacctgccagaatgttctcaaatgatttagttcaaatactgaaatacttaatgagcaattacttgatttttaatgatgacttcgaaggagtcatcactaggtgctttgtcctttttgtattctagttgcacccacctcttggattggatatagcaataacatttattggccgttgtgagctcttgatcccagtcattacccctgagaactaaaaatagatggttcttaattcaacttactgaaaatttccccaaacaatagcaaatctgacttttccctcttcagttgcctggtattaaggttggataaatgaagcatgcacagctacaggctttctacttaacttctgggtttgctattacaaatcctatttactctcatacccttctccttagtccttcatatttctctgcctctattcttctatactgcagatttttctcacctattgtacaaagaaattgcgatgtatattttcatgtaatttgattttggaattctgtcaccttatgtagtgagttcttccaaaatataattttttttcaataattgtcaagttgttggcttttattgtattgaatgaaggctataatactgagtgccagagaagtggtttaggaaaatctcaggttgattccttatgcaaatgaacttttaatacttgaaaatcacatggccatggcagtatatgtatttggttctatctagattcttctgtgaatctaaaagcattacaggggtaaatgctttgctatttgacgtatagatcccgtcactaacaatagtacacttggatgtgattaatgtttgagcttcaatatatttcatatcatacagttttctaaaacaacttcagcaaatggtaaaatgaacatgtgcagtgttaaaggcaggccttaggctccttcatgtttgttgtgaggttgtgtgtgggaagtagtctttggcttataagggatagaacttgagacagtagcagatgggacatggtgtttgattgtgagaatcagtgagaattcgtgcatctctgctctgtggggtttggagaaatgctttggcagaagagtgaaagaactcctgccaagagcccagacctctacaaacgttgtatgtccttttttaagcagaaataaaatggttgaggatgtagtcacagtagagagtgatttttttctaagtccctgtcctctactctgaagcgttataaaaacctgtaaacattatacaaacccacaaaccttatagaaactcgtaagtgtgttgtgactggaaattgattcattagaacccagttttctttaagaactttgtgacttggttttttttttccttttccaaagactgtaaaaatagttgccccaaaatgtcagcactgcacaccctccagggacttggaatacaatcctttttacttttttttttttttttttaagaaactgggtctctctgtcacccaggctggagtgcagtggcaacgatcatagctaactgcagctttgacctcctgggctcaagtgatcctcctgcctcagcctcctgagtagctaggactacaggtgtatgccaccatgcctggctaatacaaaaaaattcttttaagagatgggatccctcccttttaaaatcagaacttgttcacatggtggttgcttgtggcaaaacggagttcaaattttgctctcctattgctataattctgctagcaatctgttgaggtgaaacttgggatctgactcttcagcaagcagcaaatgacctagtaactcagggacaactatttttgaactttaagtgccactttaatgcagttagtttgataaaaccatgtgggttttttttttagggctagctctacgggagtggaagtgagagccaggcatgagtgcgtctccacatgcttttccacctgccctgagtgtgttacatactgaaacaggcctacatagatgttacaacttcccttcctctgtcggagatgtcatctgtgcctttctcagtgttcatctgataatgtaaatttaaatgcctctacatttgatacgaaacccacattcaggtgacactgaacgaggtggcttttgtcccaccagtgcctcatcagtgtgaggcgattcctctctgctttaggaaaatgatttttccccctaaacttgtgccaaccatcaacaacatctccatagatcttatggattgtagaactgttggctgtttcctaaatttattccaagttctcgtagaggcatatagatttcagtctgtgcttgtatgggatagatgatctgagtggctttctggcctcttttttgagtttaaaatccatatgaggttgacgtgtcatactaaggtaacatgtttgtgaggttattccactagtactgtgatcacgtgggtgtcagtatctttaacggccttcattcttggttgtgagattttatttgatatgcccactcaccctcgacgaatctgcccgctttgggctgtggtgcctgtgtatctttgcccgtctggtctccagttggtggaattaccttttttgtactgccacttctcagcatctttgaaatttgacataatgttgcttcatttcagtttttttagttctgtaatttgttgattgtatttaactatgtgagttctgttgtgatgtttactgtattgtaaagcacctcattcatgtgatgagtgctctataaatcaataaatgatgacttagaggctgtatcacgagctattttggttttaggatgcaggtctcaaaagc

SEQ ID NO: 7068 - DNA, 509 bp, Homo sapiens
gcacaggtacgggcccccctcagcccctgcctccatctgcctgagacgcctattttttttttttttttttaaaccatgattttaatacgcaagctgtttctaaggcgctgccactggggagggtggctgttgccgcctgcccgggcatcctgctctggcaagcacagcctgagccattcctgcaggggtcccagggtgcagagacctccccacccccggttctgggctgggaccctggctccagggccatgtccagggctctggtgtttgcctgggttggtgcaggttgatgtgctggctgcaggcaggtgtgaccatctctcgtgcctgccacctctttgcccccaggcttttttgctgtgagggagccaccagggggtgatttaaataggtttatttcttcatttacaagaggaatatatttggcttctctcttaagactctgagattcacaatcagcagctctaaaaaataaaggagcagtttggcttccggaaggaagaggaggc

SEQ ID NO: 7069 - DNA, 1081 bp, Homo sapiens
caggatgggggtgggtctggcagaaggcagagttatctgaagcatgggggcaggagcagagcagacacagcagcaatggagtgtgcacccgcagggtgtggtgcctcacacctgtaatctcagcactttgggtggtcaaggcaggaagatacctcgaggccaggagtttgaaactagcctagacaacaaagcaagatctcatctgtactaaaaatttaaaaatttgccaggggcggtggcacatgcctgttgtcccagctgcttgggaggctgaggcaggaagctcgcttgagctcaggagttcaaggctgcagagagctaggatcacaccactgcactccagcctggacaacagagtgagaacctgtctttaaaataataataataataataaaaaaatagctgggtgcggtggctcatgcctgtaatcccagcactttgggaggccaaggcaggtggatcacctgaggctaggagttcgagaccagcttgggcaacatggcgaaaccccgtctctactaaaaatacaaaaaattagctgggcatggtggcgggcacctgtaatcccagctacttgggaggctgaggcaggagaatcacttgaacccgagaggtggaggttgcagtgaaccaagatcgcaccattgcaaccccacctgggcaacaagagggaaaccctgtctaaaaaaaaaaaaaaaaaaaaggatttattatgtgctcactgctggctcaggccccaacctctggccttttaagttacctagacttgagttctggcatccagagctaacaatcattcttcagatcacccacaccggatggaatctctagctattttatcagctaagaaaatcagggtaataacgaaaaagcagtagggcctggggctagcactgagttcagatccagctttcaggaggacagtggaaagagtgcagagcctctgcctaggccctgggccccacgaagcaggacaggcagagcccagggtactgttggcatctctgtccttcccttcaggacaccccttacctatctgcctcaaccagactgggtacaaaataaagatcaagtctcccgg

SEQ ID NO: 7070 - DNA, 674 bp, Homo sapiens
gcgtcgccaccctttggttatttcagcccccatcacccaagccacaagctgaccccttcgtggttatagccctgccctcccaagtcccaccctcttcccatgtcccaccctccctagaggggcaccttttcatggtctctgcacccagtgaacacattttactctagaggcatcacctgggaccttactcctctttccttccttcctcctttcctatcttccttcctctctctcttcctctttcttcattcagatctatatggcaaatagccacaattatataaatcatttcaagactagaatagggggatataatacatattactccacaccttttatgaatcaaatatgatttttttgttgttgttaagacagagtctcactttgacacccaggctggagtgcagtggtgccatcaccacggctcactgcagcctcagcgtcctgggctcaaatgatcctcccacctcagcctcctgagtagctgggactacaggctcatgccatcatgcccagctaatatttttttattttcgtggagacggggcctcactatgttgcctaggctggaaataggattttgaacccaaattgagtttaacaataataaaaagttgttttacgctaaagatggaaaagaactaggactgaactattttaaataaaatattggc

SEQ ID NO: 7071 - DNA, 55 bp, Homo sapiens
ccatcttctgcaccccactctttgtttccaataaagttatgtccttagatagcga

SEQ ID NO: 7072 - DNA, 947 bp, Homo sapiens
agacggactctatgttgcccaggctgttatggaactcctgagtcaagtgatcctcccaccttggcctctgaaggtgcgaggattataggcgtcacctaccacatccagcctacacgtatttgttaatatctaacataggactaaccagccactgccctctcttaggcccctcatttaaaaacggttatactataaaatctgcttttcacactgggtgataataacttggacaaattctatgtgtattttgttttgttttgctttgctttgttttgagacggagtctcgctctgtcatccaggctggagtgcagtggcatgatctcggctcactgcaacccccatctcccaggttcaagcgattctcctgcctcctcctgagtagctgggactacaggtgctcaccaccacacccggctaattttttgtatttttagtagagacggggtttcaccatgttgaccaggctggtctcgaactcctgacctggtgatctgcccacccaggcctcccaaagtgctgggattaaaggtgtgagccaccatgcctggccctatgtgtgttttttaactactaaaaattatttttgtaatgattgagtcttctttatggaaacaactggcctcagcccttgcgcccttactgtgattcctggcttcattttttgctgatggttccccctcgtcccaaatctctctcccagtacaccagttgttcctcccccacctcagccctctcctgcatcctcctgtacccgcagcgaaggcctgggctttcccaccctccctccttagcaggtgccgtgctgggacaccatacgggttggtttcacctcctcagtcccttgcctaccccagtgagagtctgatcttgtttttattgttattgcttttattattattgcttttattatcattaaaactctagttcttgttttgtctctccgaa

SEQ ID NO: 7073 - DNA, 76 bp, Homo sapiens
acggcgccgccgccgccgctctctcccgggccaggaggctagtcccacctcttgctattaaagcttctctgagttg

SEQ ID NO: 7074 - DNA, 970 bp, Homo sapiens
ctcgcaccgacttcaatttcccacccatctccagtaggaaattgattttgaaaaagtaggctgccgccaccacggcattatgatcccttccccctgctgatcaatctgcagtttgtgaacttcacaagaatggtgtgtgcccgttccctggcgtgtgtaggcctggccgcagtccaggggtcagcaggaggaaagggttcacataggctctcaggtgccagtcttccagaaagcaaggactgcccttcattcagccttgctgacctcccagcctttctaaggctcagccccacgggactctggtggctgccagcttgtgagctatctatctatattcatttcatagccaaacaggagacccctttgcaggacttgcacacagggaggctgtagccaggaaaccctcttcttccctggtctggctctgctggagcgggtgggaaccaaacaccttcagtgctggtggccctcaggcccacaggtttaaggctgaggctgccctgacccttccacagtcatttcttctaggttttcttggcccagcactgcccatcccaccccatgaggctcactcattgcagatcccagcccaccctgcccctttcttccccaccctggaggctctctctgcctagtctacagtactgacagaaagcaaggacatgcggcctgcatggtgggagctggttgaattgtctttattaacaaacaggatatccaaggccactacattgaggaggggggaggggggagggaggagaagggttacttgctgctcacactatatacagatgcaagcaaggggcgtggagagtgagggctccctgctccctccctccaccggggaagggcatgggctagaagaggagaggggggtcgggaatggggggaatgttttggctggcggggtcccccctccattccctggagtttgggggaaggggaatcattaaagtgctttcagaaaatg

SEQ ID NO: 7075 - DNA, 432 bp, Homo sapiens
agcggccgggggctcccactcgcctgctgcgcctatagccactgcgccctgggggcctgggctctgctgccctggacccctctatttatttcccttccacagtgtggtttcttcctctgcggtaaaggacttggtctgttctaccccctgctccagcttgccctgctcgtcctgatcctgtgatttctctgtccttggctattcttgcagggagctggaaaacttcctgaggatttctggcctccccctgggttttagtttcagggcacacaggacagcagaagatcccctttgtcagtggggaaaccaaggcagagctgaggggacagggaggagcagaagccatcaagatggtcaaagggcctgcagagggagatgtggcccttcctccccctcattgaggacttaataaattggattgatgacaccagc

SEQ ID NO: 7076 - DNA, 246 bp, Homo sapiens
cctcgtctgtcccttccccttcaccgctccccacagctttgcacccctttcctccccatacacacacaaaccattttattttttgggccattaccccataccccttattgctgccaaaaccacatgggctgggggccagggctggatggacagacacctccccctacccatatccctcccgtgtgtggttggaaaacttttgttttttggggttttttttttctgaataaaaaagattctactaac

SEQ ID NO: 7077 - DNA, 306 bp, Homo sapiens
gcgccccgcccagctccctttgacccctggggcagggcagggggcagggagagacaaggctgctgctattagagcccatcctggagccccacctctgaaccacctcctaccagctgtccctcaggctgggggaaaacaggtgtttgatttgtcaccgttggagcttggatatgtgcgtggcatgtgtgtgtgtgtgtgagagtgtgaatgcacaggtgggtatttaatctgtattattccccgttcttggaattttcttccccatggggctggggtactttacattcaataaatactgtttaaccc

SEQ ID NO: 7078 - DNA, 758 bp, Homo sapiens
cctggccaccgcctttctcaccaccctgggggcgcctcgtgcagtcttaacagggagagggctttctggggcagggggagcccctgtcggcagctttcctgttcacctttgttggagccctctgtaggcctcctccctcctccccacgccttgctcccacacccctctcctcgtccctcctggtcgtgccccgtctcttttggtcctggctccagaaaacccgcgccccacatacctgcatcttccgctgtgacctccggagccctgcctgcccctgctccccagctcctcctgcctgcacccgactcggccccctcctgacttgccttatttatttgttcgacgcgtctctgaatgtatccgcctcggttcccaccactgccttcgctgcgcacgcccctcgtgtttcagggctgaccgtgtccccacccgactccgcatgtttgcgtctgtttcctccctctctggccctgtcttaccccatcacccgactctggccactgacctcagggccgaaggggaggtggtgtacataggaacgcgttgcggagtccgccccgtcccccgaggggaggggtcttgtacatactgtaacatacagagtatagtgaagaatctatttaaggcgccgcggggagggctgcacggccgggcttgtggttctctagcgcggcgggggcctcctgccggctccacgggcactttctacttgtgcatgggcttggtttatacgaattgccattaaacatcgctgcacc

SEQ ID NO: 7079 - DNA, 274 bp, Homo sapiens
ggagaaaccaccgatgccgagaggctagtggtgccccagggacccaagactagttccgtcactagagtcaccctcattgctgacatgaaggcgtttccccttccttcgtctctccaactgcctttcccatcctctgaactaggcattaacagcccccgtgggctcccatctcaacccaccgctctcacaggagcaccccaagtcctgttttcctccaggccccgctcctggccttgtattctctctgctctgttattaaaaagcaagcaagtgg

SEQ ID NO: 7080 - DNA, 268 bp, Homo sapiens
gcctgggcaggtggggacccaactccaccccacctgtcttcatcgtgaggctgccacagtgcctgactacttgtggcccaggcaggcttcccccaacacaggaacgctcatggacacctgcacactccacagaagacgttggcatgtgaggccagggtgggcaccaaagaccaggcccagagccaggggacaggttggggctgtgggcttggacccagggcctgagacctttgtgggatttgtgcaataaagtgtttttatttaaaac

SEQ ID NO: 7081 - DNA, 86 bp, Homo sapiens
attgaaggggagaacgtctccagacagaattctacatcggtctaatctactttaggactggatcccataaaagttataagttcctt

SEQ ID NO: 7082 - DNA, 390 bp, Homo sapiens
aacagccatttcttctttttggcaaaactgaagagggttcacacaacttattttaaaacaatcaagaatggttgaacttcagtaggtctctgggccctgaaagccagtggtgattttatgaagctctataagataaagcacttcccaaaccttagatgaagacacccctgcgatcggatgactgcagccagaggagacacatgggtgctcggctctgaggacttagaggggtcagccttgtgctgttgaggaaactttccatgggaaggaccacggggctccatggctcccacctgtgggaaactactcatttcttggcattctttcccccttcattccctttggtttgcatggttctgagtgatattaaatctcagcatttggttgtgc

SEQ ID NO: 7083 - DNA, 106 bp, Homo sapiens
caccaccaggagctgactcacacctgaactgaacaccattgaaggcttaaacccatattgtaaaacaggtagaattatctaatttataaaaaggtgttttgatgac

SEQ ID NO: 7084 - DNA, 236 bp, Homo sapiens
agcagacagatgctgaaagccatagtttcatggcaggctttggccagtgaacaaatcctactctgaagctagacatgtgctttgaaatgattatcatcctaatatcatgggggaaaaaataccaaatttaaattatatgttttgtgttctcatttattatcatttttttctgtacaaatctattatttctagatttttgtataacatgatagacataaaattggtttatctcctcc

SEQ ID NO: 7085 - DNA, 1934 bp, Homo sapiens
gccgccccaggatgccgccagaatcactggtccctgggagcttggactacagttgtccttacagcaggcttccaggttggcgcttagagaagccttggaatcagctgaaggtgcctgacttccaggagcgtgaaagcatctttgctcaactcctgggactgaaccatatagacatggacatatcatttgtacctggaaacctcaaaattatgcttttggttcttactgggtgactttgacttaatttaacacctgagcctcagttttctcatctgccaaatgggagtaataataataatccttataaaattgggttcataaagtttagagaaaaggaatggaaagtacccagaactatgcctggagcacgcacgacacacgtacagtgagttgggagccgttaggctgaatgttactgcttgccatatgatgtgaagtacagcaatatcccaagttcttgtgactgagggagattttctggaagggccacaggaggttgcggagcttggatgttgcccttagttcttgtttaatgtctctctgaatgcagttttaaaatagaaaacaaaactgacttctgtagaagtttccagagggaggtgctgttatctcgtacctcctgggatggcgatccctactgaacgcttgtgtctcagggtggaccactctgtgtctgtctccaagcagagaccagtaaaggagcctcctggtcctcagtgcgtgaccctgtcagtgctttcaggagacatgtaagcttcctgggtgaaggttgatttgtaccttctgaatcctgtcacgtgtagacatgggaaactgacctatcagtgttttgtgtgtgtaggtgactcccacatacacagttgccatttttctctctaactgggcaccagtgaacatgcgggcatgaggagtgactgtgtaccatttcagctgtttcttttcgggcagtcccctggtcagagggggtgggggtgggggaggggagaggggtacctagaacccagagaacattggcttatgccagataccacaccacatctgggcttacattcttgtatcttttttggtgtgtgggcggggggggtggggggcagttcagtgaagtctagaagacctgctggacaaattctaaaagagctagagctgtaacacttattcttgcatcttattaattttctatgatattttttccttcttcgtagggacttgggacaatctggctttgctgctttctaactgctaggcacctctctctaaccctcattgtcagagggaattggaggatatccacagtctgttcctgttctgatattctgagcagagaaaaggcactaacggttcctcttagctatttaattatcagaagcaagtaatctttccccagataatattttgccctagaagaagccgtgatttagctcttttattgtgcttacttggtccaaatacatctgtggggtgttttgtcatttcttaatgaatgaatcatagttataaccaggggccaagctgcccaagaggctcttcagagatcatggatgctctctttctggaagctgtggcctgatggagcagccccattccagggtcccatctgtccggagttgtgtatgtcaagtccggctcagtctttatttccaacactagccgtggtcctgtgcagtcaagctctcagctagtgtttagggctgtctgtcagaaatggttatacgtgggcaaaagaagatctgacagctcctatataccttatcttactgaattcttaaactttgaaccagttcttccacttactgacttgttaccactgctgactttctgaaaagttttccagtttttgttttttgttttttgttttccagtaggggattagaatgtttagtcctacttagtaagaaaaatattgtatttttaatcattcatagtgctggtaaaaa

SEQ ID NO: 7086 - DNA, 391 bp, Homo sapiens
agcagcagtgccaataatgagacccagctgggaaggactcggtgatacccactgggatcttttatcctttgttgcaaaagtgtggacacttttgacagcttggcagattttaactccagaagcactttatgaaatggtacactgactaatccagaagacatttccaacagtttgccagtggttcctcactacactggtactgaaagtgtaatttcttagagccaaaaaactggagaaacaaatatcctgccacctctaacaagtacatgagtacttgatttttatggtataaggcagagccttttcttcctcttcttgatagatgaggccatggtgtaaatggaagtttcagagaggacaaaataaaacggaattccatttttctctcact

SEQ ID NO: 7087 - DNA, 635 bp, Homo sapiens
agtatcaacaccagcccttgacccttgagtcctggctttggctgacccttctttgggtctcagtttctttctctgcaaacaagttgccatctggtttgccttccagcactaaagtaatggaactttgatgatgcctttgctgggcattatgtgtccatgccagggatgccacagggggccccagtccaggtggcctaacagcatctcagggaatgtccatctggagctggcaagacccctgcagacctcatagagcctcatctggtggccacagcagccaagcctagagccctccggatcccatccaggcgcaaagaggaataggagggacatggaaccatttgcctctggctgtgtcacagggtgagccccaaaattggggttcagcgtgggaggccacgtggattcttggctttgtacaggaagatctacaagagcaagccaacagagtaaagtggaaggaagtttattcagaaaataaaggagtatcacagctcttttagaatttgtctagcaggctttccagtttttaccagaaaacccctataaattaaaaattttttacttaaatttaagaattaaaaaaatacaaaaaagaaaaaatgaaaataaaggaataagaagttacctactcc

SEQ ID NO: 7088 - DNA, 414 bp, Homo sapiens
tgcccagcagcctgcggcagtaccaatgaagccagagagggcttggtggatgacaaggaggcctgagtagaccgcaggtgggtctgagaaatgggcttaggtgaggcaggtctttgaaggatttgttcttaatcatatgcgagatgctcaaaaggctggatgcctgcttttgtgggtgaagagcaagaagagaaaacaggttgtacacatacagatgcagatggagagacagagaaaaaaaaggaagaaggcagagaaatgcaccaattcttgagctgtattatctctggaccttgggattgtgggaggctttattttactactgattttgcctacactgttttctcaatttctagttttctacaaagatgatgtgttagctttttcacgcattaagattaaaatttaaaacag

SEQ ID NO: 7089 - DNA, 1485 bp, Homo sapiens
gaagagccacaagaccacacacacagcccttaccctcctcaggactaccgaaccttctggcacaccttgtacagagttttggggttcacaccccaaaatgacccaacgatgtccacacaccaccaaaacccagccaatgggccacctcttcctccaagcccagatgcagagatggtcatgggcagctggagggtaggctcagaaatgaagggaacccctcagtgggctgctggacccatctttcccaagccttgccattatctctgtgagggaggccaggtagccgagggatcaggatgcaggctgctgtacccgctctgcctcaagcatcccccacacagggctctggttttcactcgcttcgtcctagatagtttaaatgggaatcggatcccctggttgagagctaagacaaccacctaccagtgcccatgtcccttccagctcaccttgagcagcctcagatcatctctgtcactctggaagggacaccccagccagggacggaatgcctggtcttgagcaacctcccactgctggagtgcgagtgggaatcagagcctcctgaagcctctgggaactcctcctgtggccaccaccaaaggatgaggaatctgagttgccaacttcaggacgacacctggcttgccacccacagtgcaccacaggccaacctacgcccttcatcacttggttctgttttaatcgactggccccctgtcccacctctccagtgagcctccttcaactccttggtcccctgttgtctgggtcaacatttgccgagacgccttggctggcaccctctggggtcccccttttctcccaggcaggtcatcttttctgggagatgcttcccctgccatccccaaatagctaggatcacactccaagtatgggcagtgatggcgctctgggggccacagtgggctatctaggccctccctcacctgaggcccagagtggacacagctgttaatttccactggctatgccacttcagagtctttcatgccagcgtttgagctcctctgggtaaaatcttccctttgttgactggccttcacagccatggctggtgacaacagaggatcgttgagattgagcagcgcttggtgatctctcagcaaacaacccctgcccgtgggccaatctacttgaagttactcggacaaagaccccaaagtggggcaacaactccagagaggctgtgggaatcttcagaacccccctgtaagagacagacatgagagacaagcatcttctttcccccgcaagtccattttatttccttcttgtgctgctctggaagagaggcagtagcaaagagatgagctcctggatggcattttccagggcaggagaaagtatgagagcctcaggaaaccccatcaaggaccgagtatgtgtctggttccttgggtgggacgattcctgaccacactgtccagctcttgctctcattaaatgctctgtctcccgcgg

SEQ ID NO: 7090 - DNA, 1720 bp, Homo sapiens
gccccctgaggcccacagccacccaggcagggagcaagtggcctggtcacttctggttcgattgaccaggatcgtggtgtcactttttaaaatttaaaattaatttttgaaatcaaagtcagacacacccatggtaaaaaaaaaaaaaaaaacaatcccaagggtacagaagagcttatgaataaaagtagttttctcctctacccctctcattccttccgtgccatggttttaattgaccctgtttttaattcttctggtagttttctctatttccaagtaatctgtttaaatcagtttctagattttaccccatgtcaatgacaaatgaggatttgatgctctgatcctttctcatgcctgatacccctccctgtctccccattttggatagttacatttgggggtcatctcggtgatttttgtaactttacgcaggacacttagagctctctagaatcccactgactttagtgggtcttgatgtagggtgggcaagccccgacactggagcttagcctgagagggttcttggcctcccccaggaaagatttcaaaggcaagcgccagtggtagggtagaagaaaacagctgtggtcgggcacggtggctcacgcctataatcccagcactttgggaggccgaggcgggtggatcacctgaggtcaggagttccagaccagcctggccaacatggtgaaacctcatctctactaaaaatacaaaaaaactagctgggcgtggtggcgggcgcctataatcccagctacttgggaggctgaggcaggagaattgattgaacctgggaggcggaggttgcagtgagccaagatcacgtcattgcactccagcctggtcaacaagagtaaaacttcatctcaaaaaacaaaacaaaacaaaaacaacaacaaaaaacaaaagaaaaacaaacaaaaccaaaaccaaaacagctgtattgaagctgcagtgttgcagctctgtgactgccctgcagagcagggctaccccataggcagcgagcagcagctcagggcagttctgcagtcagatttatacccacttttaattacatgtagattaaggagctgcatatacaaagatttctagggaaggagtagtaacttctgggtcctggggtctttgccacggaacagggcagtatgccagggtgttgccacggcaatggtaaactgacatggcaccctgggggtcatgccttagggaaagccgcttccactcgcccctgttttagctcatcttcaagttagtctggtgtccaagctccaccgcctgcctcagtctggtgacctccttctgtgtctgatgagcatggcagcgttgggaccttccccttccaactctctccctcctcttcgtcctccctaaaggacgggtacgaggaggggctatcacgccagcgacatcctctagcaccacccaggtgtgtggggtggggcaggggggcgacgaagtatccagcccagggccacgtagtcaactgccaagggcttcctgggcttctcttctgccccagagcttgtctccacccagcaggggttcccccagcgctaactgtatccctaaagttctgatgtactttacttttccatcttccttgttgttaacatctaccttctgctctgtaagcaaaactaaatcttctgtgctttgtccataggttgattctacaatctgaaaatcaataaacagcatttgcatg

SEQ ID NO: 7091 - DNA, 33 bp, Homo sapiens
ggggtgggctgtgctcagagcagggagcggggg

SEQ ID NO: 7092 - DNA, 1422 bp, Homo sapiens
aggctctctgaggcgaggccatttgtgtcacactggagaagggatggcaccaccctttgttttggcccacaggaaattttcatcctcagctgtccatccaggcccagaaggtgctgcccactgaaaggaaggcagtgccggggaggtcatcctcactttgcattttcttttgtcatggcaatggttctggaaatgtatgatgcaatgtatcacacttatcagtgcccaggcaacacaacttgattatggcaatattttcagaatgtgtacttttcctattgaaataccatgttcattcctctggctcagtttggtgatgaaaatgttttgaaagataatcgatacgtatatttcacacaaggattcaggttgctgttgaacccttgctggcattgataccaacacaagtgcggctactagctggtcccatcacggggcccctgttttgcatctttggcgatttcctgtcaggacctctggccctactaggctgtagactcagggagagcacagtctggctgtgctgccaaacctctcctctgctgcagtttattccaaacaggagccccctggctgtcagtgcacaataatagacacacatttcttcaacgttccattcctaggtgattttcacatttttagttcctcagcatattttattgctgtgtgttgacacaatctggtataaaaaactttctctggattcagaggaagtttgaggaatcaggagaggaccaggccttctcctgtgcctgggtgaaggtacagacctcgctgtgtctccgatgaggtcagaagtgtctctatttcataccacaaaggaacccaagtgggagtagggaacagatggatggcgcgaagacctctgtgtctccccagagaaaggaagaaacttaagaaccatcatagcctggtcctccaacatcttacagatcatgttttccaagagaaaagcctgtgttttcagaaactctgaattcagaaaaagaaacggaatgtgcgtaagaatcaggccactgcctggaaagactttctctcaattcgtagcctgaggctcagtgaaggaaacatgcagaaagaatgcctgagacgcccccagggaataagggaactctttataacctgtccagtgccgtcatctgggatttttctctgaagtacaagaatttcaggtgatttaagctgcttgatcacacttatttgtgcaaaattgattttcatttaatgttaatgttttcctgcttaattttatataacttcagaatgtaaagagcttcaaggtaaattacagggtgtttaacctggggagttaaatgtgtacacttgaattaataggagcaccggttgttgctagtataaagtaatttgtgtggcagtttgtactgtgctgagtttttaaaataaacccaatattttaaagta

SEQ ID NO: 7093 - DNA, 1154 bp, Homo sapiens
aaaactggatacaaacgaggcacttaatacatgtatataatgtatttcttttgtacagtgaagacaaaaaaaatgaaaactcttcctatctacctttattatggtagcccctagaacctttagtgtgctttttcatccaactttttattgttaatagactatttctgttaaacctgaattgttctttgatttccctgtggatttgtaaggtgtttttcttttttacgcatttagcataatcagctgattaagaatggaaaagttaggtgctttagaccaaataaggcactggggcatggggtaggggtgggccaccaagtatactgaattctaaggctagctgttcctgacatatagtagggcaagaccatctcctggaaccttactgtctcagatcaactactctaccactctactctaagatgtagtgagagtagcggagtcactgacctctttaaatcataggacaggaactgcataaaggttcttgaattctgcaggacaggaaataactgtattacctgctttgcaaggtggctttaagaatcactgaatcactgtggcctcacttgacctagtcatggcaggacaactagtggttagttactaactggactcttgactttagaacaaacatgaggagcctcaaatacttgtgttcatttgggaaagctaccattgatttgggaggtaccacaaaccaggtgctatgttaagtgcttccttgaattctcattttattctaagaaccttgtttatagaagagaaaactgaggtttggacggggtgagtaacttgcctgtggttacacagctagtaagtggtagagtcagtgtgactgactcccagcttggagttcttcccagaactgggttatagagtctttccggccgctctccgccacctgcctcatcccaagtaaagcacattgagacagctgcaaaacaaactgcttctagtgctcaggagtctgttttttattaaacaaaacaaaactgcctgaattaagcagaggctagattagaggtcatgtgctttccttcagtggtgaggttaggttctacattccaaaatcaaagaaggggtttcaggaatatcatcagttgctttgcagatggagataacttaaaataaaagatactgatcttttgaga

SEQ ID NO: 7094 - DNA, 45 bp, Homo sapiens
tagtagggctagttccaattctcattaaaccacattgtaaacagt

SEQ ID NO: 7095 - DNA, 49 bp, Homo sapiens
ttattttcttgtttgagcccctcccccaataaagaatttttatcgggtt

SEQ ID NO: 7096 - DNA, 516 bp, Homo sapiens
gctgcctttggtgggaccacccggccacagaaatggcggtgggaggaggactcttctcacgacctcctcgcaagaccgctctgggagagaaataagcactgggagattggaagcactgctaacattttgaatttttttctctttaattttaaaaagatggtatagtgttcttaagcttttattttttttccaacttttgaaagtcaacttcatgaaggtataatttttacataataaaaatgcactcatttaaagagtagagatgactttgacaaatatgcatgcctaggtgactaccactccgatcgcaatagataacattgccatcgcccccaccagtcccctcatgcctctgggcagtccaaccacttccctgtttccaggccagtgatctacttctttttcactatttattggccttgcctcttctagagcttctagaacttcatataagtgaaatcatacactctcgtgtatatacttcatataagtgaatatatactctcgtgagaactt

SEQ ID NO: 7097 - DNA, 253 bp, Homo sapiens
ccccagcacacctctggctaacccataccccacacctgcccagctctggcttctctgttgaggattttgaggaaaggaagaaacactgagacaggggtatggggaagagctgagcaaagagagaaaggaggtagtttaagagtccctgaccctggaggactgagatcccacctccttctgtaattcattgtaattattataatcgtcagcctcttcaatggcgtaggaaagaagaaacaaatgcttgaatctc

SEQ ID NO: 7098 - DNA, 225 bp, Homo sapiens
tttatttcttcaatgcctcgacctgccgcaggggtccgggattgggaatccgcccatctgggggcctcttctgctttctcgggaattttcatctaggattttaagggaaggggaaggatagggtgatgttccgaaggtgaggagcttgaaacccgtggcgctttctgcagtttgcaggttatcattgtgaactttttttttttaagagtaaaaagaaatatacct

SEQ ID NO: 7099 - DNA, 817 bp, Homo sapiens
ttcctgccctggcttggcctggactcgccctgcctccatcacctgggcccttggtctggactgaattgcccaagcccttggctccccccggcctccctcccaccccttcttatttatttcctttctaactggatccagcctgttggaggggggacactcctctgcatgtatccccgcaccccagaactgggctcctgaacgccaggaacctggggtctgggggggagctgggctccttgttccgagcccttgctccttaggatccccgcccccacctgcccccaatgcacacacagacccaccgggggccacctgccctcccccatcctctcccacacacattccagaagtcagggccccctcgaggagcacccgctgcagggatgcagggccacaggcctccgctctctcctaaggcagggtctggggtcacccctgccctcatcgtaattccccatgttccttgatttctcatttattttttccactttttttcttctcaaaggtggttttttggggggagaagcaggggactccgcagcgggcccctgccttccacatgcccccaccatttttctttgccggtttgcatgagtggaaggtctaaatgtggcttttttttttttttttcctgggaatttttttggggaaaagggagggatgggtctagggagtgggaaatgcgggagggagggtggggggcaggggtcgggggtcgggtgtccgggagccagggaagactggaaatgctgccgccttctgcaatttatttatttttttcttttgagagagtgaaaggaagagacagatacttgaa

SEQ ID NO: 7100 - DNA, 523 bp, Homo sapiens
cccactgtggggccaggctgggccgggcgctcctggtgtgtgactgggtgtcctggccgtcatgtgcttgctcttacagtgcctgggctcagcctaccagctgctgccatacaggagattgtggccactgtgactctcaccagcagtgcctggttcctcccccttccctcaggggtagacaagggacctttgattatttttagctttgtttttttataagcctttttgggggttaaaatagagtttcttacatttttgggacttttttaataggcatttcctcttttatatgaagaattcccatccattgggccccttctaaccccagaatgtgacctcctcctccagttacccacagccctgccctttgcagggttgggggtggtcagcggtaccccggggttaggcatcctagacagcagcctgaggaagctgggagatttgggccatgtagctgcctttgttactctatttattttagtcacttgtataaaacaccaaataaagcaatagaggcaaactc

SEQ ID NO: 7101 - DNA, 597 bp, Homo sapiens
tggcaccaactttagcctggaacttccaaatgacaacatgatttgggaactgagcctcagggtcctcagcctatcccctggagcttggatactgtctgcacttcaaggcaggaattctcaagggagacttgtttgaaaatgagtgtctcactttcccaccctatccttcctccccactctgtggacttgaaattgaatccattacggttggggatgggaggctgtctgtgtcccgacacataatctctgtctcttggacctgccaccatcactttctgggtcaggattggaattgggatggaatgggacagttgtctataaaactctagtgtaaatattagcactcccctccctcatcttttcttctatttcactccccatttattttcttctacaccggttgtatttttaattttggacttcccctattgggcatggcagctcaaaggtggagtactagagcctggccaagtgaggaaggaaagcagaaaggtgacgattctcactcacctcttttgtttttaataatatcggccgctgtttgtacagacagcctgcgtgttgtaaataaagcagagtgggctcttttgtgtttat

SEQ ID NO: 7102 - DNA, 434 bp, Homo sapiens
agctgctgcccctgagctggaggggggtctcattctacaaagagagaggtggcccccctttcttgacctcctcctccttcaagctcaaacaccacctcccttattcaggaccggcacttcttaatgtttgtggctttctctccagcctctcttaggaggggtaatggtggagttggcatcttgtaactctcctttctcctttcttcccctttctctgcccgcctttcccatcctgctgtagacttcttgattgtcagtctgtgtcacatccagtgattgttttggtttctgttccctttctgactgcccaaggggctcagaaccccagcaatcccttcctttcactaccttcttttttgggggtagttggaagggactgaaattgtggggggaaggtaggaggcacatcaataaagaggaaaccaccaagctga

SEQ ID NO: 7103 - DNA, 345 bp, Homo sapiens
cagctgctccccctccacctgagttggggtgggggggaaagggagggcgagcccttgggatgccgtctgatgccctgtccaatgtgaggactgcctgggcagggtctgcccctcccacccctctctgccctgggagccctacactccacttggagtctggatggacacatgggccaggggctctgaagcagcctcactcttaacttcgtgttcacactccatggaaaccccagactgggacacaggcggaagcctaggagagccgaatcagtgtttgtgaagaggcaggactggccagagtgacagacatacggtgatccaggaggctcaaagagaagccaagtc

SEQ ID NO: 7104 - DNA, 471 bp, Homo sapiens
cctgggatctccttgccccagcctgacaggctatgggagtgtctagatgcctgaaagggcctggggctgagctcagcctgtgggcagggtgccggacaaaggcctcctggtcactctgtccctgcactccatgtatagtcctcttgggttgggggtgggggggtgccgttggtgggagagacaaaaagagggagagtgtgctttttgtacagtaataaaaaataagtattgggaagcaggcttttttcccttcagggcctctgctttcctcccgtccagatccttgcagggagcttggaaccttagtgcacctacttcagttcagaacacttagcaccccactgactccactgacaattgactaaaagatgcaggtgctcgtatctcgacattcattcccacccccctcttatttaaatagctaccaaagtacttcttttttaataaaaaaataaagatttttattaggta

SEQ ID NO: 7105 - DNA, 381 bp, Homo sapiens
gtatctgccagtttttccaaatgacctgtaccctacccagtaccctgctccccctttcccataattcatgacatcaaaacaccagcttttcaccttttccttgagactcaggaggaccaaagcagcagccttttgctttttcttttttcttccctccccttatcaagggttgaaggaagggagccatccttactgttcagagacagcaactccctcccgtaactcaggctgagaaggaaccagccagctcttacctcctcctggttgcttttcttgcccccaccccaagtttatttttgttttcccccggccccctacctctgaagccattttatgatctgtcatgtgccacctgagcctccagtaaaaacaaaaacaggc

SEQ ID NO: 7106 - DNA, 97 bp, Homo sapiens
ccatcagattatatcttcaacaccacaccccccaccccatcgtgggtgagggtatcccctgtgtgtcccaggccaataaaatctacctgccactgcc

SEQ ID NO: 7107 - DNA, 491 bp, Homo sapiens
ggggtgagacaccactactacaagcacagtcgggccgcgggcccatggactctgagtggcgactgcctccacctcattcccgtgactcgtggcatgcgcaggtgctggagcttggcagccgcgcaggagcatgtaggcaggctctcagatgtaggtggcaagtggcacagctccatgtccggaggcccagcactccgtctgatgggaggagtcgtgggagcccagctccaggccctggtacccctcttcatgcactgatttggggaacatgactcccttttactcccctaccccacatcacttaatttatttccgtttttgtttctggttactgtgaatcccagaggagtctctccctgtgcccacatgaagctgctttttccggggccaccgggcgggagtggggaagggtgggcgcacggaagatgggggcctctgtacagttgttactgactctgatttctaaggagccaataaacaccgtctcagag

SEQ ID NO: 7108 - DNA, 649 bp, Homo sapiens
aggccaccatggtgtgaggagaccatcacctcgaccagaactccagatggtcacctgccctggcccctcctctgggcagcccctttcctccatgtacactgcaggggacagaaggggggccccatccctaccctactccctggccgcctgcccctgtggttcccaaggaggggtatgtatgagagccgctctcctgctacctcccaccactgtcccagcagtccctcggcacacaggcatatcagctttcacactttccccatgcactctctcccacccccttccagggcctctgctccaaaggaggcctctggaacccaggactctggggttttacaagagggctggggtgtggaagggcaagctgcaccaaagacggtggatatagccaccgcccccccgccgctgcctagcatctgcttggccaattagttcagcctcagaccatggcactttgagggggtctctacctccccatcaacagctgcagggggaccccagtgccaacttcctctcccactagggccctgccttcagctggtgcttgctgcgattcctgtgccttatgtaactgcccttccttcccttgccctaggaaaaaggctgcatctttatatgttacattcatataaactttgtaactttttgg

SEQ ID NO: 7109 - DNA, 88 bp, Homo sapiens
gctcccttttgcttaattactgggttttctgggcagttttttttttaaagagttggagtaagaagaggattaaaaaggaaaggcaaat

SEQ ID NO: 7110 - DNA, 2560 bp, Homo sapiens
accctggggctcaatccccctttcaccagatgccaccctccctgaaccccccaccactaccagctccctggcctccctgccccttgggagccccttcacactcttgtgcagggacttgggggcccctggagctcaggggtcaggctgctttgtgtgagatgtagttttcccatctcctgggaagggatctttcgaggttcccctctcagtcttcctccagggaatggcctccatgaggggcagggccagcttccatcccttctccagcccttggggcaactgagcaatatacttaacctgaatctctactcacagcccccaccagctctgaatgtctaacctgctcccctgattcgtaaacctaggggaaaccatctctctcacctaatgacccgccttgttctgaagctttctctaagcccttcccagttgcttcctagcacattccattctttgtggcccagggcctggaccagaccattgtgatacctgaccccgcccacctgggagtgtggctttgggtttcatccttccccagcgtgggtctctacgtccctgtttcccttgtatcaagacaccttcctcagcttccatgcctttggatcttccatgttcctccccatattcctggacttcggagatggcctctcccaagccaggtcaaggaggtttgggggagggttgcccctctgcccctctgttctgtggctgagcactttcccagtccagggcagggaaatattggccctatcttgacccccaaatccagtgagctccagattcttccaaggcaaaagaggtaagcagatcacacctctttctgcctctacatatggcctattctgggctagaccagatttgggggccaggagggaagaactccatatgggatggagaagggaatctactttctccctgtttttttttcctgatggtttctcccagactagaccaaatagccagaaaaatgataggggtcggatgggtgggtaagcccaggatttgcacatgaccttccatccttacctgtattcccatctccccagtgtcactcccctcaccaatcactccagatggttttgggggaaccattctactcttctggtgggctttggggtatccccaccaactttcccttcaaaatagcaccttacaccccatctttgactcagttccccacacccaaagatcccagcctagggatggggtacagggactttaaatagtccctaatccctaatttgcactagttaaccctggtcagggtccctgtatttccttccagtgggggagataaatgtttgctcctaattctctttgaaaactgggcctccctgctctgtgattggataaatatttcccatcccacccacctccccccaaaaaatagctcacaaggggagagccagtatgggggagcaaatttgacaaatgggaattagaggagtgcagttttaaaaggaaaagttgctgtcatcaaaatggcagccttttccccagctactgtttttggggccaagatggctgccctagcagcaatcactgccaagggcaagatcatggcttttggagggaggtgagtttagggagggccaggaccatcctcctacccctcataccctcccagcatatacaaaaggggaggttttagacaggctccctgaatgttaaccacagaggagtcactccttcattcctcctctgtctctttgcacttttcttggtcttggccacagcctgagtgacgaatttcctactgaatgtaccaagttccaatttttaagggggggaaaggtttcaaatggggaaaaacacacaaaaaaaaaaatcactaaaaattcccacaaatcttgtttctggcactttagaaaaactgcaaaaaaatacgtaataaagaatacatatatatatatctacacacaaattatatatctatctatctatacagcggaaccacaagagagactgaggaaggcctggaggcaggggcagaggtgacgacagtgcccctatatccttaacccatactcctctgaggcaaacaggcatgggaaaatggaagggttgaggatggaccggagaattggaacttcagaataggtcaaaattccaaaaccatggacatttttttttgggagaattgagattgtagacattttttttttcttaaatatgatcaaggaaaatagcttccagaatgtggtggttctgggcaacaaatgagattgtggcgacgtggagattaaaatatatgtatttgagctggggaatttgaatattgtgagtttcagatgttggaaatttgggattttgcagttttgtcttttgaaaatgatcaagtcttgtcagttcgtgccctctttccccatgttccctgggaagacgggtggtggcagagtgagaaggccactggttctgtgccgcagcacgcaaaatttagaattctacagactagctctatacgtagtgaggacccagatttagagaaactgaccaatatttatctccgcatttgtgtgtgtgtccaactctgtaggccaataaaccaacaagacaaatg

SEQ ID NO: 7111 - DNA, 198 bp, Homo sapiens
ccctcatggacgcagacctcacgggacgggcctcatcctccttttttaatccagcagcatcccctaccccaggctgtcaaccctttctcctgttggactacagttcagaggcagcctgcagtcctcccatgatagccagggagagccgcacaacatacaattatatttttggtagtattaaacagttttgtattattc

SEQ ID NO: 7112 - DNA, 600 bp, Homo sapiens
aacctccaacctgcacccctcccttctccatctcgcttgctgcccaacaccatggccctcacaggcccaactgacctgcgctggagctgctcttatctaggggggaggggggtggcacagcagcttgggtaccccccaacctccaggagctagtggaggggtgtgtaacagggtcataccccctccctcttgtccaccctacccccagggtaaggggagcctctctccttccccatcagactggatgtgcctttatcctctaatgccccaatctctctctgaacacccccattctccacctgttggtggggggtgctcctcgacccacccagatttgaccgttcagggggcctcccctgctatccctcctcccatcctgtaccccccatttctggggcctcatcactgtggaagacggggatagtaagagataagtgggtgggaggcacggggaaggttttggagtagaaccaggggtgtgtatgaaggggggtgacaaggtccccctggggaggggaccaaccttgtctggtggatgagaaggcgtatttatttttcactgtacagtatttaaaaagagaataaaaaaatccaaatggc

SEQ ID NO: 7113 - DNA, 209 bp, Homo sapiens
cgccatccctaggaggatctctgtcttgagtttctccttccccatcagctgaagcactcttcagagactacgtccacagacactgatgctgaggcctccctggaggaaggagggttaggggtgcctatcctcaagtattggaagagcagaattgagggagagacctttcttccttgttgagggtgaaaaataaataagaattacatgtc

SEQ ID NO: 7114 - DNA, 1207 bp, Homo sapiens
cattctccacttcttgttccccactgacagcctcccacccccatctctccctcccctgccattttgggttttgggtctttgaacccttgcttgcaataggtgtgcgtcagaagcacccaggacttccatttgctttgtcccggggctccactgaacaagttggcctgcactggtgttttgttgtggggaggaggatggggagtaggacataccagcttagattttaaggtttttactgtgagggatgtttgggagatgtaagaaatgttcttgcagttaagggttagtttacaatcagccacattctaggtaggggcccacttcaccgtactaaccagggaagctgtccctcactgttgaattttctctaacttcaaggcccatatctgtgaaatgctggcatttgcacctacctcacagagtgcattgtgagggttaatgaaataatgtacatctggccttgaaaccaccttttattacatggggtctagaacttgacccccttgagggtgcttgttccctctccctgttggtcggtgggttggtagtttctacagttgggcagctggttaggtagagggagttgtcaagtctctgctggcccagccaaaccctgtctgacaacctcttggtgaaccttagtacctaaaaggaaatctcaccccatcccacaccctggaggatttcatctcttgtatatgatgatctggatccaccaagacttgttttatgctcagggtcaatttcttttttcttttttttttttttttttctttttctttgagactgggtctcgctttgttgcccaggctggagtggagtggcgtgatcttggcttactgcagcctttgcctccccggctcgagcagtcctgcctcagcctccggagtagctgggaccacaggttcatgccaccatggccagccaacttttgcatgttttgtagagatggggtctcacagtgttgcccaggctggtctcaaactcctgggctcaggcgatccacctgtctcagcctcccagagtgctgggattacaattgtgagccaccacgtccagctggaagggtcaacatcttttacattctgcaagcacatctgcattttcaccccacccttcccctccttctccctttttatatcccatttttatatcgatctcttattttacaataaaactttgctgccacctgtgtgtctgaggggtg

SEQ ID NO: 7115 - DNA, 44 bp, Homo sapiens
ccacgatggcgcttacctttcagacttcattaaacttatgaccg

SEQ ID NO: 7116 - DNA, 48 bp, Homo sapiens
agtaatcttatatacaagctttgattaaaacttgaaacaaagagcctg

SEQ ID NO: 7117 - DNA, 393 bp, Homo sapiens
tctgtcgcgggcgcagggacccaacccggtgtcgctgcacccgcccgagccccgctcctcgcagccgcctctcccgctccggatccctccacgcagcggccggagccagactagccccgcccaccaacgagtcccggcttcgagtagtgatacgcatgaacaaagccatatccttttgcagtggggtcgagagagaaagtagcacgcccgccccctgctgcgtctttctaggcccttcttgcaaatcccgggcatgagctactcgccgtcggctctctgccacttcgtctcgctccctactctcctccccttattcccgaggcccagaaaagaaaacaaaaacaaaaacccagcacatacaagaaacatacagtgtacctcaaaaggggccct

SEQ ID NO: 7118 - DNA, 257 bp, Homo sapiens
agcaacctacctcaagtctcaggagaattcatgtctgcctggggcccttccgaacctgtgccaactaagggcccccactgtaagcccccgcacccccaccccctgcccagagcaacagcctaaaggcctgccctgatgctctcctcctaccagagtgaagcccacagagtccctccacctccacaccaggccctctctccagttttatcccctgcctaatgctgcgagaagcacagaataaactttttgtcactctc

SEQ ID NO: 7119 - DNA, 135 bp, Homo sapiens
gagcgcgcttcccgtctctcctctccccattctgtgccctactattttcaacaaaacaaaacaaacaagcaaaaaacacaaaaacctcagagaccaaaacaccaaacaaacaaaaaaacaaaaaaccttcctttc

SEQ ID NO: 7120 - DNA, 726 bp, Homo sapiens
ccacccccaaataccacccaagaagaaagaaaggtccaagcatgaggaggaccagttcctcaggtcctccagacccttccatcctccctgttctcagttcacctgaaccttctcttctgcacatggagacttttgcagccaagatggctctgacatcatacaaactgggccctgagctgtgagagaccagcacagcagcgtccaggttaaaagccgctgaccaaagtccaatgcacaatagcccctccgaaaggaaggaaccgcttcacttcttgccccacttggggcagcctcttgttccagcctcttggaatgcccagcttgggtttctgagcttttctccctcatcctccccaatccccaaactccttctcctaccatgcctttctacgttctctttcttccaagcctagagccaccagcccagcttccttctctggaaaagcctggaaactgggcacagaaggactgtgtgcctgggtctaacatgtggtcccctttgtccctagcacctttaaggggaggggaagaattggagggcagcttgcctggacccctaacggctgttctcaggaacaggttcccaggcctggggtgtttgtggagatctgtctttctccaaagatttcatccaactcccctttcatcccactccctttcatcccatttttttctttctgtccttgagcccagtgagttcaataaaaaccaaaatatttggctctc

SEQ ID NO: 7121 - DNA, 590 bp, Homo sapiens
gccttggggggtggtgggggcggggtctaggggtggggtagagactccagcccgagggcagcagagggacccgggcgtccgggcgagcaggtgttggggagggcagtggggcgcgcgggctcagcgcgcgggtgagatgtggtctatattagagtatctatataaatatatatttccctggttcctgtcccttttccctgccccaacttctcccttgcgtctaggattgtactctctctgcccctcagcccagtcccagtcccttcccgagtccctagtgcatggaataaagtggttattaaatccccgtgtgtccccgagccaggggcctgcctttatctcgacgtccacgcccactttcccttcccttctgtctcccaccctcagtcctgctctccatggcccaagccccggggcagacaggtaagtaaagaagagagcagagcgggaactgagatcgaaattgaaaccaggtggaaagagagagatagggtagggggagaagggatgggggcctttaagaaaaaaacggataaaaaggaaaaattgaaataaaatcgactctggtgggattcgaacccacaaccttt

SEQ ID NO: 7122 - DNA, 596 bp, Homo sapiens
actccattctgggaccatctccaggagtccatgagaggctttcttctcctatgtcccaattctcagaactcagatgtggctagaccaaccagtgggaaactgccccagcttctcccaccatagggggccggacccccatcaccagcctaggatccaggggctgcctctggcctcttagggagcagagagcagaactccgcagcccagcccagaggagtgtcacctcccacctttggagaggaatccttccctcccctggacaaagttgctgacaagctgctgaagtggcctctccatattccagctgagcctgaatctgactcttgagggttggggctgcacttatttattgcggggagacagctctctctcccacctcctccccagatgggaggagagcctgaggcccaagcaggacccgggggttccagcccctagctgctctggagtgggggaggttggtggaccatggagtccctggtgctgcccctcaggtgggacccaggcgttctcagctgtaccctctgccgatggcatttgtgtttttgatatttgtgtctgttactacttttttaatacaaaaagataaaaacgcc

SEQ ID NO: 7123 - DNA, 1709 bp, Homo sapiens
atccccgaggagtctgccctgcctagagaagggcctctcccccaaccctcagccgttcctccacctctcagccatatctttcagcccccactcccctggatccgtgtgtgtgtgtgtccgtgtgtgtgtccccctgtaaatagccagctgttatttatacatatataatattatatatatttggtctgtttgtagttttattactagatgatttttccggttgtccttaacaccccttcctgaggttcccttcacccctctctcttgccttccttccctttccctttcttcctgactagccccaagtcccttcatttgcatctgctatgcaatagtccctctcctttccttcttcttccctcagatttagctgatccttcctcccaccctggccttcctttcctctttcctcctcactctccccgtcatgctccctctgccccgccctcaaaaaaaaaaaaaaaaaaaaaaaaacaacagcacctgtccaggcttccttaggtacatcttctttgtatccattgggaggctctgagactggccccacttggtcctaagaatcccaaggtctttgggagcgtccagcatgttaattagcgtatcattacatactgctatccctttccatttctttttgttccatcactcttctctcaacctgtgtttctttttttactgaggagttagtccccattagttcttgtatcacattttcatttgcacgacattactcgcaggtggtggggagcctgggcttttggggaaccaggctgctctggtccccagcattgcctcctcctagcccctctagtccagtttgcctcccttaccctcattttccaaacctcttgtaccctcctctccctcccccagctggtatgtaagtgtcttgaagttcagtatgttatgatggaccaataattctgccacttcgggtttctccctacattcctgctccccagttttcatgtggggtactcaactgacattcccatggggtttccctcccatctgcctgatccacctcctcctcccaccaggagagttgggggttggccacaattgatctcttgtgagaggggtggctaccagtgtgtgtgtgggggtcatcactgccttggggaggagtggggcagggcagagaatccccccaattcctgcctgaaatctctggcctcacccctgctgggggttggactgaaaaccctcctccccaatttggggggtgttgccccatcactgcccagctcctctgactgccccccctgaatttagggtgggggtactagtcactgccaatgtgtgtatgggacttgctggaaaacggggatgcttgcccctctccaggactattgagcccagagagagctgtcctctcattgggtgaactgattgaggaagggtctattgtctttttaaatggcacaattttaagggtttgagggtacagtcccttaacctgccacgggagggggcccccaaactttcttccccccacacttctggttttctgtgtggagggggagcagggatatctaagctgtggtgtgaaagggtaggagagatgctggaggtgggggtgctgtgttttagaccccccatattatcccagtgtcccctgcccccctcttcccccaccccatgcccccaattctgtggcgcatccagattgtgaaaatgtacaataaatgtgtaatgagtaaccaggt

SEQ ID NO: 7124 - DNA, 958 bp, Homo sapiens
ttaccttcatgacgggaacctaaggacgaagcctacaggggcaagggccgcttcgtattcctggaagaaggaaggcataggcttcggttttcccctcggaaactgcttctgctggaggatatgtgttggaataattacgtcttgagtctgggattatccgcattgtatttagtgctttgtaataaaatatgttttgtagtaacattaagacttatatacagttttaggggacaattgagatggctgaactactgaataaaaaaaaaacaacgctgttttctagtcctgcagaccgtaagatacttggtatcgcttctattttggttactacggtaggtgcctggcggaagggagtgggcggagatatgtaaatagaaagtgcgtacagttagaacgtccggcacgtaactgatcggagcattctgggaagaagtaatttattccttttcggcagccgaatgaaaaaaaaatttaaaaaaatgtgcgagctaatatggcaaaacaactggaaggacgctaaataataggattgctcataccagcgcgttatgaactcaccctagcttgtaacggaatctttttcactgagtgcagaatgtcggctgtttgtctgtatcgtcaggtgggataatccttacctgttcctcctccggagggcagattagaacatgatgattggagatgcatgaaacgtgattaacgtctctgcgtaatcaggacttgcaacaccctgattgctcctgtctgattctttctgacgatcacttacatttgtgttatgctgattagcagatatccacaaacatagctatgaagttctgactgggataaccttgctgtttgtctattttgcagtcttgctattgctgtttgtctattttgcagtcttgctaaatttgtttgttcttgaaaattgtgatttggtttttgttgctttctggaatttaggcagtgaaat

SEQ ID NO: 7125 - DNA, 733 bp, Homo sapiens
ccaggaggacaggagaggccggtcctggccagggcagggcccagcaggaccctaaggactcttcagggagtcctggtgggaagtgcccactgaggggaggcctgtgtgttggaggctcttccagatgcgttcagctggcccgtgcccactcgctgggccttaggctggtgtatgtggggaagttctaacggctctcctggtgggaagggatgttgctctgcttgtattcagttggccatctgtagctaccctgttcttcccaactctcctccctagctagagcaccagccctgggaacacggggctttaggtctgcttgaaggtgaggacgtgactcccacatgtaatcaggagaaagggacagaggaagccccagcccccactgtggctatcctgactccagtggccacatctcaggtgccaggggctgtgggagcttgtgccgtccttggccaaacaccccgcaggcaaagatgcacccctgctgatggagagccttctgcttctgccctctggccctctaccataccacttccccagccagaaccggcgtgcagctaggaggaatgggttgcacggcggagggggtgaggtgggaggcgtctcactgctctcagggttcaggtagaatgttgctggttttgaagctcacctgttgtggagtgttctaatcagttttggctttctgagtttttgtggaattaaagtgctgctgctgcgaaggctgaggctg

SEQ ID NO: 7126 - DNA, 139 bp, Homo sapiens
tggtccctgtcattcactcgggtgcgtgtgtttgtatgtctgtgtatgtataggggaaagaagggatccctaactgttcccttatctgttttctacctcctcctttgtttaataaaggctgaagctttttgtactcatg

SEQ ID NO: 7127 - DNA, 1305 bp, Homo sapiens
ctgaactgcaaggatggcctgagagtccttccttgctgaaaacctgaaggcctaggtcctggctcctctccctacttgttctgtgattgaaccaaggactccagattcacaaactgctactccactataatttcccttctttggtgttctggtgccagcctgccttggcaaaattgtggcaacaggaaatcatggccctattaatatgtcctctgattgggacaaggcacctgcattcacaggcggccctgagcacctgggttctgactttgtcgcaggagctgagggaacaaaagacttgctcgctgtggggtgatggtgacaggcctattgacctgcaatgaagccctctggtgtcatttctcactggtactcatctctggggtcccaggcctcctgactcctagttgtccacctcctaggaactcctagtcgttcatcatcatttcagccctttgccgccagggccaaaggtggaaagtgatttggaagagaagagcttttcgtccagcagaagaaatggtaccaaaatcagtctgtaaaggaagtaaattggggagttggcggcaaggcagagagcatagctatgatggtctcagtcagtaaggctgggccctgcaggaagtcaaatatgaatgcctagaggtgttcacaagcacaaagaaggtgtagggggaggcaagtgccaggcacaagcaggggcaggtgaggactctgggtgactgtgctatagggccccaggctacggttagccctgtaggtttcccaagggcctggcctaaggcagatccttgatcgatataccttgagaccagaaggtgctccgaaatcacaaccgtacaattaggggatctaggaacaattctttggagataccaatgcctttggctggtgttgctgcatttctttactggggactgatagatggagaggtggaaagatgagctgaggcacatctttcagagctactgggaggccatttcttcctggctgttaggatttgttcgtgtttgggagacctttagagcgtggttaaacccatatgttgggatttatgctgcttttatggtagcaataccctatattaagatttgaagtagacccggaaagttagtggccggttagctcagttggttagagcgtggtgctaataacgccaaggtcgcgggttcgaaccccgtacgggccagtgggtggcttttttttgtgtgtgttttgttttctgaccctctgctgttatccggaagtttctacccggagccagttgccttctggtaacagaattatattgcacctactgcttcc

SEQ ID NO: 7128 - DNA, 1852 bp, Homo sapiens
gatacccgcccgttccttcctccttacgggggctgattgaaggtaagcaagagatcagtctggtactggggcagcctcagcaaggcctgatgaagtgtcacgtcctttgctacctaaggggatcagagtcaggatgcttacctggatctctgcgtccccgctaccgcccttccaggacattacacactctcgggccctcacctgctggttttccttagctatctgctgcttgccagagaggacccaggcttcttgacagcggcccctcagggccaggttctccaaactgagaggctgaacagactccacatggacagccctagccccctgcacgccaccaacatcctcaaagtggtacctggagtagggaagcggggtcaggaagggacatctctggtcgcctccccgggagcatctttaagttgcaggcctggctcccggcccgtgcgtggtctcaccgcccggattaaccgtcggccgcgggccccgcccactggtccgaccccgcccctgccattggccagccgggggccattccctcaccgcgcagccgcttcgccccgtacgtgggcctgcagctcgagaagttccactatcaggctctggtccgtcacgggatggcagaaaacttcttgattgtccgggaccggtcggaggtcgctggagtgaggcgaggcagaccctggttgaccccggtctcttcccacaacccacccagtcagccgcccctgggcgccccggccttctcaccttacgtcaatggcccccatggggaggatggcggaaaaggcgcccccgaacagcgggcagtctctcgtgggctccatgggtctgaggctgggttatgggcattagaaaggtttaaaagaagtccacattgggtcacgtggcatcggctccctgggtttcgcagctgccaccgccacccgggtctggcttagctcccggatcctttaagatttggctccgccctgcgctctcgttggccaatcggcgccaagaccctgggggcgggggtcagcggctttgctccggaagccgcgctcttaggagtgcgcctggcgggacggtggggtctgccttggggttggacttagggttagggtctatgtcgcccccggtggtcacgagcatgctcccgccagcctcctcttgattgattgattgattgattgattgacaggtctcgctgtgtcgcccaggctgtaatgcagtggcgcgatcaccgctcactgcagtctccacctccaggactcaagtgatactcctgcctcagcctcttgagtggctcctgctcccgccaccacgcccggctaaatttttaattacttgtagaaatggggcggggtggggagtgtctcccaatcttgcccaggctggcctcaaactcctggactcaagcgatcctcccgcctcggctccctaagtgctggaattacaggcgagagccacagcgcctggcctcctcgtccttttcaagtggtcacaccttccaagaaggtcgcctgagaccctcctgaggggcaggtgctcgtcaaaggggcccacgtctaggtagggtctcttgagtcaggaaagcatagtttcacggtgttctgggcctctgaaagaagaatgggctgccacccagaccgctaattcatagatctgctgctgggaattaggggaacaatgcgtccaggttaggattcaggtctcacatcttcctgaaagtgagagccaacctgggtattagaaatctaattcctctcaaatatttgccttgggaatgctcccgggcaggtgcaaccccacccccagctccacacacctggacagaagcacagattaaaccctcttttgtttgtctttt

SEQ ID NO: 7129 - DNA, 479 bp, Homo sapiens
acagatggctgctgggtggacagtcacaggtgtctctctgagcatagtcatctgagaactgttgccagaggccccagaggaaaagattgaaggctgcactctcaggtcaagttgtacatggcagtccttgctcaaaaagacaaaagttcaggtctgtgtatttattcttagggctgccataaaaaattaccacaacctggccgggcgcagcgctcatgcccgtaatcccagcactttggtaggccaaggtgggcgggtcacttgagatcaggagttcaagactagcctggccaacatgatgaaaccctgtctctactgaaaatatagaaattagccaggcttggagctgtgtgcctgtaatcccagctaaccaggaggctgaggcaggagaatcacttgaacccaggaggcagaggttgcagtgagccgagaccatgccactgcactccggcctgggtgacaaagcaagactctgtctc

SEQ ID NO: 7130 - DNA, 1591 bp, Homo sapiens
agttgcaggaagccagaggaggcaatacagtgggacagttaggaatgcacccggggcctcctgcagatttcggaaattggcaagctacgggattccttcctgaaagatcaactgtgtcttaaggctctccagcctatgcatactgtatcctgcttcagacttaggtacaattgctcccctttttatatatagacacacacaggacacatatattaaacagattgtttcatcattgcatctattttccatatagtcatcaagagaccattttataaaacatggtaagaccctttttaaaacaaactccaggcccttggttgcgggtcgctgggttattggggcagcgccgtggtcgtcactcagtcgctctgcatgctctctgtcatacagacaggtaacctagttctgtgttcacgtggcccccgactcctcagccacatcaagtctcctagaccactgtggactctaaactgcacttgtctctctcatttccttcaaataatgatcaatgctatttcagtgagcaaactgtgaaaggggctttggaaagagtaggaggggtgggctggatcggaagcaacacccatttggggttaccatgtccatcccccaaggggggccctgcccctcgagtcgatggtgtcccgcatctactcatgtgaactggccttggcgagggctggtctgtgcatagaagggatagtggccacactgcagctgaggccccaggtggcagccatggatcatgtagacttccagatggtctcccgaaccgcctggctctgccggcgccctcctcacgtcaggagcaagcagccgtggacccctaagccgagctggtggaaggcccctccccatcgccagccgggccctcatgctgaccttgcaaattcagccgctgctttgagcccaaaatgggaatattggttttgtgtccgaggcttgttccaagtttgtcaatgaggtttatggagcctccagaacagatgccatcttcctgaatgttgacatgccagtgggtgtgactccttcatttttccttctcccttccctttggacagtgttacagtgaacacttagcatcctgtttttggttggtagttaagcaaactgacattacggaaagtgccttagacactacagtactaagacaatgttgaatatatcattcgcctctataacaatttaatgtattcagttttgactgtgcttcatatcatgtacctctctagtcaaagtggtattacagacattcagtgacaatgaatcagtgttaattctaaatccttgatcctctgcaatgtgcttgaaaacacaaaccttttgggttaaaagctttaacatctattaggaagaatttgtcctgtgggtttggaatcttggattttccccctttatgaactgtactggctgttgaccaccagacacctgaccgcaaatatcttttcttgtattcccatatttctagacaatgatttttgtaagacaataaatttattcattatagatatttgcgcctgctctgtttacttgaagaaaaaagcacccgtggagaataaagagacctcaataaacaagaataatcatgtga

SEQ ID NO: 7131 - DNA, 196 bp, Homo sapiens
ggaggcagccttgttccagaatgtcctgagacagagatcgtgaaagaagaagtcgtgagcctgcggtccagtcagtccagctcgggaccgatgcctgctgtgccttcctgctgagggacacctgcttattttcccccgtgggcctcactctatccctgaaaacagtgaatgttatatgaagtttgttctcaagttc

SEQ ID NO: 7132 - DNA, 543 bp, Homo sapiens
tgtgggcccagcgccagactggacagaagccctggggcaacctcctcggccacccctccaggacagtccctctctgtggagaactgaatggccctgtgcagagccatagtcccactgtgggtcctgcaatgagcaggggctgggagtagagggtttctggggcctcagggttctgggaaagcaacagctatcagagagagaagggccagaccccatagcctcttagattcctggcagtagaaggagaaggatgggtaaattgacctctgaagtccctgaccattagcatggtctaggatcctttctagaaggaagatctgaggctctggtgctcagggggatggcttgggccttttctctcaaccttggctgagcctaccccttactttgccaaagacttgaggaccctgtatgtctggagttcagtcccctcctctgtggggctcaggtgattgaaatgtggatgaaacatttctctacttcaagaccacctctccctgcaaacaccacacacacatggcatgcatgtacgcacatgcgcac

SEQ ID NO: 7133 - DNA, 197 bp, Homo sapiens
aagggctgagaaatccagagtgtgctgatccagcaaggaacgaatggactgaacaaaactcagcctgctgaggacagaaacctgccctggactgctgggagccggggaagagaggatgggtctgtgctgaaggcccaacaggatcatctcattgcatgattttctttacttttgaagtaaaaggagatttaactttt

SEQ ID NO: 7134 - DNA, 536 bp, Homo sapiens
gcctgcagggacagcaggcccaggaggaaggatacactaccccaccaactccaaacactcacaccaacagccagagcaaggcccggctccacacggcagctttggccttgaccaggagccagcgagtgcctgggagcacagggagcctaccctggggactgtgatgaggaagggcccacatggaggtctacggatggcccaggcaatgctgtcgctgcttgagaacatacacaccaagcccagcttctcatacaaatgtctactccttcatttagcttcaattcccacttctcccactgtcctctcccacccaagctccccatccagcccttaaaaccagggttaaagctgctgtcttggccagagccctgtggcctaggggaaaattggaagcaaggaacagcaacagcaccacctccctcccaagtctcttcccttcccactctcaggccactgcccacctcactcagcccaggcaggtgtctctatcaggtgagagaaaaatgtcagactcaataaatgtacactgaagtctt

SEQ ID NO: 7135 - DNA, 106 bp, Homo sapiens
tggcagtaaagagaccaccagcagtgacacctgccaatgacagatgcaagcccaacacccttttggtacgcaaaacctgctctcaataaattcccccaaagctctg

SEQ ID NO: 7136 - DNA, 385 bp, Homo sapiens
tgccaactgttcagctgtcctccctccacctaccactcacatgacacccgtgagcgcctgtgcacacacacacacatgcacacacacgcgcgcgcacacacacacacacacatccaccccagggccaagagaaaggcctgcacacaagcccacagcacagctccctgccaaactgaagcatctgtagtgacccactggttccttcttcctgggtcttcagcattccctcccatcatgcccggtcccacccctccctctgtccaccagcccatggccctgtgctaatcccaggattaggccataggagtcctaagtgtcaccccgctgtaagctcctttgtggagtgctgggtaagcagtttccaataaacgcaagctgagctggg

SEQ ID NO: 7137 - DNA, 6619 bp, Homo sapiens
atgggcctgtgcagcttcggggggtcctgctggggaggggggctgggctcccaccatggggcccatgccgagtggatgccccccaccctctctcctgggccactgaggagaggggagagagctggtgattccagaagggtgacccggacagcctagctgggggctcccccatattcccaggcccagaagacagacccacagccctgcccttgtctctgaggctgaagaccccctgactcccatgctgtgcttgccgctctgaaacaaacagaggctggaactttgtggtccttgccgagttttgtaggggtcactgtcacatgcttgtgccctggaagccccaaggctcttcctccagctggctcccttgtctccagggctttggaggatcagggtagggagggctctgtctctaagccaggtgtcaggatcagaatcatgggtagaaggtgccattcagctcacagccgcacccagaatcctttgcagccctccttctttatttttttcccattgcattctgggagtccacatctggctttctcagccactgttcatcaccaggggttttaggaggaaggcttggctcctgtcttcccagacccaccatgcctggagaggtcaggatggaactacctcattcggcaaattagccccaaattgagcgctgaatcgtgtcccatgagatcaggcgccatctgtaaagtctcctctggaaatgccaatccatccttcccccagctgcttcctcggggaggcccctgcccccaccctgccagcccttcccagtctcattagaggaagctttccaaagttctcagttatcaagacctcatccagctcgtccaaaggcttcagggatggaaacaaaccagctcgtctcagaggccagcaagctggggcctgtccgccacggtgccctgtgcacctttgggctgccctggcccccactctcccgggccgcccaccacaggctcttaatggggccgggtcagtcctacatgtgagatgggttagggcaagtctttgccatcccccagatggctctgtcttcttgtgtatggcagggctgggactgctgtcccttgtacagttttctgtcactggtgggcactggacaggcatagcagactctcttgtggccacactaggttgtcgcctttcaggcagtgtcccgccacctttgcttcccgctccttctggacattccagagccctgcaccaaacccttacttggtgtctgcacctcctttccctctctccatcttccaatccctggaaaagtctggtctgagtgtgacttgggaagctttcagtgctgctgtttggcccagctcattactttctccctttctctaccacagcaaacacattctccaccatgtcagtctaaagagtctaaaggggccgggagaagcatgagcgaggggcagattctagtcgggagcccatgccctggaaatccatctttcttcatctttcccattgaccactttgggtttgacctgcacatctgcagtgagggcagaattcaacaagcacaactcactggtctttcagtcaacgtgctagaaaccgatgacttattaatctctaattttttggcgcctctttcattgaatgagaattgctttcgtatagttcacattagaaaaatgcctaatatactaaagtaaaccaaacgttgtcacttttctcttgttcttgaaacattgcaaccaaaaaggtcagcacaaaggccttcacctacgtgaagacctcctggtaggatctgtccatgggatggagaaccactctgtccagatctggggttgggtcatgacaccagctaccaattttagaatattatttcttggtttctttatgaaaaatgggtgctagtggtaattgctttgtggcttagtaaactactctgtggatgatttccaaacattcaaagccaatagccttgttattaacaagatattttgagtacaatatggctcattgacttttccattacatctgaggattccagagtcctctgttcatccctgggatagagtgagccctcttgcgtcttccagggtagctcaggttggcccagtttgggccagtccatttttggaggtcactctttcccccctcatcccctcacctccttctctttacccccttcacgtacttcctttctttcttccctctgttattcattcatcaagcaggttaaagccattgtgctaagatctaatctgaggacactataatggccctgtcgtcagggaagcccgtgatcgctcgttttcaggggtcttaccggtcagcaaccttggcattgatacataggcactctacagaatttaagttttcagaggtaagtctgttgttctgattaatctgcattcattcagcgaatgctcaagacaagccaggcatgctgagaagcggcgctctagttgtatgtaagatgggcattcctctgctctcctctattctccatgtcgactgagaagagtataataagaacattgtaccctctccacacttaaccctctgggattctttattataatataaaccaccgtcgtgaggcatttacctgttggatggaaggtagacagcaacaagattttaatcacctggtcaccagaccctcacggcccatatccaattcgaatttcagaaatttctctgtttgctttaaataactctttacaaataagggtcgggcacggtggctcacgcctgtaatcccagctctttgggaggccgaggtgggcagatcacgaggtcaggagatcgagaccatcctggctaacatggtgaaaccccgtctctgctaaaaatacaaaaaattagccagatgtggtggtgcacacctgtagtcccaactattcggcaggctgaggcagtagaatcgcttgaacctgggaggcggagattgcagtgaaccaagatcgggccactgcactccagcttgggtgacagagcaagactccatctcaaaaaaattataaataactctttgcaaataggaaagtgaagctcaagggtaaccagtgaggctatgaaattgccagtgaattaagaccagggctagagtcaacagtccagaacccctatccgtatgaacaggggcccgtttctggttgaaatcaaggttaggatgcaactgagaaaataaaagactgcactttggagaggcaagcacgctatccgggttgttgttttgttttatgtcttggtgcttaggtgaggacttagctgggtttattcaaagtgggcgggtctgggctattcttgagaatgtcccttccatttctgagaacaagtcagccccttctacctgcctccacccaggagactgatgcacaagatctgtttgtgaaagcctgatttaaaaagaaaaaaaaaattccttaagccaaatggtgttccaagttggttgctgtgacaacctccaggaagagccacttgttaccctctattctttctagtgctttcagtcagtggcaacacataggccccttggaccgtggggatggcggccctgagattctgtcagtgggaccaccctgggcctcctttctacctccactcagcaccctgttggccaaggagaatttctgcggtgggaggcagtgctctgctagtcaggattgataaacagctgggcacaccgaaacagtgtaccaacgaattcaccaaccaggggtttctttccctaccctttgtgaaaaccaatcaattactagatgagtggatggatgcagaaaaatctgggctgagccaaagtcccttttggaaatacaagccataacattcgaaggacatcagcgaccttggcttgtttaggtgattttacttccagctgcaggtagtcttgacaaggagtgtttaaacagaaggctcaagatgcattccttgtgtaggtcggagagagcacttctaatgttaagtggggtacagatcagctgcccccccacgtagcctggacatcgtcttatccccataatccttgccatccctacaaggcccatcgccaccaccttttcccaggtttattgaggtatgattgacatccagtaaaattcaccctttggaaatatacagctctgtgaattttgacaaatttagtgtcttgtgaccatcaccaagatcaacctgtttttaaccctccaaaaaattcccttctcctgccctctttccctggcaaccctgattgattatctgatcctataattttgccttttctagaatgtcatataaatggagtcacactgatgtcgccttttgagtctggcatctttccctcagcttaatgcttttgagtcattcatgatgtgtgcgtgtggtttgttccttctccttgccgggaagtatttcattgcatgggcgtactactctgcttctttatttttacactgagcctttcgccctggaagttcttggcccagggtcttcaacttgtttgcacgaccacttccagcttgctgcttccttcagttccccaggctcctcctccaaatgccagctgtgcccacaagctgttcttagggctcacactcgccttttggcgcgtggtgggtttttggtagtgcagaaagaatccagggatgggaggggaagggacggatgggtgctcaattgctgctcacgtctgctgcaacctgaagcttgcatctcagccagcagatctgctcccttctgggacccaggcttcagtgtcacacggtccttggctatgtattgggcgttggaggctttgaaaggcgagcagaagcagcatggacaagaaggctggggctggccctggggctcatcatgatgctttcctggatctgttgcttcatctgcaagctgagggtgtttgttctagatgagtgtctcaggccaccggcaactgcatgtacctcctccctttctcatttccaatgatgtaccctgtacacgtgttcatgctgtgtctggctctcatctgcacaatcgtgcatagaattgcctcaagtcctggtgagagagatgccgtggtacttttccatttagattcaaatggagctaaaattaagagttttatgagctgttaagaatgaggtagtttctcctaggaccccccaaagacagtgcaagtaatgaccgtttggatctcattcgtcgatctttgatagtatgttctggagtctactccccaggagccaggacaggcgtgaagatggagtccttgtcgcagctggagccttgcctagctggtgatcacacagcctggcctgtacctgcaccccactggatggtggtacatggtggcagggacaggaccacacccagttaaggccagaccaggctgagtgtgacccctgaggtaaacactccactaagctgtgtcttgttcatgccccctgctcagtgaaaggtgagtcccgagaccagttgggtacctctctatgcgaaccagagacatttctggatccaggccaggtgaagattagggccaggaagcctgagcccccggggcctcaaggtagggagccgaagaggctgccaggactctgctgggttgaaatttgccggggaggactcttgtctccccctcaggagtatttttgttgaggctttcctggaggtgaagaagcaattcccattgcagcaggttagagcgagaatcagacagagggcaaaaaccaattcgcttctccccacgttctaaatgctggggcatggctgtcaggagggcttcctgggaggtgtctctgggggtggggtgaggttggggcgatggcctttggagattgcgtgtggtgttcaggactgttccttggtgtttgagggaaactttagtgggattgcagtggaatgtaaggtcagggcacgtgggtgctctctcggggtggggtgactgggagacctagagggaaagcctgctatgcagggggagagcacaggactggccctgctctgcggcctcctttgtcccataacctgaagttaagtcacatcccctgtcgggacctccgtgcactcatctgtcaagtgggggcgcttcccttccagcatcacctgcagcagacgggctctcgggagtcgtgggttccaggcagctgtgtggacccagggacagacattcaaagggacgccagccatccttagtgacaggggccccaacttagcatcccttcccttccgttaggaaggagatgaccggaagcaaccccttcacagacacgagcacatcggcaaaccctatgaaagtggaattttctaacaaaataaacttgcttgtttgatctgttttctgtaacttttgctaaatactttatacatttttcatgttaaagagccgtgtctcccgccagcactcctcaccccggtatgaatgtgtttcctccacattgtatatccttccaccctctggctgcctagatcagtaaataaaattgatgtaatataatttataagtaacactgttgaaaccctgatcccagtggaggctgtaacccacctgcccccgcaccacccccctgacccctgttaccgcatttgtgtgtattaatgctgaagaattaaatgtttaaagagtttaaattttgaaggcgtttgctatatacagttgtcctgcattattataaagagttttcaggaagtt

SEQ ID NO: 7138 - DNA, 85 bp, Homo sapiens
ggctcacctgatgctcgttgccatgggacacctccgagagagtggagggaaaatgtgtgagaaataaattctcctaaatactcgg

SEQ ID NO: 7139 - DNA, 129 bp, Homo sapiens
acacacctgcctgatgctatcaagaggctgaagaaaggcacaaaatgtgctatttttggtcacttgctttatgacgtttattttcctgttaaagctgaataaataaaaactacagtaaatgtatacatt

SEQ ID NO: 7140 - DNA, 82 bp, Homo sapiens
ttcattctaatgaaagaaaatgtgaccaaagaaatgcacgaaatgtgaagttctttgtcactgtcctgtatatcaaggaaat

SEQ ID NO: 7141 - DNA, 109 bp, Homo sapiens
tttatctaactgctgaaaggtgaccaaagaaatgcacaaaatgtgaaaatctttgtcactccattttgtacttatgacttttggagataaaaaatttatctgccaaaaa

SEQ ID NO: 7142 - DNA, 132 bp, Homo sapiens
tcatgtcctgatgccatggaatgactgaagacaggcacaaaatgtgacatctttggtcatttccctctgtaattattgtgtattctaccctgttgcaaaggaaataaagcatagggtagtttgcaaacaata

SEQ ID NO: 7143 - DNA, 127 bp, Homo sapiens
gccagcccttctggagcaggacagaagatatgcaaaatgtatattttcttgattcctgaccattgatacttaatgtccatgtgactctttttcacatgcaataaactttgctttgtttcaatctggg

SEQ ID NO: 7144 - DNA, 781 bp, Homo sapiens
ccaaagcagtgttgctggatgcagtattctcttgctaagaggaaggaaactgtctcgcataggagcctatataaatataaacatatatacgtgcactctacagaatggccttcataccatgagaacatttctgttttggatggggatgttacccttgcgttcaaccaaaattgattcttggaactgtaaagattacaacccaaagtctcccaggaagctgtggggagaccagaggatcaagctgaagtgaagccagtgaagagcccacctgtggaaggacatggcggggcgaggcacagccagtgcattcctgcctgcggacaggccctcccagcagctttgccgcctctccatcgtcttgggcccttgctcaaatagctgtgggactgaatttcacagaaaagaatataatttccatagtgctcttgcttgcctcttcttgagttctttgctcttctgagttcttggtggctaataacagtcagattagggtctctgccattcagagttgatgcttgaaaactttagttttccttattaatgaatatcactatcagatttgactaatgaagaggaaatctattgtttgggggaaaaaaaacatcagtttgatttctctaggggttcttttatgtgatttttagctaagtggtgtgccaggttttcagtgacataccaaatggaaataagaggatattgatcacgagtgtgatgctgagtacctttctgcatatactggattgtactttgtgtaaagtaaacatactcagttttgctgttc

SEQ ID NO: 7145 - DNA, 2130 bp, Homo sapiens
ataaattcaagaacttcgtttttaaaatgaatattttcaatcaattttttataaacattaggggaacaagccaggagtttatttcaggtaatttgggctaatagttttaaaactccaaataactttttaagggtgcatataattcgatgtaagattggatgggacaagtaagagatggtctgatattttccagacgactttctgcagggtcttgtgtcataatgtagtggaaaaggctagagaatagaagtttaaaaatacgagttctaacttaactttgtaactatgtaatttgggcaaatatataaacctcctggtggatatttatctataaaataggattaatgccagatctacttacttacacagtaacaaggatcaatctagataatgtaagaacactctgaagatataaagtgtttggaaagattacggagggctgcccatgattaaaatagaggggagcagggattgggtaatatactgaaatagacattcaagagagggctataccccgatctttttttttttttaagacagtcccactctattgcccaggctggagtgcagtggcatgatcatggctcactgcagtcctgacctcccggggctcaggtgatcctcctacctcagcctcccaagaagctacgactacaagtgtgcaccaccatgcccggctaaatttttttaaattttttgtagaggcagggtttcaccgtgttgtccaggctggtcttgaattcctgagttcaagcgatctgtccaccttggcctcccaaagtgctgggattacaggtgtgagccaccatgcccagtccagccctaaactaatcttatccagagctggcatagtgcagtgaactaaaggagaactctagatgaatcaaatgagcaggcatgtcttggaaagaaagggaagctggatagaataaaggaattagggaccaaacaagaaggcaatagggactataactacattctaaatgagaaataaggtcaaaatctatatacattctttataaatggatgtccaaagtaatcctagggaggagagcttttttttttttcatttccattttcatttaaaaatggatacttgattattggaaaacttacaattgtgtttggaacaacttgggtatttgaatctaattttccaattgcaaattttatgatacctaaatacagataaagtatttccaatgaaaatttagtgtccaaatgagtggggctataaatgtaaaatacactggattttaaagacatggtagaaaaagaacagaaaatattttttgtattgattacatgttgaaacaatattttggctataatgggttaaatatactattaaagttgattttatctgtttctgtttacttttatttacgtggcttacattgcatttctgttggacagtcctgtatttaagtatctagatggcaacattttacatacacaagcatcaaactctgtggtcagatactgttttttctgatctaggaaagagatctgggaaatacttcactcaaaaagaacgagtagtgccttccacaggttaggagagtgtaaatgagtctggtagtttgtctatttttattgtctttattactatagtaaatattctataaatatttgttaaaggaggtatgtgtattttgtttttgttattggcacagtggccactgaatggtgagaaattatctaagattaagacttgaatgagtaaaaagggggaaaacaaatctagttgatattaaaacagtcaaagtgaaacttaagggtcagtaaaatacacataaaggatttgagttttccagtgtatattttgcttacatatttgtggcttttataactcctttagtattaataaactactgaagtcacatgcaaaaaaaaaacagactcatttgcaaattccctgtgggctctatccattgaccaagtcatgtttacttctgtgcttaaagacagtaatgttcaagatgtgctttcatcatgtatgcctctcccatatcagactacgaaattatgtgactattcatagtctctttcgcatcttcagttaagcatataaaaggcacttttggtggaatagtcttttgaagagtattaatgaaattgaatttaagt

SEQ ID NO: 7146 - DNA, 512 bp, Homo sapiens
ccagtaaccaaactctctttccccatttctatctcccagcccagtcacaaaaatactcagctccatcaagaggaattgtgtctaagaggatacccctgttaatctccttttttcttggattggagaggagagaatctggacatggctttggacttggaggatatcttggattggattgcacaatggcttaaattcttgattctgcctcaggagaaagaatagtcttcatgtttccactcatccttcctttggacccatcggggaaaaagtctaaattggagatccagttttagaagtgctttctgggaagcatttaatgggattagctgtagtcactgcttatgggaagaacctcagatcagccccttaaaatgagttctagagcaggtcttctgttccagaaggggagaagcatagagggcctgtgagctcacgtgtgttctttgtcataggggtgaaaaactaacttcaagtgtcccttgtttgaaataaacttagcagagtcactttct

SEQ ID NO: 7147 - DNA, 433 bp, Homo sapiens
agatctgggagaccctgaactcagaaggctgtgtgtcttctgccccacgcacgcacccgtatctgccctccttgctggtagaagctgaagagcacggtcccccaggaggcagctcaggataggtggtatggagctgtgccgaggcttgggctcccacataagcactagtctatagatgcctcttaggactggtgcctggcacagccgcgggccaggaggctgccacacggaagcaagcagatgaactaatttcatttcaaggcagtttttaaagaagtcttggaaacagacggcggcacctttcctctaatccagcaaagtgattccctgcacaccagagacaagcagagtaacaggatcagtgggtctaagtgtccgagacttaacgaaaatagtatttcagctgcaataaagattgagtttgcaattgtga

SEQ ID NO: 7148 - DNA, 508 bp, Homo sapiens
ccatataatttaaaaagaaaaaaaaaatcaaaatataatatatttttttaccaatcggtagagaagagacagtttaatatttgtgctgaaaatatgtttcagtatttttttcaatgaatgttaagagattgttctcactcccgccccatcttaatgtataaccaacaccaaacacgtggatcaacagaaaaggaaaatttcactcgtctaaacactttcaattttcagtttttattttatgttctatatacccagtcataaagtataagcatcagttgtcattaaaagttttcagaaaatcttgaggttaaacatctctctctctttttttaaaatacaaggccctgataaaattgatatctatccttatatttttctccctttttcccgtgccactttttcttaaattatttcccagttagtattatcatatgtttgtacccgtcacagttttcatagtgctttcaaatacacctttttgatcattaaaataaaaaaataaatcttg

SEQ ID NO: 7149 - DNA, 2598 bp, Homo sapiens
tctgaacatgaggcatgagaagaactgagtgactacagtgattgggctataatagactctgtcactggcccagctgtaatccctggcgcctgctgcttcactgtgttctgcaggagttccactgccctgaatctctgactctgtgcccgaggtctttttctggaattgtggaaggtgctctgctatgtgggaaacaagctggaagttccgggaatcacacttcccagaagctacacccaaccagtgattgacaggagttgaagtaaaaacatcatggctttcttaccccttaagtggaatattttatactatttttcagaatttccccaaggagttaagctgtaattgcccatcacggcagccgggttaataaggtatctgtatctgccagaattaaatgagacggcagaatcacatagtaatttgagcaggaaaagcttaatataaggaattatcatgtaattatagagttgttctataattatgtaatattatattctaagctcctcttatacaatataggagaggatttgcagtaacaagggattagatagcaagatgtaagagaactctgaagaatataggactagtggatataaggaacagccactacccctggggctgaggtggagcactccaagaattaaagaacctggaataagaacacctcacctcactcacggctcactggatggtggacaagtccctgagttgtgatgctgtagaactttctggaaatttgccctccatattttcaagggaagatgtcaaagagaagtttcatctctcagaaattatctcaaaaccttcttggggattaccagggaaaattgtcacaggagactccatgaggggtcatgtcactcctaggctgttcaagggagttctgggggaagctgggcactgctggtcacaacaggttgtaaaagctgggccctggagaagctgtccgcactgcaggagactgggtgctgctggagttgctggatgagcttaaggcatgtggggagaggagaacattagaactaggaaatgaaacctctctctattctactgtccctccagcaccctctactgtaaacacttagcattgtgccacctggcacaggagaagtctttacagggcccgtctataacatagcaaagcaggcaacaaagggtgaacttggagtggctcacatgttgctctatgttgacttcttccctttcctttttcattcccctactccccttattggttttccttaaattctaaataaaatacagtcatcctcagtatccaagggggattggttccaggcttctcagagaataccaaaatctgtggatgctcaagtctcagttataaaatggcgtagtatttgcatataatctacacacgtcttcccatatactttaaatcatttccatgttacttacaatacctaaaaaaacgctacataaatagttgtcattgtcaattactttttatttttgtatcgttatttattatttttttcaaattttttttactgcctgtttggttgaatcatggatgtagggttcatggatattgagggctgactaatcgcacttgacttttgactccgtgttggcttttgggtaaacccagactacattttgaaagtaaagccaataaaattttctaatgcattgtatttgggatatgagcaaaacagaggagtcaaggatgcttccaatgtttttggcctaaaccatggggaaaatttcatctttataatattaagtttcttagttttaatactgaatatgatgcctccttccaatttccctgtagagccctttgcatctttcattgaatttattcctaagcatttaatagttttgatgccattgtaaatgatatattttttctttttcttttttttaaaaatagggtctcactttgttatgcaggctggagtgcagtggcacgatcttggctcactgcagcctcgaactcctgggttcaagtgatcctcctgcctcagtcccccaagtagctgggactacagacatgcaccaccaggcctggctaatttttttgtattttttgtagagatggggttttgccatgttgcctaggctagtcttgaactcctgagctcaagtgatccaccggccgtggcctcccaaagtgctgggattataggcgtgagccaccacatccagcttgtaaatggtatatttttaaatgtcagtttctaaaatgttttgttagcataaagaaatacaattgactttttaataccaagccatcttgctaatttaataatttagttctagatctgatttagactttatagttgtgcaattgtactatctgtggaaaatgacaatttttctcttcctttataatctttagcttttttttcttttccttggctttttgcaagataatgggatgtccagtgtggtgttatatacaagtggtaattgtaagtgtccctgttctgttctttttgtttgttgttctcaagctcaaagaaaaacaactttgctatttcgtcattgagtatgataacacttaaactttacttactgtaggattattgtacataatctttattgtattaaagatgttcctattttgctaag

SEQ ID NO: 7150 - DNA, 1137 bp, Homo sapiens
ggcgcccagacggtctgtctgaggctctgagcgtacatagggaagggaggaagggaaaacagaaagcagacaaagaaaaaagagctagcccaaaatcccaaactcaaaccaaaccaaacagaaagcagtggaggtgggggttgctgttgattgaagatgtatataatatctccggtttataaaacctatttataacactttttacatatatgtacatagtattgtttgctttttatgttgaccatcagcctcgtgttgagccttaaagaagtagctaaggaactttacatcctaacagtataatccagctcagtatttttgttttgttttttgtttgtttgttttgttttacccagaaataagataactccatctcgccccttccctttcatctgaaagaagatacctccctcccagtccacctcatttagaaaaccaaagtgtgggtagaaaccccaaatgtccaaaagcccttttctggtgggtgacccagtgcatccaacagaaacagccgctgcccgaacctctgtgtgaagctttacgcgcacacggacaaaatgcccaaactggagcccttgcaaaaacacggcttgtggcattggcatacttgcccttacaggtggagtatcttcgtcacacatctaaatgagaaatcagtgacaacaagtctttgaaatggtgctatggatttaccattccttattatcactaatcatctaaacaactcactggaaatccaattaacaattttacaacataagatagaatggagacctgaataattctgtgtaatataaatggtttataactgcttttgtacctagctaggctgctattattactataatgagtaaatcataaagccttcatcactcccacatttttcttacggtcggagcatcagaacaagcgtctagactccttgggaccgtgagttcctagagcttggctgggtctaggctgttctgtgcctccaaggactgtctggcaatgacttgtattggccaccaactgtagatgtatatatggtgcccttctgatgctaagactccagaccttttgtttttgctttgcattttctgattttataccaactgtgtggactaagatgcattaaaataaacatcagagtaactc

SEQ ID NO: 7151 - DNA, 122 bp, Homo sapiens
ggaccccaccgggtgtggttttgatacccctaagttaaggctgagccagagcactgtctcagcatttgaaccgaatgctaatatagtcacttattaaaggattatgctgatggaaatgtacc

SEQ ID NO: 7152 - DNA, 1752 bp, Homo sapiens
ccaacaaggagaaacatgcaaatgttttagccaggggtccctgcagccattccccaagaacgtacaaaagttaagctccatttaccactcacttgacagtgtcctttaaatctgaacttgctcttgctcatgcggagcttggctaagagaaaccagatcagaatgcaagctgtaggtgggtgggtgagtgtgtcccctcccacactgctctctggtgggtttgggcagtccctggctctagtctctgctgcagattctcaggaccaaaatgtgggtgatttgtctgggtccaggcaggagacagaaatcacacaagctcttttattagagataatataaagaatgattaaccaggtgacagtaaagggcaggaagggaatacaaaggtatccatggaggtagcaccacaggaagcaggcatcacacttgaggcttgggaacaaggggaagatgctggactcattgaaaggtggttgcttggagaagggacatggggctgaatctcagacttctgaggtgggggagtggggatgccactcaatgcagctggtatctctgagctctgaggagagtcctgtggggatggtgccccctcctctgaataggggagatgttttgttggtgtctctgaggggacccccatgaggctgcttttgtgagtgttggaaaaaccaaaaactgcattgaaatgtttctgggaggagttgccactgcctgggtgaagaaaaagcactgctagggttagcaacctgtctggcaagggacaggaagctgatagaaagtgaacaggaagcaaacaggaagtgagcaaggggccacttcctacttcctcctttagcctagcagattccttctagctccccctgggggctgagcctatcagggcacaaagccagaatgtggtttgtagaatcccagccccagcatctccaagcataggatggattttgaagccaagagggaattagctctcggccgggttctgagtgatcccatccagctgctcctggacctggtattgagaggtttttcccttggagggcaaacaaagtggcagtggggaccagggtgtcccctgctgagaaatggagagctcttttcccctgtacttctctggggtttgccttgtggaaccaagtgcttgggggaggagctcctggcaggactccagctgttatttgtcagaggacagctaggattggttcacccttgctctgagttggccccaaagcgagctatgctgaactcttctccatctccaagcagacaacctttgtctttacatgcaagagggatccaattatgacaggctgacccagctggtttcatgtttggggtttatctactgagtaaggctgaccttacctgagtttctgtatgtgtatttgcaagacagttaatactaatccatcatccctcacagagatgtagaggatgagatgtagtaacttatagcagtgtcatttggaaaagttgaatttgccctacaaggcatgttctccattcaagggtcttgtgtaaacgtttgcagacacaggtgcagctttggagaactcacctctggctcttgtgcttttatgttgggacagctgcctaaattaggagctctagacctgttattggttcccaactgttggccagaatgaattcttcgaaaaatataggtggtttccagggaatttgaatgattgtattttgtgtccatggaacgtttatagacatggaggcaggcaataaattcctccaataatt

SEQ ID NO: 7153 - DNA, 599 bp, Homo sapiens
aaacaacccacaaatctgaagctcctcgcaggagagagagagagagagagagaggagagagaggagagaggagagagggagggaagagagtgacggagaaggagagaaagagacgggagagaggagagagaaagagagagagaggagagagagaaagaacgaacgaacagggaacttgtaaaactaaggggaaaagggcagaagagaggcagcagcgtggtccctgcaagcgtccgctttcctggccaagcagcccccagcacgcctgctttgtggggcagggccatgcggccccgaggaaggatgcggtgagccagagggttccagacaaaggaggggatccccaaggctctgggccagccagtccctgttttactggcaccacggtccctcctaggcgaggacgaagagggaaggggtggagacctccaccttctctgcgtgtggctgcgtccctttacagaatgacaggcccttacttccgagggcggggactaatgtgtaaggcttaacagatccaattccagaaattatctgtgtttttttcaatcaccctcttgtgcccccccaccccccattaaatttcatcttttatcttt

SEQ ID NO: 7154 - DNA, 312 bp, Homo sapiens
cagcaggtatacaggaaaatgttgaagagccccagggctcctgtgagtggattcacccccaaggtcagaatggcaactcctggaacagcacaacaagtggcaaaggacacagctagcaacgggctggaaaaaggcagagaacgtggagtgatcatctccaactcaactcaatcacactgcctaaaatcggcactgacaaagtacaaataatccacctatccagtagaggcagcactgatctggctgattcctggatatggggaatcctctttatgaaacaaacttacaataagaaagaatatgtttgtggga

SEQ ID NO: 7155 - DNA, 648 bp, Homo sapiens
actccaggagccatatcccagacctttgccagctacagtgatgggatttgcattttagggtgatttgggggcagaaataactgctgatggtagctggcttttgaaatcctatggggtctctgaatgaaaacattctccagctgctctcttttgctccatatggtgctgttctctatgtgtttgcagtaattcttttttttttttttgagacggagtctcgcactgttgcccaggctggagagcagtggcgcgatcttggctcactgcaagctccgcctcccgagttcaagcaattctcctgcctcagcctcccgagtagctgggattacaggtgcctgccaccacacccagctaatgttttgtatttttagtagagatggggtttcaccatgttggccaggcagatctcaaactcctgacctcgtgatgcacccacctcggcctcccaaagtgctgggattacatgcgtgagccactgcgccctgcctgtttgtagtaatttttaggcaccaaatctccctcatcttctagtgccattctcctctctgttcaggtaaatgtcacactgtgcccagaatggatgaccaggaaccttaaagagtggctgaaaagattgcagagttatcataataaattgctaacttgcgt

SEQ ID NO: 7156 - DNA, 351 bp, Homo sapiens
actgcacaaagtgaggggaacagggtgcaggagagggatctctagtttttgtggtttaatttttagtagcaggtcaaaaacctgccctcctgtgacttattccctgagacttttcaggagagccagcccacagatgatgaagaaatgatggaagttcatttggagagtcaaatgggaaaaaaacaaacaaaaaactgcctttgatacaggcaattcagtggactataataatagtggagggttgagatgtagagtttttaaaaagtgaacagttgctgttcttacatctgtaaagaaaaccataatgtctttaaatcactcttctgtaaatagatgacctttttgcagtgt

SEQ ID NO: 7157 - DNA, 282 bp, Homo sapiens
gcttctgcctctcctgccctgaaaaggaggaatgattggggccagcaactttgctctccctgccgtgcctcggtggtgctcctgaatgtggctgacctgggctgctggttccgttgactagggtcatcttgatctctgcagtttgctccagctaccagtttctttaggcagctctttgtcctccctctgcccagattttgatgtagtctaattgacatccttctcttcccaacttttgtgtgatcttttaggaaaaaaaataaatatttttaacattaaagc

SEQ ID NO: 7158 - DNA, 1854 bp, Homo sapiens
catccttaaggatcccagcaagttccccaatgtcacgtggattgacctgggcaacaacgtggacatcttctccttgccccagcccttcctgctcagcctgcgcaagcgctccccaaagcagggccacctacccaccatcctggagctgggtgagggcccaggcagtggggaggaggtccgggaagggacagtaggccaggaggaccctggagggggccctgtggcacctgccgaagaccaccatgagggcaaggagactgtagctgcagctcagacgtgacatggaagtgaagggcctcaccagggagtccttgttgggtagaatgggcaaggcaggcaggggagggcgcttctcctatcaggtgggttaaggatattgccaaaaattggcctgggccacccacctacagaaaggcaaaccatatcatctggggaaggggatttgtgttaaaacttcccgttggtcctctgcatctgccccctatcccattatctgccatttggttcttaagtcatcccaggccccagagaaccctctcagctcagctcatggccttccccaaagacttgtggaaatgggcacatggctggaggtactgtaagcctgagccattgtgaacaccaagagctttcccccagaaaaagaatacagtagggcccctacatgtactgcattacatttttcatttaggggaacaagctccaaccagaggaatgtgtccccactcaaggaaggtgggaatctttagcaaaattcctgtaactcctggttgcccgagaccccagttccatctatgctaggggtggactgaacgtggcctacctccttatggagacccagccctatttctgaggcccaccttgattctaggcatctgcccataggaccagctatcgctatatcctttgacagagcagcctacgatgccatgtggtagtgctcaggacagacatggtgcccatgcatacaggcataaagtcctgttcagaaatcccctatccaccttccctacccactgctggctgaaaaactaccagacttctatgtgggctctgatgtccttagcatgcagggtaagtgacaaacctggcttccttcttgtcacttgccagtatgacttcactgacctagacaggccgtaagaactctttccccataactcttaagtaatccaccaacacattccagaaaaccgactgcagaaggtgggctttaaaaccttaaaaacctaggacaatgaaggagtccaatcccttggcagatccaacaagatggctggggagagggagaaacaaactggaggctcccaaaggaacctaacttagcaaaggttctcatcttataccctccccttacccaaatactgtcctactgaaagggccctaccagttaagggatctcttctaaataacaggcaacccctagatccaagtagttcagtccaggaagactgggagccaatcactcttgaaccttgtgggcaaacagtatgggggaggaccctcttgacaggccttggtaggcaagattccaacacaggaagacagcaagatggggcctagagtatggggccctacatgctgttaaggttgtggttaggaatggtgcaatgctgcaggagctggaacaaagctacaccaaggaacagagcacagagcagcaggggccgaaattgaggaggccttaaatgctttgagcttttgccttcagtctaaagctgtagaatagggggttaagagcttaggctgaccacagggaagtttacaagctagagcgaatatctggactgctaatatctgacaacagtaggcgaaatttactttttcttcaaatacacattttcaagaattgac

SEQ ID NO: 7159 - DNA, 460 bp, Homo sapiens
tggataagggaaacttcaattcggttttacaactttgtttcaattttgttttgtgcattctatgtgtcagaacattcagaagaagtctgaagaagtgcaatatgttagatactcagcagaagtatcagaagtagtggtatggatataacctatttagatttaatgtgaaatttaagaaggaaacttgacttcttaaccttaatttgatatgattttaattcattacagaaagaaaccctgtgaagggtattcaaaaacataactcatcaactctctatttcaagtacacttatcctttggtatactcgggggattggttccaggaccacccatgtatacgaaaatctacccatactcaagttgcacggtcagcctggtggaacctgtgtatatgaaaagccctacatctatgcaggtttcccatccctgaataatgtgctttcaaactctgttcagttga

SEQ ID NO: 7160 - DNA, 1551 bp, Homo sapiens
agaacaataagtcattcacctagatgtcaactccacaagatgaatcttataaactatattttatgaatataggaaaatcttcattaggaatttatcagaaagtatacagagaaactataagcaattatgtgggaaatcatttaataatattaaatcttagaagttataaggaaactctcactagaggaaaataatgaacaaatgaaagtgttcatccagatttcatactttactcatttaacaaattatctttagttaattgcctatatatgtatttgcctatttttctattcatttatctgtcttttcttataaacctggaggtgctttttatatatttttgatattaatcctttgtcattatgtagcagatgtttttcttaatctagcatttgtctttatactttatagtaatgcacaacatttttataggaaaatatttgtatcatttcctttttagattttttattttactcattttacttaaaagagatctccttaatccctaggttatacgtagtatcctaaatgtgtttttaagatttttatgattttattttttacacttaagtctttaatccctctggactggatggttcttcataggagagcaactgtaggtgatcattatcctgtgaaaatattttgaacctaaaaagcactcagggaaatgcaaattgaaatgctcagtgagatgaaacttccccttcatggatctggcaaaaattaagagatcttttgctagctattggggtttgggaaaccatgtactattacttaaaggttgtgtaacatacttccaccagcagtccaacaatatatgtttaaaaatttaaaacatatatactcttagacccagcagtctcacttttggaatctgtccgttagaaataaaagcagcatcaatgcataagaatgtaaataaacatgtttgttgaagtactgtttgtagaggggggcaaagccccaactgcaaacaaagtgaatgcccattaatagggaactggttagataaattgtgacatacccatattatggaacagtgtgagagtaattttaaaaacgacttatatctatgctagctgatttcaatgtatttccacaatgtattgataaataattgctttataacaaatgtatatatacaatatatcatttttgttaaaataatcacacccatttattttgtgtttatgtgtgtgtgtgtggttagatgcacatggagacaggtatggaagaatatacaccaggctgttaatattgattaccttgaggggagtgagaaaaggagaagtagagataagggaaggggagactgtaaaaacagaaaaatgtaaatgctgcctttatggtataaaactgtaaatgtaatattatgtaattatgtgaacttttgagagagatgaaaggatggtctccaaaaaattaatgatggttatttctgttttagtggttcatcaattttttgttttttactttcttttctgtgtttttaagttaattttttccttgcaatgaacctgtaatatttacattaaaaggaaaaatatt

SEQ ID NO: 7161 - DNA, 462 bp, Homo sapiens
atgggggtcagggagggaaaggaggagggagagagatggagaggaggggagagagaaagagaggtggggagaggggagagagatatgaggagagagagacagaggaggcagagagggagagaaacagaggagacagagagggagagagagacagagggagagagagacagaggggaagagaggcagagagggaaagaggcagagaaggaaagagacaggcagagaaggagagaggcagagagggagagaggcagagagggagagaggcagagagacagagagggagagagggacagagagagatagagcaggaggtcggggcactctgagtcccagttcccagtgcagctgtaggtcgtcatcacctaaccacacgtgcaataaagtcctcgtgcctgctgctcacagcccccgagagcccctcctcctggagaataaaacctttggcagctgcccttcctc

SEQ ID NO: 7162 - DNA, 1770 bp, Homo sapiens
ccaagaatggggctgagccctccctgcgggctgctgtgcgttctgagggagggagacctcggcactagaaaaaaatcgttaaactaaagtctcgtctattagaatactaaattgaactaaagaaggttaggaaagggaaatttctgttacttcgggtcagttatttcgggccagacctttttcttgctcctttgccaaaataacttcagtcacgacctgccacggggtgctttcatgagtgtggtccgtatcttggtttggaatcgaaacttctgctacagcacagaaaaggcacagtgcctcttccaggtcgatcccattcccttccctgattctagaaaagtccctcctgctttggctgatgtgggccctttcagcatctccctgagatttcatccctctctccatgtggcacgactggggttggttggggcctacagtctccttgtccctcacagtctgcccctgtcagggctcggtcctcagagtaaggaaaggaaatggaagtcaggaggaagggaagatgtgagtgtgcggtgcgggtggcaaaagcagccttcggggcaaccccgtgagcgtcattgccaccaaaggctggctgttcccttgattccttgcataattgctctttaaaaccagtatgcacgccagtgccaagctcttcagcagcctgtccttgggtagtaagtgctgtggtctgtcaggactgatggccagcagctgtttctatgttgggcttttaactttttttattttatttatttatttatttatcttttttgagatggagtctcactctgtggcccaggctggagtgcagtggcacaacctcggctcactgcatcctctgcctcctgggttcaaacgattgtcctgcctcagcctcccgagtagctgggattacaggtgcctgccacaacacctggctgattttttttttggtatttttagtagagacagggtttcaccatgttggttaggctggtctcaaactcctgacctcaagtgatccaccacttccgcctcccaaagtgctgggattacaggtgtgagccgccatgcccggccgggcttttaacttttaatgtcctaatgttaaggtaattttgttgtgtgtttagaagtgaccttacctttaacacctgtggagttagtgcgtgcacattgctggctcagcgtaacccatcacgggaccggaggagaggagagcggggaagaggagagcagcttcaggccgtggtgtctcccacgtctgtgttcttatttgcagctcagggtttgcattcccaggtagaacaggtgtcgtacactgtgaaatgttccaggttatttgtttataatgtgtgtgtcatatacagatagctccgatgacatctgaagttgtgacttcatcatcttgtcatatttctgtatgatgagccccagggcccatcctgaggtctgctagccatgtgcttagtctcacctccccagcccacgctggcattaccacccagagacccttcagtgctgtgtgtttttcctttttagggttacttttgactcacagtgttaggcaagccagcttggaagttaacttttaaaaaaattcaattgaagctgtaaagtataatatatagattggaagtcaccagaaattgttttagtttgtgaattcccccagtgtatgttctgaaaagaaaatgggagagcttgtaaagcatctcctaaatgcgaagccgcgtgaccctggacttctggcacatctgaataaacatgttcttattctgg

SEQ ID NO: 7163 - DNA, 1440 bp, Homo sapiens
cccgtcacacacacctgcctaaagacagggatggctgtccacaggatcctccagccccgtgagagggactgtcccttgagtttctcaactgctggaaggagctgtgtcccagcaaggaagggaaaccatcagggctgggctcggccctgtcaggtttggggcctgtgtgcttcccagactctccctccagccgttggaatcgctgaagatggcaatgaaaggcggagggatgatgggctctctctgtgttcaaactccttggagagacgactaggaggacagcttgcctcccaggccccttgtggacttagactcaaaacccgcaggagaaacaggtccgactcagtatgcagtcgcaataacatgtctgctcccgaggttaacattcaagcgtttctactttgaaattcagcaagagtttctgggccttatgtttgagggtaccttttgctgcagttgtgaatattcagtacattgccagctcttggtcactgagtgattgagttagggctccgcaagagactttggggagtgaagtggatctcttcctcatcttttggtcctctgaaatgtgtgttctgaagccatggggctcgtcttctggggtgttcccctgcaggtgctggtgaaggtaacctggggcttaatgatggagtccctgatcatttttgcacaagacaggttgctgaggggtcggcaagcatctgacttgcccaatcccctggatatggtgagccccgccatgcttttattctgtatcgcttttgtctttattgctgctttcaacatttacgtttggttacagttaactattttcggagtgtggtgattgaagacaatttcatcatcccactgtacttttttttttgagagggagtttcactcttgttgcccaggctggagtgcaatggcacgatcttggctcactgcaacctctgcctcctgggttcaagcaattctcctgcctcagcctccagagtagctggaactacaggtgcccgccactatgcccagctaatttttgtattttttagtagagacggggtttcaccgtgttggccgggctggtctcaaactcctgacctcaggtgatccacccacctcagcctcccaaagtgctgggattacaagcgtgagccactgtgcctggcccttttttttttttttttttttttttttaaagagatggcatcttgctatgtcgtccaggctggtcttgaactcctgagttcaagcagtcctcctgcttcaacatacagctacaggtaccccccactatacatttttaataaggattcatggctcagagggattttctgatggttttgctgatttgtttctagtttttttgtgtttatatttaacatgaagaccaagtttatataactaggtatctgtataatgcaacaacattggaacacaataaagatgtatttttgt

SEQ ID NO: 7164 - DNA, 207 bp, Homo sapiens
ttgttgtgattgttgtgatttcctgtctcgtttgccttgaccgccatgtgaaagaatctgttccccagctaggtggggaaaattcacaggtgggctgtctgtagagagaactggctgattaaaggcttctcgtcccgattttgtgatagccaagtgcttggcctggtcgacggtctttgctcctttacaaataaagtgttctgtttc

SEQ ID NO: 7165 - DNA, 271 bp, Homo sapiens
aactaacatccatcctgagctaaacaagagaaactaccatcttggccagtgacaagtgttcggagggcagcagagaggaccaagcctgtgtcacctggagactaagaaattaagttttgttttgacatcttcagtcctgtgtgctttcagaaaaccattttctctgcaaagaaaggaaacagatttgcaaactttaaagtctgtcgtggatttatttatcctcagattattgttactgcattaaatctacctttttgttttaagttgcttg

SEQ ID NO: 7166 - DNA, 684 bp, Homo sapiens
gagccccgccgcgctggcgacacaacctaaggaggacctttttgttaagtcaaatccaacggcccggtgcgccccaggccgggagcgcgcgcggactggcgtctcccctcccggcgatccgcccccagcactggggaggcgccactgaaccgagaagggacggtcatctgctccggaaggaaagagaacgggccaagactgggactattccccacccccggtcccccattgaggcccgccacccccataactttgggagcgagggcccagccgagggtggatttatcttctcaaagacctaagagtgagcgcggggtgggggagggatgtgaagttatccagcctctgctaggcttcaagaaaccgtcatgcccgcttgagggtcaggacccacggggcattatcttgtctgtgattccgggttgctgtgacagccggtagagcctctgccctcccaaaactaagcgggggggcgtgggtcaaatcatagccaagtgacttgtttacatgtgagtgaaactgcacaaaggaacacaaaacaaaacttgcactttaacggtagttccggtgtcaacatggacacgaacaaaaccttacccaggtgtttatactgtgtgtgtctgaggtctttaaagttattgctttatttggttttttaatatacaataaaataatttaaaatgg

SEQ ID NO: 7167 - DNA, 226 bp, Homo sapiens
ttgagctgcaacagctttgctgaaggcctggccagcctcctggcctgccccaagtggcaggccctgcgcagggcgagaatggtgcctgctgctcagggctcgcccccggcgtgggctgccccagtgccttggaacctgctgccttggggaccctggacgtgccgacatatggccattgagctccaacccacacattcccattcaccaataaaggcaccctgacccc

SEQ ID NO: 7168 - DNA, 550 bp, Homo sapiens
accccgtgtccccggcctcagcacccctgtctctagccactttggtcccgtgcagcttctgtcctgcgtcgaagctttgaaggccgaaggcagtgcaagagactctggcctccacagttcgacctgcggctgctgtgtgccttcgcggtggaaggcccgaggggcgcgatcttgaccctaagaccggcggccatgatggtgctgacctctggtggccgatcggggcactgcaggggccgagccattttggggggcccccctccttgctctgcaggcaccttagtggcttttttcctcctgtgtacagggaagagaggggtacatttccctgtgctgacggaagccaacttggctttcccggactgcaagcagggctctgccccagaggcctctctctccgtcgtgggagagagacgtgtacatagtgtaggtcagcgtgcttagcctcctgacctgaggctcctgtgctactttgccttttgcaaactttattttcatagattgagaagttttgtacagagaattaaaaatgaaattatttataatctgg

SEQ ID NO: 7169 - DNA, 4127 bp, Homo sapiens
gcagctctgtggtttgcctccccagatggcgggtccccgctcgcaccccgtggacaccgggcactggccactcctacatccccagctccacacggcctgcacacctgtgtttccatggaaatgccaccgtgtctgctcccaggcctcccactagtcaggaccagcttcagccacttcttttctctgagtggtgggacaactgcagccagagactctctcccctcccaccatgggcccctctgcccatgtttcctcccaggaagagcgggcagagtggcccagccccaggcagtgcttcctgagcagaccacccggactgtctttcctccacccgcccatggagaaagagcacgcccggccccgccctgtgctcacctctgcctggctcagcgaccttctcaggcattctgccctcctgggcccctctctccctgaaggggctttgtggcatctctggaagagcagggtgtgctgcactcatgggcctggtctcactccttggacttgtcaccttgtgacatttggcttatcagcatttgagaaggctctgctgggtctccatggtgggggtctctcaccttcttgaccctctctccatcattcagctgccagcccaggcttcacacccaagctggctcagcagccgagcctggcaccgagggtccctgcaggctccctgggcagggagagggccaaggacaattgggagggcagcaggcagcccgcagatggtggccatgtggcacgctgctgagacgacactaccaataaaccaaactgccacgcacacactgcaggctcacacccgcacacctggtcctggcttgtggagggacttgcactggaggtattgctctggcttgcctggggaagtgtcacagatgtgcacatgggccacactcagtgctgtggcctggcctgccgtagcctcacacatctgcctcaagagccagcagcaaacagctttgtggcatccttggaggttcccagtgactgagaggcctgggcagcactaaggcccctgctctgctccctggcataggccttggcctccttgcacagactctcctgacagtctggcctcctcccacctcagaggtcctctggccaccaatttatactctctccccaagctgatcctgaaggcaggcagagcagctaggggctggtaacatgtattcccatcccgtgtcctcactggtgtgtctcctggccatgggcaagggactcgggtcatcccaggccctggtccagccagacacctggccccacacctcccaccaggctgctgttgctcagaaggagaatactgcagctgtatgcatccccgtgtgtcttgggcccagctcgctgggtcagtctgctcctgtcccctccagcatgcactgcctaggtcagcacaggttcctgatccatggtgtagttagcccttcccacctggcaggacggcccagaccaccagccaagcagggaaagggggctgggcttgacgggagaagagaccagcgacatggtcgttggggagcattcaggatggcgacttcagctgggggtcatgctgagcaccaacaggaactattccagtgaagagcaagtgctgcccgacccaggaccctgtgccaggctagcagccctccagctccctccagagaggaaacctctgtctggctgagggtgggactagctgggatgtctcactccagttgctcaggttcacccaggaagctcctccgtggagtggccagcctgattctagccctgtcctctctggcagcacatgccacacctgcctgggccttctgctccctgatgcttgatgagcccctgcctcctcaatgtttctcaaagacagacccccctgaggccagcttgaatgtgaagactgctgaagttagctggcttcacttgagctgcagaaaaggtggctgggatggcccaggtgcacccagaggccccagccctttggctgcctttgggttgtgacttgggttgtctctgaggccctgccagagctgggcctgcgggtggtgggcggtccgacctcgggcagtcagtgctccgcagcctcagcactgcatcccagacccagtgtcctcagagggaagagccagcctccctgcctcatggaaccaggagtcccaaaaagtcaggagcctggaggctctgaaaggagcagggattccatagtgcgtgaagctgaaataggcgccctcctggggagcccccagcaaaactgtttttcatacccactcccagaactgccccgctccagctccagcgccagcgccagctggttgccaggcatcattggagaggcctggctgccccaggggcagcagggagtggtggacctgtatgggctggcaggaggccattggccatgctgacaagtgtcacctgccttcctagcctggagccacccctcaggtggcctgcttgcacctcctatccggaggtagcctgccccacctgtaggcagagggggctcttgcttgaggcctgcacaggaagcaagtatagccccggtgccccagagtgggttccacttagccctggcgagatggcctgtcctgagatctctgctcccagaccccaccatctggggagcacagtccttaggctgcctggtccaggaagggggtgcggctctgtcaggaaacctggactctcaaggcccaccagcctctccgtgagtgttagaaatcacagatacagtatatacttaattacactaaattattgctgggattccttataagcactaattatacctgattataggttaaaatatttattttgtcaaaatattttcttgggaatgtgtttaaccctttctgcgttcattgttgctgagatgtgaaaactaaccattccctcctgcctacctttttggccactgggcggcagagaatggcgctatgtgcagttgggcccctggcaccatgggcctttggcctgcctgctgcagagtagccctgcctgggcagtctccaggcactgagcaggccatctgtggccaggctgagagaatgactggctcgcttaccagcgtgcatgggacaaggagctttggagcctcaaggggttgttgctggcctgggctagagggaaaggtgaccatccgtctgtcctcctgtctttctattagcgcctccatgtgagtgatggtgccttggttcactagccttcccccaccaccccaccatgccacctggtggtcttggggcctgtgctgtcactccagcccctggggaggagaggacccagcccggagagttggggcaagggctccacatggcccaagggcaacagatgctcgcagggcagctgctgccgatgctcacgctcctgcccccctccttcccgctgccacaccccaccctgggcccccgcagacacgcatctctaactcagttgggcccagccttctggatggcttggggtaggccatgggcccacctggggccaggccagcccctggggcagctctggaagagcagtgtggaggagcacttgcttgcagcctggcttcagcctctggcactgctggagtggtccctgggagcttctgcactgtcggctttggggacgtctcacccacttgggttacagtaggccttccccacccagagagaagtgtttccaccccagagacattgtctgtcagcccctgaagtgctcgcctcccccagtgcccgtcaccagcccttcctatctgtggggtccaagtcaggcttcccctgcggccaccagccatagggagcagccatcagcccccgagtcagaactgcttctgtctgtccatacctccaggctctcccggagagggggacggatatttatttcctaaagtttgcacttaattgtgaggattctcaggattgttgggggctactgaaaagaggaatgtgttgaatgtcgcgtttgctgtccactcgtcctagaagtttagtgtttttgtcactgtcatgtgtttctgtgggcagagctggttctggagggtgggtcagtgcacccgaggctcagagcatccatccaccccactggccctccttccagataccctctctctaattgggttcttgcatgtaaaatactccacaataaataaataattgaacaaatta

SEQ ID NO: 7170 - DNA, 529 bp, Homo sapiens
ggcctgggcagagcacactcagcaggatagaggcagtgcagccacagctcccccggccttcagggctccccagcctgtggggctggcttccttggcttttggggactcggcctcagcgtcaccctgagattccccccgagacacagtgcgctagtacggctgtccggaggtcagcctgatttcaacccaggtgcccctggcctggccagcagtgaatgtaggagatgaattgtgcaagtgactttctctcgactctgattttattaaatatttctccaccctggaaatgtgctgagccctgttttcacgtatgcctctgcacttctccattcttcctgttttgtctaggttccagagggttaaacagcttatctcccatggcgtgtttggatatctgctgcctgtggtcaggaaccttgcactggggaaacaatcatgtaatccacagacaactctatttgtgttcttcagcctcagcctgaaggcttttttttggctggcttttaatcaaacaatcttttgaaacaat

SEQ ID NO: 7171 - DNA, 297 bp, Homo sapiens
gacaggctggcacagccccaggcttggtgaggaagaggaaggggcctcatccactgtctgctagcaaagaatgtactcaggtgacaccacctgctccagccacgtccagtgccacagtccccagtagcctcaagcagcaccaatggggatgaccctgacaggtgccctcaggggtctgggaaatccaactctctccacagtgtgagtgcacgtgtgaagccccctcactcttccgctagggataaagcagatgtggatgccctttaagagatattaaatgcttttattttcaatatt

SEQ ID NO: 7172 - DNA, 881 bp, Homo sapiens
gctcagggtagggtagagaacgccactttctcagacctgtcccctttgtgtttagaaatgagttaaccaggaccaagtggccatttagtgtcctggaaacttagaggacagtgttggcctttggagtcgggccttcttgtgttaaggggcacaaggtccagatcactctggagcaggccagctctgctggacagtgaccctcttcccaggcctcaggagtgaccatagccactgctgaaaagtcacgcagctgctccctcggaccccccaaggatggttgctgttagcagaggattggtgcagtcccagctgaagcccactgtgtgccaaaggaagaagctcccagggctgcttccttcacctgcagaaagccccaagtgagccaccagcactcatggggcagtccctgtccaggctgcccagggcttctcatagacgtcctgagaaggacggtgtaatgcaaggaaatggctgtggtaacactgatccttcagaagaagcttcattccctcttaatctagttaagccaggacatccagaattcattgctttaataaagaacccaggccgggtgcagtggctcatgcctgtaatcccagcactttgggaggctgtggggggcggattgcctgagctcaggagttcgagaccagccagggcaacatggtgaaaccctgtctctactaaaatacaaaaaattagccaggtgtggcggtgtgcgcctgtagacccggctactcaggaggctgaggcaggagaattgcttgaacccgggaggcggaggttgcagttagctgagattgcgccactggacgacagagcgagactcagtctcaaaaaaaatttaaaaatttaaaaaaataaaaagaatccaaccccgg

SEQ ID NO: 7173 - DNA, 869 bp, Homo sapiens
aggagcgggcccactctggacccacctggcgccacagaggaagctgcctgccggaggacccccacctgagagatggatgagctgctccaaaggggaactgttgacactcgggccctttgagggggtttcttttggacttttttcatgttttcttcacaaatcaaaatttgtttaagtctcattgttagtaattctgggacaggttattaaaggatttaaatttgaacctggctttctcacagctggacataattctaggaaaataaaatactatgtcgccacttggtcataatcatttagatggtggtgtagggcaaagctgttagaaagattgtagcgttttactctccctgggctttcctccgccttgctgcaacagagaggaaatgcccatgtccacagcttgtacacactgccccctcactatcttgttatccagtggcatgccaaaggagaactgaattagcttctgaggcttctgctgtaaatcagaagtgtatgttagtcaagagtaaacaagatgcacccagtatggtgggagggttttgctgtcagtagctcaaagtatggtgtagaaatggcctcctccctccatcctgggaagtcccagtcccatcctggtgtgagaatcaaccaggctttcctgctccacctgagataaccaactccctcccgtaatcaggaagccaaatgtcaccttcccaaagaaattttattttcacgtagctgaagtgcaaaacatagatgaccatttttaataagcacaatcaaatttttaaccacagaatgtctacaagaattatagctttaaaaaatacaaccaatttttatatttcaaaaatatttgaactcaaataaattaatttctt

SEQ ID NO: 7174 - DNA, 42 bp, Homo sapiens
gaataaaagaagaggagtgtgggaaagtggttgaaacaaagc

SEQ ID NO: 7175 - DNA, 1282 bp, Homo sapiens
gcagcccggcggccgatctggccaacgggcctttttacaggaactgaggtccagagaggacatggacacccccagctctgtcagagtcacacggggctcagtggacggccttggactgaacgtgggctcctaactgcctccggccgctctgcacaaactgggatggcccaggtcccccagcaagggtacccagcaagggtagctccggggcttcctggctggttgctttccattggctgccagctgtgtgacaccacagggcggagtctgtggaggccccgcccacctcctcttgtcaatggccccatctgccaggaaggttgaggactcccaggtttcacccactggaggctcaacctaaggaaccctggccatggtgggtgggttcaccttgggctgaccacccactgggcctgcctgcccctccctcaaaaggcccctggagttgttcaggctgttgggaggtggctcagcctcgaaggacagactgcacacctgttgacctaaactcactggacagactccaggtggacaccaactcctcaacagccccatgacttcagctccacctggggcacccagcaccccaccacagggctagaggccctaagaccctgaaaaaggggcgggcagtagggaaggtggaggcacactcctcttctgttggacaggtgagctctgagggcaagccctgggcccagccacgcagagaccctggctgccctggctcttgtttgtttaggcccaggttctgcccagaccggggcccagcagagctctcaggaggctgagaaacctccagggcagacagaaagttggggccagagctaggttttagagatcctacaggatcccacatgggacggctacctaggtggggcacggcccctacccgagaacaggagggtcctccagagaatgtgccatgatcagggatatgagcagggcctgcccagagcctgggcacctttgggagagggaaaagtgaggtgggacttggaaaggctttgaacgccaggctgatggttgagggatggtgggcagggagggagggcgaagaggctccctctggcatttgggagccggtgggtggagggaggagcccttggaggtggctgcagtcccttaatggggggccttgctctgggcatgtggggctcttcctccatccagagctggcccaagacccttagaaccctgagtgctggcaaatctcactgctcctgacccagcctgtgtattcaaaacgaaaacagtaaaaccaacatcaggatgtccgtca

SEQ ID NO: 7176 - DNA, 144 bp, Homo sapiens
aggctccacaggctgcacagtctctgataatgaagggctgccttcccgaagtcagccgctgcccatcggcctgaggggcagcctggtggccagagctgggggcacacagaatagttttgtataataaagtctcattttcagaga

SEQ ID NO: 7177 - DNA, 1018 bp, Homo sapiens
agggctggccccctcaggcacctttcctcccctggacacccatggtctccatgagtgctccctctgctgcccctgatgcatgcttctgctgattcccgagcaccaactccttacaagggggccttgtggctctcagccatgccacatccctgtcacacacccagggcatccattcctaagccagacccggctcccctacacctgaagttacactgccagcagttccccaggcctcttccgagaggcacatggttctagcctggacctggctgggctccatgagaatgagttgcctccaacctgtcccaacagctgacagccaggagccactctcccagctgcaggcctttgtggtccatcttgtcctgcttcctcactgtggacccctgtctgggccaccctagtgtgctaagctgagcagtgcagtgtgaacagggcccatggtgtattctaggccacagcccagcactcctctgggctgctctcaaaccatgtcccatcttcagcatccctcccaccaacttactcccctgtggtgagtaccgtggaaccccagcccacctcactatcatactcagcttcccctgatggcccatcccagcccctgaagctctatgccaagaacacagctaccgcacaccaccctgaaacagccacagccaaggtaggcatgcatatgaggtcttccccataccctctgggtgttgagaggtttagccacatgagggagcagaggacaatctctgcagggctgggagtgggtagggactgaaggtctcaataaaccttcagaacctgaatgaactggcttcatacacacaaacatatttgtttatcccccaaatgtaggcacctggctcctccttgctcccctgctgatggtgtcctaccccgaactccaaaaattacacctggagtcaggtgcagaagggaaccttgtatttcacaggcctcattttgatggcaaaaagacagtgtaataataacataataataataaaaatataatactgaaaag

SEQ ID NO: 7178 - DNA, 371 bp, Homo sapiens
caaagaagcttggaaatagaaagccaggagtggctgtccccagtatgcaaacacaccacggtctgccctgcaaaaacaccaatggggtctagtgcaggtggacactttgaaccactcctcaaaaaaagaactttggctgattccttgtggtgacactcagaggggtctgaacagacttgacaattctgttctggtcaagctggagttttcttctgtgacttggactgctctacagaagacatcagccaactgcacgagtcagagtccagggattgtcactattattaataatgtaaatggcttcaaatgggacactgcagataaaatcacaaaaaccactgttatattaaagattacacatttcctgggca

SEQ ID NO: 7179 - DNA, 234 bp, Homo sapiens
ggaggggttgctccgcctggcctggccatactgtgtcccatcggagtgcggaccaccctcactggctctcctggccctgggagaatcgctcctgcagccccagcccagccccactcctctgctgacctgctgacctgtgcacaccccactcccacatgggcccaggcctcaccattccaagtctccacccctttctagaccaataaagagacgaatacaattttctaactcagc

SEQ ID NO: 7180 - DNA, 2196 bp, Homo sapiens
gcagcaggctcatcccgtggaccggtggtgggaacgtgaggtgatgcctttgggattacagcttgagttctgtcaccccatccccaggaaactgtagcttcttaactggtgactaccaaagaacaagcagtgatttgaaaaaggaaaaacaatccaaaaactacatatttgtaggaaatctgccttattggagaaaatcaccctttccctttttctttgtagaagcaggagcaagagtgtttggctcccagtttggacttggtgaataaatgtaccttagaactaggataatcggtacagttattcttaaagataattaaaaatgaaacaaagtgagtgctcgtcactgggttcatcagagcagtgtgtgaaattccatgtgtttgctgaggtgtaaaggtaaatgtattcacccctcatccaggcagtttgatatttggagtaagtttgtttaaatctgagcatgcatctttaaacagctcaggaagaaatagcttaagaagaagtgaaacatggatcttggaagaaattttgaaatcttcaatttgatcctaatatggatacatgttaatcttccaaaatctttcatattgcactaatttattaaaacaactgtgtattggattttgtaatttaactaaggcacaatggacttgtttaaaatattttacttgattgtatacatagaccctttccagaattcacatgtaatctccagtgaacttttaagtggttaaaacttgtattcatgtgaacctttgcacattttttttttttacttctttatctacacctacagattttctcagtaatgtttttgttagcttttggttccattttttattgtgcatgcagaatgtacattgatgcctgtgaccttaggtttattaaaggctaggtttatttgggcagtattagaaacaaaatcatggatcaagagatactcttgataatttgaatagggccaaaacaaagttggtgacctaaaggcttgttagtgatgtggagttcctacatgcagtgagtggaaaatgaagttcgttttctcttaggaaaatgggcagctgtcttctgcctaatgtgtatttttcatgttaattctgacagttcaccaaatagctagtcatggagaatgcaggcagttaacttaatatccctccaggaatggttcctacgttgtgtattacttggtttcttttacttacctgcttgaatacttgaataaaccattcaccaattttaatccttttattttaatccttttacataaaataatctgaactctttgacaaattgcacagagctctttggcattaatctaattttaatgtactgataaaaacaaacatggttttcctttactttgacaaagtaatgtaatttttaccttatttatctgtatgaaattccagtagttaatttgaacatttatttatatgacgtttgtatttttaggtctttaatacagtgtttctacctctcatttgtaactgcatgcattattcttgaaactaggtaaaactcactgaattgttgtgtaatagcctttttattattgcctgtacaaatgtatattaaggtaaaataaaactgacaaagtgtttctagggtgtagctgggtacatattaagtggcttgttgagccaggtacttccttagtgagtttagagacttggccatgaatatcctttgtcctgccccaggatttagatcttggctactgtcatgcaggcttccaggaacatagactgttttacctccacaaccctatttgttattagtgatactttattttatataatattttttattcacagtgaaatttcattcatgttctttcagttatcacctgtgttatctcagttgtaggtttattctatcctctcctcttcctctcccatttcttttttaagacaggatgaaacaggttcagagaggggaagtgattggcctaaagtcaggaactaggcaagtggtcaagccatgctttgtgactttcaagttaattcttcttgttcttgtatattaaaggtcttggggtagatggtgtgtgtgaaacagtgaagtctcaacagcagaaaagaacaaaatgtaaattcatgaataatggttctggttatacttccattatcaaggctaattaagagattttgccttgagtatagcaataataaacaaatgctttatgtttccctg

SEQ ID NO: 7181 - DNA, 788 bp, Homo sapiens
ctcaaaacttgagataaaggaaatctgcttgtgaaaaataagagaacttttttcccttggttggattcttcaacacagccaatgaaaacagcactatatttctgatctgtcactgttgtttccaggagagaatgggagacaatcctagacttccaccataatgcagttacctgtaggcataattgatgcacatgatgttcacacagtgagagtcttaaagatacaaaatggtattgtttacattactagaaaattattagttttccaatggcaataacccatttatgagagtgttttagcctactggaatagacagggaccacatcctctgggaagcagataagcatagaactgatacttgatgcacactcgtagtggtaactcatccctaatcagcattgtaaagcaggtgccagaggtggtttgctttgtccttccaaagcaggtgagtcagccccaccgagagccaggcagctttgagtggcagcgtggtgctagcagcttcagcggaacagggtgagagttaattatgcagtcttcttgacagcggcattaatttggaaggaaactgacaagtcatgggtcaagtttcagtgacttcctccttcctctgatggcagtatatagttttcacattttaattcctcctcctgagatgcactatacttaaaaccattctctcccctgctaacagaagggtgtgaatctggtttactttgagcattaggatttgcccctttggaattctgcactccagttacttaactttcccttcagaatacatgtgg

SEQ ID NO: 7182 - DNA, 2018 bp, Homo sapiens
acattcacaaccaaaaacaaggttttattaacttttgcctttaagaacctgcagtgtttagccctctttgattcctagtattattacctttggtatgaactcttttattaaactgatcactctagaggtttatgcattttgtatcatttttcaagccaacagaaatgtgtaatgcctataattctgacactttagttatttttaaggctatgagcatgtaagatactgttggaagaatatgtataaataccactaggtagcttattttgaagagatagtatctaaatttttgtccagagtagattggttgcagtttcttaggtgtgtttcttaatacgttgcctcaatgttttaaagcatgtagaaatttgaatacagtttaacttcatatagtcctttgtttatagatttaatatttctaaagactaaagacatcacagctccctttaagattcagtaatattaataaaattttagaaatatagggttagaatccaacaaattcagaggaaaattgttaaattctatagctgtagagcagaaatgaaacccaggttctaagctctaagggggccatgaggtaccatacaggtgcatcagtgactgggcatagattcagcaaaattacaggatggttaagagagtgagctgtggagccaaactctatgtaacatgaatttttaaactgcctggtgcctcagtttatccatctttacagtggggactgtagtaagtttttctttttctgctcagttgtctgtcttgttgccactgttccctagtctgtcttgttgccactcagtgcccacatgagaggatctacggtaatttctgacagcctgggactccttaaagaaaaacagaaggtgctacaaaacccattttaggagaaacctctgttgtcctcatggaaccccaagaacttcaggcagacaggtctctctcaaaatctaaggctctcctctgttttgttttgcgttatctgaccttttaggtttggttgggcatcagaaatcagtcggggagagagatctaaagaaagttgtggatatgaagatgtatttatggtaaaaaagttatgaaggaaagaaatgttatatgagagaggatcttgtatggcaaattcttgtcctaaagtagaatgactaattatgaaagagggaaatacaggaaaagtcagaaagttcatgtcatagatggtctgtggaagttgtgctagggttcataaaatgagaaagaaaaacttacaactgctagatcttctcctgtctagaagtgttgtgtatgtgttggatatgtaaaggagccctaattacttggcttagaagaaaaggacggctcttaaatattttgtcagaaaaatagaatctccaatgccttttatttcacatgacttcagtaatctttgggaaataaagacagtgttaaaatcattggtaaaaaaaatcatcaaaatttatccattttgtctaatttaagtcagaggttaaattttagaagtgctttaacgtcataaattgattgactttggaaaattgttctgtttacctggtttggagctgctcaacttctaggtaaggcctgggggacaggtggagttagccatgtctcctagctatgctggaaagagtcagactttacctgcagttctgtcttgtatcctatacactgcacctggtacgttattaaaacttcctgctgcttctaatctctgagttccactttaaatttttccatcacttgaatactatcctctgtactaaatttttccgcaattaaatacttagaatcatttttgcccacttgacccaagcattagtgatatatctttaaaatacttataatgtgtcacaatatatttagcaaatgtagcgaatggcatttttacttttgtcagcatttacatagcatttagcaatgctatctcaagtatttttagtcatttgaatgttacataatatgcttttcctttgtttctatgtaaataaataggagatattcaataaatagtatcaatt

SEQ ID NO: 7183 - DNA, 374 bp, Homo sapiens
tttcagtagaacagggagcgaagcaaaaccacccggcccacaagagacaacagagtattcagatcgccacactctgtgaggcagcagagcctgggcaggtgtttggcttagtatttgttatttttaaaaaataacagatcacgggtgtacccagggtttttcagctcattacactaagatgtggatttccataacccaagaggggggtctgaggctgtggaagtccgactgggcagtggaatgctgatggaggcagacgctgccgagggggtgtggacgtgctttgggggaggtctttaagtctattgtttaactgtaccatccagagcccaccagaagctattgatcattaaaattatgagaatttcaactcc

SEQ ID NO: 7184 - DNA, 4441 bp, Homo sapiens
ccctggcctgcaggcgggagcgctccctgccggactcttccacgtggcctttgcctggccccacgtgctctcaggaacctggtcccactgggaacagactcagagttatttttgtaaggacactcatctgtgccccacgtccagatccctggaggcagctgaccaatgatgggcggtgacccggtaaccgaggcggcaaggaggccaggtagtcccggcacctctcactctgcagagaccagcggcttcgtgggaggcctgtgggtcacacgtaggggctagagccagcctgcatcctgcccaccgggctccacttggagatcagcaggagggccagtgtgggacccctgctgccacctctcctgggcctgtgtcctttctggaaattaagaaggtgtgctccagagccaagaggagcaataagaaacctcgtgtgccagcttctgagggtggcagtgccagaccccacctgccagcggtgctgcccctttctcagacccccatgcccagtgcaggcagggccctggaaagggtcagctctccctgacagagaccagcagagtgaaggactgagcactggccaggctcaaccgtacgtgcggttcacacatgtgaacacacaggatgcagtctacaggcgggctggtggtgggtgccgggggtgttttcctctccttggtacccccatcttttttttggcctctcgtgtaggttctgcaggaaaccaaggccccatccccatgggctgctatcccctatacccctgtctgccaggaggagatccaagggggcctgagcagctgcaggcccgccccttgctggccttggccacctgcctgagccttctccgaggagatgccttggggctggggtgggagtgaagctgactattctccaaaaaccaccctcagcatccaagaggaagaaacatcagccacaggggtttctgtgctgctgccagacatcagtgtcctcttttgtggctggctacagccggatacactttgctgcccatctggccctgggctcctccccaacccagccttcctgggtgcagcctgggagacacactagcatgctttggtgggaccagcctttccagggcatgctggcttcccctggggctgactcaggtcccgccctcttgtgtcagtgctaacaaggatcagattcgtccctgcccttctgtagagctggagggtgacctggagccaggggccctttagggctgagacatttgttagtcggagtgatgcatccctacccggcttcggggggagtcaggctgggctctgggcagtacagggagaggttcaccaggacccccatgccttcctcccccggtgcaggggcagtggtcaccatgctgactcctccctttgactccatgcacgggcgctggctggcctgtggttgcatttcccactcacctccttgctatccccagtcttggcaccgagaccccccacattccttctccagcaacagcagcccaggggccttcctgcctggacgcaggaccacggagacctgcatgtgcagggaggcctggcagcctgccgatgggggtccccgagccccggagtctcctcgaaacccctgctgtgggtcacagcatggaccaggaggggtcaccatcctgagtacccccgacatccctgccccttgacctgtggcagatgctcctgccctggcctccaggaagtcagctcttttgcaaagggcttgtgtgagaggtcggagaaagccctgggcctccagggagatgcagctggcaggaggtgggctgagctgctccggggctaggggtggcccattgctggcagaatttaaggaaagagcaggttgtaggcacagaggatgggcagccaggcctgggccttccccttactgtcccagggcagcagagctagggtcctcttttaccctccctaaggtcacccccttcccatctacacgtccctccccaagttcaagcacatagtcaatcatgaccactcaggagctcagtgagctggggccatgtccctgtggcctccagcccatccgcaggagggtcccttgcagtgacagcacaaagagtcccccacaggaagcccctgagggccagcatggaccttgagagccaggagggaatgggcctggtgccactctgttcccactcccacctaagattcctacccctgtgttctagcaggtgactcttgatctggccagcccacaacaaatacttgaactaggcagcatggggtggtggaggcctgcagaggccccgggcccaggaactgagactagggctttctcatgaggcctcatcaagctcccgcaggtatgacctggcctcctcgcctcgggctgccttaaagcaccgctaacccacgccaaggggctaggcagggcttcgcggggcctggcccaaggtctccagcagagcaataacatcttcccaggttgggttgccacagacaccgtgccctggagcccccagcccatcccatctggtgctaccctgtctgcctggcagcctagcctcacccctcctgtccggtcacctgggggtccttggtaaggatgccgccacatggggccggtttatgcacctgggcgagaacctgactggggcaggggatgctcaggggcctgcaggtctcccacagagctgcttttctgcccgcctcaccctgtgggtttgtatttcttgccgggtcaaaataggcagtgactcgtgccttccctcctcagggccggcggcagggtgtggacccagctggccgctggaccgtccccttcctcattctccaagctcatcaacaggtctcagaggaacatttccataaaaggtgtggcctggcatgcagtgctgtctgcacgctgtcgcttcccccacagcaacctgccggtcagccttaactggtgtggaggtcgaggtggggagggggaggcgggcttccctccctggtgtctggcctctttttgctcagccctcagcacagccttcagcgtggagagcgagaccctgcgtgtcactggggcttggctgaggtctccctgcaggataacagtgacttcaggaacccagaccccagtctgggcggctctaccttcccggctggcccagcccccacaccacagttccctgccacctccaggcacaaaagcctctgaggccacagcccagctatgaagctgagtggctttgtgcggtctcctagggaaggggcagtgatgccatgcatgagatccgctgtgccataagaagttgcttcctttagaatttctggtccaatgcagggaggtgaggcccagcctcatgataacacatgcccatcaaggaaaagctgtggctaatgcttccaaaacaagtgaaaatcttgcaccaggcccagggccatatctcattccgccccagctactgagggaggggacagactgctggaggacaatttctcctagttaccactaggggttacatggctactcagaatgaaagataaattgccaggcctgttgcaatcttttttttgagatgggagtcttgctctgtcgcccaggctggagtgcagaggtgcgatctcagctcactgcaacctccacctcccgggtcaagcaattctcctgcctcagcttcccgagtagctggaattacaggtgcccaccaccatgcctggctaatttttgtatttttagtagagacggggtttcaccatgttggccaggctggtcttgaacacctgacctcaaatgatccgcccacctcggcctcccaaagtgttgggattacaggcgtgagccacctcaccaggccccgttgcaatcttactccacttcgttttcacagcagtcccgggacatgcccattattaggcctatttgatagatgatactgaggctgagtcgggggtcacaagccaaagccacaccgctagaagggctcaggacccagcccagctcccgtcctcttggtggcatcaagcttgtgtgatatgaggtcttatgtctgctcatgacagccttaaaagcaataaacagatacaacttccagcaacttcccactcagctgcaaggctgcgggggggtcctgcctcgagccataaggtgagcagctagccagtgccgggccagtgtggagaaggctgaattgcctgtgaagctggggttgcaggcaggaatattcatggagcccctgaccatgtactcacactgctcttcctcagttcagggttcttggatttgctcaagtccacccaaatatccctttacgattctcagggtcccactccttccagatccaatgccctaaactttacataagagttccggcaaggctgtgacttcaacttgtgttgtaactgcaacctgcagaatcaaatttagggttatgttttcagttgtatcagtcttacggctacaagatattaaagagattcttttctggttatca

SEQ ID NO: 7185 - DNA, 479 bp, Homo sapiens
gggcctacaggaggggttaaagctgccggcacagaacttaaggatggagccagctctgcattatctgaggtcacagggcctggggagatggaggaaagtgatatcccccagcctcaagtcttatttcctcaacgttgctccccatcaagccctttacttgacctcctaacaagtagcaccctggattgatcggagcctcctctctcaaactggggcctccctggtcccttggagacaaaatcttaaatgccaggcctggcaagtgggtgaaagatggaacttgctgctgagtgcaccacttcaagtgaccaccaggaggtgctatcgcaccactgtgtatttaactgccttgtgtacagttatttatgcctctgtatttaaaaaactaacacccagtctgttccccatggccacttgggtcttccctgtatgattccttgatggagatatttacatgaattgcattttactttaatcac

SEQ ID NO: 7186 - DNA, 87 bp, Homo sapiens
gcccagattgccagctctgggttgactgtggaggtagatgcccccaaatctcatgaccttgccaaaatcttggcagacattgggccc

SEQ ID NO: 7187 - DNA, 395 bp, Homo sapiens
atatgaagctttgtgtaaagtagaagcagaacaaaatgaatttattgaccaatttatttttcagaaatgaactgaaaatttcgcttttatagtaggaaggcaaaacaaaaaaaagcctctcaaaaccaaaaaaacctctgtagcattccagcggcttgaccaatgacctatgtcacaagaggtggcgtgtaaggaatgcagccccctgaagacagcactacaagtctgggggagccagttttaacatcagtgcacagctgctgctggtggccctgcagtgtacgttctcacctcttatgcttagttggaactaagcagtttgtaaactttcatccttttttttgtaaattcacaaagctttggaaggagaagcaataaatttttgttttcaaatg

SEQ ID NO: 7188 - DNA, 1483 bp, Homo sapiens
gccagctgaggccccaagtgcccaggcttggtcaccgggaagaacaactctcatcccacaattgctgcagaactcttctctccccatcatgggccacagtgggtctcttaatttgattgtggggttctttttgtggggaggggtggtataacttttcttcagaagacccatgtgggacacctccaaggctggcctcctcataagccctgcctacaccatgttccagtaaacctctccaccaaggaactgtgttcagctgccacaggcctggaggagtttcctggcctgtcacgtgaggtttgatcagtaaaccagtgcacgcttggccacccttgccatttctgctcccagagtctcaggctccccttctgacccagtgtgcgcccttgactgctttctttgctgcccttccagggagctgcccccctggtagggcatgtgcctgtttccctctcagcctggaggctggctggacatctcctagggtcactgtgcctctcagctagttggcgggggtgctggactggactcttgttcactttaccttctgccaaatgcagagagggaggccagtgtcagggtcggagtggcctggctcttagcactgaccgaccattgccatttctggcctcgctaggcccaggagaggagggaggcaagccagtcgggtttcctggagcaatgggtgtgccagccctcagcatgactctgccaagcatccagaccacaaatgcaggaatttggctgaggagcagctttaggtatggattgatgactaagtcaagctacttcctgagcttctctcagatttccaagagccagagatgaattgtgctgcatcttgccccaattcttaggatttcttttcctccgccactgcagtgattgttagaggtagttttcttgaattaatattaaatcacagttccagcccttgttattcttgtccttagtcctccagggggagctggggttgcagggcaacagtacagtcgcgcttacgacctggctagaacacaaggtcagatgataaacagaagcacaggaactcagcccatggccgcaagctggtcaaggcctgctcactgtaaacatggctctgtaccattgagtttaacacaattttattagaaattagtgtttgcttccatcacttatgctgagcaaccaaatattacagttatgtgataaaggaaaaattctttcctgcccaggacctgcgccatcctttaggccgaccttggtcacataccaaattcaataaaacccaatactggcctgtgttgttaacagcaggctgccaggtttctcagaaactgacaagaaaatctgaccttcatccatactttgtttacttacccctgggctgcttggagttgaaaaatgcacacagccaagagttgctttctgaatagggctggaaactttcaaagaaaacccccaaacttttaagtcacaaagtctgattaaagaagctaagatc

SEQ ID NO: 7189 - DNA, 89 bp, Homo sapiens
gagtcagagcccacatggccgggccctctgtagctccctcctcccatctccttcccccagcccaataaaggtcccttagccccgagttt

SEQ ID NO: 7190 - DNA, 5011 bp, Homo sapiens
tctgcctggaccagaagacagagggcaagaggagcaaagtgaacaccaagcaactggaggtctgcagctggaagcccagcccacagcaggacaagcaactcttgtctaagggcagtgctctctttggacgaggtagtcaagagagaccaaggcaccaccccatccacagctgacccagcctctgtctaggatctagaatcataacccacacaggcccactgcaggacaggtggcagaggagctatttgggacaggagtcagttctccctttctgctatccatcacttataaccccacaggccagaggagaggtcctgagagaggtgacacttcagggaccagaggcagcacgagggctggcatctctccttccagcccaaactgcacagccccaaccaggttcccaacacgtgtagcagtcatcagccattccttaacaatgaatgtggtacctggttagtgccagccttgggaaggagggagggaggtaagaggggcttggtgatctctggaggaagagtgttgcctttgctgtggttggggaatcgatccttggctatggcctacccactcccctggctgaagagtgccaatcattacaaatcagcttcagcaaactgaaacaaaccttctggtgccttgggctttggggccctctgttttcctgctcccagtctgcctgccatacgttagacaacagaagctgctgggctgggcaggagccctgagctgcctggtggattggtaccaagtggggccagccagggcttctactgactcgctgtgcaaccttgagcaagccccactaggaacggctagatcagcaatgccccaaattgttgaatcgtggtgatcacatttggatggacaagttaggaaacttagctgattctctgagatacttcccacttcctcatacattctacaatgagatgcctctcttcatgggcctggggaaaggatgaatgagtgtggctggacttttgacctttaatgtccctgagcagttcttggcccttggggagaagtagggggaggatctggctgactcagccccaaccgaggggtagcagctgcagcccagccaagcagaacaccctggccctacagacctgtgtctgagcaggctttggaggaaaggccacttctgagtcctctgtctcaggagaagccaggcctaggtgcttgacctggtgatctgagctgtgtttgtcctagtatgggtggcagtcacctctgaacacactggccttggcttagaggaggcttgtgacttcagctgttccagctggggctggatgctggactctgattccctcagagagacagaagatcgggcagaggtcaaccagaaggccacacagggcagtggacaacagtggagggtataccaaatagaaataaaacgcaggaaacctctctgaatactgcccttggggacctcaggagggagtgggactgattggagacaaagagccagaaatcatcccctggagatactcagacactgtattgttattggcgctgtcctgtgagggcagtgtccaggctgccctgcttgtcatatccatgccctggctctggccccggtgagcacttgtgctgcatgaggaaaggaggatcaggtggggtcaaaaccaaagcatcgaggctggcactggccaagacagactctggcagggaggggagtggaaggaaggagccccaaacctggagtgagacctttgactttctgatgatgtggccaagaactaggagtcacctggccagcacagccaagagtggggctgggggcgccagctttaaggtgtcaacacctggcccttgcggggaaagagccttcagcagcccccacggcctggagcctgggtttattggagggtgctttcttaccctctgaacccagtggaggagggggcaatgggatattcctgctctgtatggcctctgggtcagctttttgttgcaaaatcctatcccccgctgctagattctttgaagcaagggagaagcaatagcccagcctcagaatgattctcaggaaagcaattccactgccagtggactgggtgccaggaggcctaggtctggatctggggctgccactaatgacaggaaagtgggcttatcctcaacctttctgagcctcagtgtcattatctgtaaaatggggatgataataccaggtagagttgctctgatgactggagaccatggagcggagtgtttgggaaatggcaaagatttgtgagggcttcgtgctttagagatttgctacccttaaccaccagcatcagctcacctgggaatctgtaagaaatgcagagtcctaggccccaccccagatctcctgattttaacaacattcccaggtgacttggatgcatgttaaagttggagaagctgccctaagtgacaaccctttgccttttcaggactttgcctctttccacagagctgcaggttctgtctaggctgcttttactgccatgggggctgcctggtccctgagtaagcagtgggtagccctggatggctgaggggctggggaagccagctgggccagaccaggaaggagcctgaggcacagcaccaaggcatggggtagggtgggctttgaggcacggcctccccatgcccagacccaggcccaaacaggaggctcctgtgcaccagcaagtgcagcaaagctggctgcagtgacaaggaagtcagagggagggctggtttgcctcaaccctcgccctggatgtggcaaaagataccacaccgaaggaagctgtaggggatctgggacttagtcaggctagctaagggcactgagtgattacagggcaaggccacagagcggcaggaagttgtaagtgcaggggccaggcacagtctgagtggagagccatgatggcactcatccctggctggctcctgggcccaggcctttgctcagaatacagtgcccaggcccgcctgggcattgccttaattcctgtctgaggctgccttccttcatcctcctcaagctgactgctatcagcaggagaagggaatgcagaaccacccccaccccaactccagtgtctccagaactgagcagggaccctccccatgacggagacagacaacccaatggcagggcctgggggagttctaacctcccgtgcccaagcctgacttcccttccctctccagatactgaggaaagtgggttggaggtgggccatgagggtgggggacagggggagggagagccatttcctaagaagagcccaggttgtctcagcccagggagactggtttcaggagctgttccttcagaaaggacgatggaaatggaagtcacagcagggctggggaactggggactggttaggttggacccatgggtgcagcaccctccaaactggtgtcagagcctgcagatgagtcccgggaggagcggccctgcaggaagcggatgatcttctcaatggtggcctcctggtattcgtgggaccacctgtgggcacaggagccaatgtggttcagacagctgggcagagggagctgctagtcagctgtttgcccacactctgcctgtcatggtgatttgtaccctacccccctggtcccagggccctggggctcacttgataccgttgaaagtaagcacagcctgcatgtcctcaggcaggacctggggctcaggccactcgaagccatcaatgatgggcacaatgttcttgccgcagcttaaagcagtcacaatctcctggagaaagaaaggaaaggaggaagatacccctgtacccatctagggacccttgtagccaggcaggtgctgggaggcccactggcccgaggctgggcccagggcaggacaccagtcctgatgtccaccttgatgtctaccttaacccttgtagtgtaataaaaaataaatatttttcctttgcccagagttcctggcacagagctgctaaaacccttggaatctcttgagtgatgagtgtctttgtatgctaaagagatgattccccactgggggcccggggggtgctatgggggtagcctagatagtttcaggaagagggctggtcaccagggagaccagggcatgactagaggattggaactttcagccccacctcccagcctccagagaggtgctggagattgagttcaatcaccaatggccaatgatttaatcaatcatgcctacataatggaacctccataaaaacccccaaacaaggggttttgaagagcctccaggttgataaacaggtgtaggtgctgggaaggtggtagaaggcatggcatccacacctccaccctccatacgtagagatcctatgtatctcttccatttggctattcttgagctgtgtcctttataactgtgaaattaaataattcagctgggcatggtgggtcacgcctgtaatcccaacactttgggaggctgaggcaggaggatcacttgagcccaggattttgagattaataatattatttattactattattcaagctttgttaaatcaaacctaaagctcttggaactttaagttattctgagccttgacaggaattggtctctgcagcctgagtcatggggcatgcagctgcaacttccacctattttttttttttctgtaattacttaggaagaccaaatggcaccagagataagactcccttagatccccacttagatcaccaccctttctcagggggtaataaagtcatcttccttggaatgtagcaatctataaccaatcaaagcactgtaacatacgcactggtcttgtatggaaaatgttgtaatcctgctaaaattcctctctctttgcctgtggaagtgaaaccttaacttctccagtttggaatgctcaccccatgcctttggagtcaatgcttactgggtggctattctcaaactttgcactcaaagaaactctatacttagtcttattttctgaatctcattatttaaggttgacataataaacaactaatagtaagtaaagtg

SEQ ID NO: 7191 - DNA, 358 bp, Homo sapiens
gggctgaggagactgttcagagactgcccagccctagggcactgtgccaccctcattcctccagagcttgacccctggacatttgcactgactttatccagaccaaagagctgcctcttggtggcagtattcccacagaggggtagctgggatcatgctagtcacttcctgcccccaggcaccgtgccaaagactggatgccccctactcctcaggggactgtccagggcgcccagtggtagtgagggagagtgtctctgttcttttgctcagcctgctgggccctttgtgtttgaggatgcttaatgattccagcctctcactgtgccttatgcattaaaatttctttgttacgagc

SEQ ID NO: 7192 - DNA, 566 bp, Homo sapiens
atacaaaaattagctggtcatgagggcacacactgtagtcccagctactcaggaggctgagggggaagaattgcttgaacccaggagatggaggttgcaatgagtgaagatcgtgccactgcatccagcctgagcaacagagtgagatcttgtctcaggaaaaaaataaatttaattgctgtggatactgtaaagggtgtttatcgtaacagttcataatattctatttaagaatgcgtgggagaaattttctctggacccagttatgcttttcctgaattgctgtttggtttttaccttaaggacactaaatattcagctgattgtatttttctgtttgtactgatactagaccatttagagcccaatttgtggtctaccttcagcaagtgtttatgtattttgtatgctagtcatgttcttggttctgtcttccttttctacttttattttccttattctcatttttctaagttttaatcgttttatattactataatatctgcatcttgtaagcctttttgtaataaggttgggatataaataaataaggcaatgtatccttt

SEQ ID NO: 7193 - DNA, 917 bp, Homo sapiens
gctgcgggagggagagggacttgtgggtctgatcccatttctccccaccctggggctcttctgtgtctgccaccattcccatatcatccgtagagaaagaggctggggatatttcaggctgtttggctgtccctgtaccccagtcctgaagcccctgcagtggcgggactcaagctcctgacctttgcccggcctggctgggcctctcttgcagtcagcgagatgatccgccacccgtatgagacccagtctgacagcttctacttcgtggatgaccggctggtgatgcacaataaagcagactattcctacagcgggacaccctgaccccacggctgccctgaccccaggaggctccagttctgggctgggagctgtgacctccccaacgctcacccctcaaccccaagtcctctgcttggggagttctccaggagctccggaccctgagtcaatgttgggaggaagggtacctggtgtccccagtcaagcccatgaagcccatgcggcctgctacatggggtggggtcgtagggaggctgtttgcctccacgtctaggaaggcctgtgagaggagcagtcaggacttccggacaacttagctgggccctacttgggcccaagtttcagaatagtgttcccctatcaaggctgtgactagatcaggcagggatccattccctgtcccctgcccactaccttcaggccatttagagttgtaaatttacaaagatccacggtgggctccagctgccaagccacccaagggagtctgggccctaggcctagccccatccctccccatgaggggccaagacactgcctaaggtgtgggagggactggctgagattgcagcccatggtaggagctggaccaactgtatatagttttcaataaactttttccttttctgttc

SEQ ID NO: 7194 - DNA, 832 bp, Homo sapiens
gcagggcagcacctccataggaagccttcctttctggccaaggtgggcggtgttagattgtgaggcacgtacatggggcctgccggaatgacttaaatatttgtctccagtctccactgttggctctccagcaaccaaagtacaacactccaagatgggttcatcttttcttcctttcccattcacctggctcaatcctcctccaccaccaggggcctcaaaaggcacatcatccgggtctccttatcttgtttgataaggctgctgcctgtctccctctgtggcaaggactgtttgttcttttgccccatttctcaacatagcacacttgtgcactgagaggagggagcattatgggaaagtccctgccttccacacctctctctagtccctgtgggacagccctagcccctgctgtcatgaaggggccaggcattggtcacctgtgggaccttctccctcactcccctccctcctagttggctttgtctgtcaggtgcagtctggcgggagtccaggaggcagcagctcaggacatggtgctgtgtgtgtgtgtgtgtgtgtgtgtgtgtgtgtgtgtcagaggttccagaaagttccagatttggaatcaaacagtcctgaattcaaatccttgtttttgcacttattgtctggagagctttggataaggtattgaatctctctgagcctcagtttttcatttgttcaaatggcactgatgatgtctcccttacaagatggttgtgaggagtaaatgtgatcagcatgtaaagtgtctggcgtgtagtaggctcttaataaacactggctgaatatgaattggaatgat

SEQ ID NO: 7195 - DNA, 410 bp, Homo sapiens
gtatccactccataccacagcccttggcccagccatctgcacccacttttgcttgtagtcatggccagggccaaatagctatgcagagcagagatgccttcacctggcaccaacttgtcttcctttctctcttcccttcccctctctcattgctgcacctgggaccataggatgggaggatagggagcccctcatgactgagggcagaagaaattgctagaagtcagaacaggatggctgggtctccccctacctcttccagctcccacaattttcccatgatgaggtagcttctccctgggctctccttcttgcctgccctgtctcctgggatcagagggtagtacagaagccctgactcatgccttgagtacataccatacagcaaataaatggtagcaaaacattct

SEQ ID NO: 7196 - DNA, 132 bp, Homo sapiens
gaaactgaaagccagaatctgcttcacctctttttacctgcaatacccccttaccccaataccaagaccaactggcatagagccaactgagataaatgctatttaaataaagtgtatttaatgaatttctcc

SEQ ID NO: 7197 - DNA, 623 bp, Homo sapiens
tttggcgattcgagtggctgcagtacaggatctgactctggctcaggctccagggacttgtggggtgggaggggcttcccgttatccacgaggatttgtgggtgtcagagcccataggcatcactcttcagcacctggtctgttcgctgcagggcatggtggacagtaatgctgagttctgtctcacactgatcaggctcagggccagagaggcaacaagagagcaagacccagggaatgggcccagggcaggaccctattcccttggggtcaagtgaaagggtagggggatagtcctgatcaagtgtgataaatttttatagacatatataaatatatatatattatatatatatttctaagtgtaactgtccttcctctgtgccaggaaacgggagggggctgatcctctgatcctcactccactgtcatgtttgaaagaggtattggtgttctggagtgggggtcaacccctccccagtctctgtgctaagttcacttgggaggatggcagtaggagccagggctggccatgggtcccctacccttccccgtaggatataccctggagaatggcaaaatgatttaaagagaaaaaaaaagatattttaaatttgatgctc

SEQ ID NO: 7198 - DNA, 399 bp, Homo sapiens
atctagaggctctgagccactgttaacgcacaatgttcacagacatctgttgctgcctcaccttgggatccctgccacaagttccttgggcagtggccatgtcaccattgagatgaagatatacaacagaaaatagtggctgtgtttggaagcttcagccctgcacatttgaactagtcactctcccagacttgcgtgggtcagttctttctgagtagaggacttgctggtaaaggggcagatgctttttattagtactgataaaacaaactgagggaaacatccctcttagctgggaaacttttactcttcaggagcttggcatcatggactgttaatgtatgtgattttccccctattttctctctccaaaatgataaaaacaataattttattatg

SEQ ID NO: 7199 - DNA, 42 bp, Homo sapiens
ggccagggtggtcagggtgcagaataaatgccatcgagcctg

SEQ ID NO: 7200 - DNA, 152 bp, Homo sapiens
ggggcacagagcctgggacaacaaaaacggacaaggccagaaacagcttcatatggacactgggacttagccccaagcctgggtgtcctctgaggccagcctctccaccttctgagcctgcgcccacactattgaaaacactaatgaaagta

SEQ ID NO: 7201 - DNA, 2292 bp, Homo sapiens
gtagccctgctgccctccacgtgcaacacatcatacatcaccctcctaggtttagtcttttaagtaactggatagtttcaaagtttcactgctccagtgtgatcattcttagatgtctaagaaagggaatttggtgggatctaagtggggacagaaggggtcctctcgtcctcccctccagcaacttttggttttatgttagaacctaaccctaagcccaggcttttctctccactgactgcctgtcagctagtctctccaccttggccatttccagccagctcccacccatcttttcttgaatctcttcctgtttcccttaggacgactgaggtgtgggctgacggaatgccctagttgaggtagtataggtgctcaggcccctaatccagacctctacctgttgctaccccccttcccctccctccaggactaagaagcaagatttcccaggtgctctgaaagctaattacttactcatcgaaggatctcaaatcaaagctgacccagtcttcatatccttcaagttcctttccattcctcaaggctttgttttgtgtctatattgatcccacagccactgcacttgcccttgccacacttgatctcaagggcatcttggaagtatttgaccatttcttgagatatggggggaaaaagtctttgtattggcatcttggttccagactcccctttccaaacctagaaaaatacagtgacctttgagcatacccaagatccctttctcactgttgcctgtcccctaactcacctccccacagcccctatcctttccccctcaacaaaaacaaaatctaccttacttgaggaattaggtaggtaaggaatgatcacattggagtttgggattaaaaacaccaaaaaaaaaaaaatgcatttggttctctctacactggctaagaatattgctctacactgtaagttttaaacgttacgtttctgtatgaatgtagtgtgggtttgagtagcattgtgtgtgagtggccccacaggtacattcaccctctagtgcagcccctcagtttaatgaaggaaaaaaaaacaaacacaaagccttaagctctttgagtacttcctttaccaaatgagcatggttctaacacctggagctgggcctacattggaaacaagcccctcctgccctctgtccattcttagagcataccttcatccactccatgctcagcacgtctcatcccaagcgacaattagttggctagaaacacttttctgtaattttaaacttagactgttttgttacaaatttttgcaccattctgttaaagatgcagaattgggcttttttattttttacagatgaaataagcccttacctttcctcttgtctctggggaatgtcagctgatggttcttatttaaggttttgcattttgttcactatccactactgttcgttagccagaaattctctagtgatctgaagcaatgtgactgaagaccagttttaagttatgtgttggcaagttgccttatatttaaaaggaaaaagaaaaaaaaaaaagcctgattgtgttatgccaaatgatagcaacatgaagtcctaatttattgttcccaattgttttcctgccgtctgtgaacactggtacctccctgtcctgatcccccaggagcacctgtagcttctgactcaatgccttctccgaaggtgttggccgccatctcacccagggccctcttccagttcctgcttttctgagtcagatttaaagagcaccactgtcttccccctaccccttgcttgatctccaaagcagatattcttgctgtatttttttttcctccccaatacctctccctgaaaggtgagctgctattttaggaaactggaccagacaccaacttgggggctttaagtcaaacaacctcaaacccatctcttcctgtgtaggggtgcaagcctctgaagctctcactcccacccttagtctgcatggaaaatgtactgtgatccccctgcccccaactgccctcgcctttggtgtgagatgttccttctttcggagttcagcctgagtccctctcccctctgccagccaacccccagccagcaataagggtccaagccagggcctcctctccacactccctgtctccatcctacactaccctagggaatacctggattccccattctatccacatactgtagcattcattctccatctctctcacctcacctgtggtggtttatgggtgtgatggggtttttaagattattataaaccagtaaaaataagaaaacctcgc

SEQ ID NO: 7202 - DNA, 1221 bp, Homo sapiens
ggctcctgcaggcccactctcttcagcagccacccggccctccctccagcacccgttttaatcccacagaacaacgggaacgttactgactctggtgccttatctcgaagggaccagaagtgctgcgtgttcaggccatctctggctgtcttcctgtctctcctgtctgtccacctcctcctcttcctctcctttaccccactttcactgccactttcatcaggtttgtgtctcatctccctgcgtgtcttttcctttgtctgtctttttctttcccccatgcacatcatgtagattaagctgaagatgtttattacaatcactctctgtggggggtggccctgctgctcctcagaatcctggtgccttgaagttctctgtgcatctgtccatcctccctatggccctggccagagctcagcatgggcaggggttctgggtaggacggtcactgtcctctctcctggactggtcttcccagccctaaaccctgccccaggaagcccacagcctcacctgctgctgcccctctaggtctgggcagccatgacctgcagggcccagagacactgtccttcccctcatccacccaaggccccagccagcgctcataccctgtcctttctccctgaccccaagggcacagaggcaaggcctcctgtctacagcagcttcctcagtttcctactgccttaggaggcccctgcttgtgctcagggaaggcctcttcatgggcatgttcctgctggggcggtgcggtttggtcccaactctgctaagttttctgagatgagggtctagccctgttggggacagaaaagtgtgtagaccttcttcctgctagggctgcactgtcctgggtgttgggcccttctggtggacaaggctgtgccaaccctgtacagaatcgagtgctgtagcctggccagaccccagagcccttgtgccatctttcttcctggccagagtgatggggttccagccatggggaagcaacccaatcctctgtctccttgctccaatggaggcagaagagcccaggacccaagcgtcttggcaggggtgctgtgaatgtccagtggtcccagctccccaccctggccctgccccagcctgtgtagctcttcctgcatgtggatgctgcatgtctggtctggggcttggatgttgcactgccccactgcctgtcccttctggtaaaataaagaactcttaatgccc

SEQ ID NO: 7203 - DNA, 660 bp, Homo sapiens
ccctcaggccaggatgcttgccatggcacttcatggtccttgaaaacctcggatgtgtgcgaggccatgccctggacactgacgggtttgtgatcttgacctccgtggttactttctggggccccaagctgtgccctggacatctcttttcctggttgaaggaataatgggtgattatttcttcctgagagtgacagtaaccccagatggagagataggggtatgctagacactgtgcttctcggaaatttggatgtagtattttcaggccccacccttattgattctgatcagctctggagcagaggcagggagtttgcaatgtgatgcactgccaacattgagaattagtgaactgatccctttgcaaccgtctagctaggtagttaaattacccccatgttaatgaagcggaattaggctcccgagctaagggactcgcctagggtctcacagtgagtaggaggagggcctgggatctgaacccaagggtctgaggccagggccgactgccgtaagatgggtgctgagaagtgagtcagggcagggcagctggtatcgaggtgccccatgggagtaaggggacgccttccgggcggatgcagggctggggtcatctgtatctgaagcccctcggaataaagcgcgttgaccgccgaa

SEQ ID NO: 7204 - DNA, 930 bp, Homo sapiens
gactggcggctaccccgccactggcctgtacacccacccaagactcctgcaatgcaaaaatgtacacaaaccaagcccgggtgttttctatactctaccagaaacccttcaactacaatctttgcatgaaatgaagaaaaccttttgactgttttttaaaaatcctttttcttttctcaagttctagggggcatttgcacatatatttgtactcaacatttcatgggaaagcggcagacctgagctgaggaacagcgtgggcagggagggaaagacccagggtctggacacttcctccaacacaaaacccttccccacccacctcctgctccctccccctcgcccaccattgtaaaataatcagaaacttgttctattttgtggcagtgacaatagttttatattaaaagaaaaaatacagttttcatacagcaaaatctatacaatatcattgttttatttaatataaagatcgctacccaccttccttccatggttcccaccctccacgttattttccctttctgcagcggttgcactacaggtagctactgtgtattatggacaaatgagaaatgaattctttttctggctgtccatctattttatttcaaataaggaaaagtgtatttggattttgtgtaaatacatctagtgatgacattttttcaatgtttttaaaaaccgtgtacagtactacatgtggtagagcgttttctcaaattgtctattgtagcaaaaatgtttttgtcgtaaacctgttttgtctcctttttttgttctcttgccacttctctcctcttcctcctgcccctggttccctcctctcctcccacccccacaaccagtaccaatgtacatagtaattgtaatgttttagactttacagaaactttcctgtattctgtatataaaaaacaaaaatacttc

SEQ ID NO: 7205 - DNA, 312 bp, Homo sapiens
tttggaataattttatgctctttctggcaaataagattctaaaagcacttatatccctgtgaatacttcagaggactttggcctttgtattgtttgtcttactctcatttccgtaatagaagaggaagcacatgttaacttgtcccgtttataaatgggactgcttaggctctgaaagcttcagtgatttccttaaaatgacctactgagtcagtggcaggattggaaccacagcccaggtctcctgactccatcccataccttccaggcctaggcctctgcctgttttgttctgtcaccttaaaagaaggc

SEQ ID NO: 7206 - DNA, 1033 bp, Homo sapiens
agtctccatctaggtgggggcagtctagggaagtcaactcagacttgcaccacagtccagcagcaaggctccttgcttcctgctgtccctccacctcctgtatataccacctaggaggagatgccaccaagccctcaagaagttgtgcccttccccgcctgcgatgcccaccatggcctattttcttggtgtcattgcccacttggggcccttcattgggcccatgtcagggggcatctacctgtgggaagaacatagctggagcacaagcatcaacagccagcatcctgagcctcctcatgccctggaccagcctggaacacactagcagagcaggagtacctttctccacatgaccaccatcccgccctggcatggcaacctgcagcaggattaacttgaccatggtgggaactgcaccagggtactcctcacagcgccatcaccaatggccaaaactcctctcaacggtgacctctgggtagtcctggcatgccaacatcagcctcttgggaggtctctagttctctaaagttctggacagttctgcctcctgccctgtcccagtggaggcagtaattctaggagatcctaaggggttcagggggaccctacccccacctcaggttgggcttccctgggcactcatgctccacaccaaagcaggacacgccattttccactgaccaccctataccctgaggaaagggagactttcctccgatgtttatttagctgttgcaaacatcttcaccctaatagtccctcctccaattccagccacttgtcaggctctcctcttgaccactgtgttatgggataaggggagggggtgggcatattctggagaggagcagaggtccaaggacccaggaatttggcatggaacaggtggtaggagagccccagggagacgcccaggagctggctgaaagccactttgtacatgtaatgtattatatggggtctgggctccagccagagaacaatcttttatttctgttgtttccttattaaaatggtgtttttggaa

SEQ ID NO: 7207 - DNA, 1260 bp, Homo sapiens
cccaggggagtggttggcagccctctcaccccagggcctgtggctgcctgggcacctctcccaggaagtggtggggcaccggtctcccccacccgactgctgatctgcatgggaaacaccctgaccttcttctgtcaggggcactttccaggctatgggtgtctgatgtctccacgtggaagaggtgggggaaagaggagtttctgaagagaactttttgctcctctgtctcaaaatgccagactcttggcttctaccctgtgtcaccgtgggcagtggcaggtggcctggcactgcatggagccagcacgttgacctccctctcagctccctgctcagggacggtggacaggttgcctactgggacactctaggttgctgggtccatggggaggattgggggaggagaagcagtgccttccctctcgtgtggggtgggggctctctcttcttggtgcctgctgtctttctactttttaatttaaatacccaacctctccatcacagctgcatccctgagagtgggagggggctgtagtggtagctggggctcccaagaacgactcgggaatgtcatctccatcttcacccttcagagagcagtcctttctctgtgcagctggagacgctggtgaggagagccgggtccaggttcttaagaatgaggtgcggaggggctctccggtgctgctgggctgggttgagcaagcctacgcagacaagtgtgtgtgtggaccatccgcacctccagcccccaccccaccctctttgtctcagcgtgttatgtgcaatgacctatttaaggtaaacccattccaactacagcagttcagggctgatccaagcactgcctccctcctgctctgtccaggtggtctggaccataaactcaacttgagagggaaggcttggggttgaggacttgtgatcagaaaaactgaagatggaagttttggccggtgctcattagacatgagtcctcactctgtgtcctgagcccgtgtcattcttccaacctccctgcccccacacacttatcccagacacaacaccatgtggtctggaggtcccagcccccaccctaaaaaggttatccctgagaactccaccagacttgggagcccaagtgcagtgcctggtgctgctcccatctgccgccccccttctctcctgcaattggtttgtactcactgggctgtgctctcccctgtttacccgatgtatggaaataaaggcccttttcctcctggctgcgccagt

SEQ ID NO: 7208 - DNA, 2911 bp, Homo sapiens
aggaccagactgcctattcgtaacctttctgcagcattagagccatcgttcatgggggacacaaggcttttatgctcctagatcttcaacgcagcagaggaaccataagtagaatcacaggataatatatacaaatatatatatatacatatatatatatatagttatttaaaaaaggcaactgaaagtaattagacttcttaaggaatcaaatttatttcaagagactacacatggttatttaatctccggtactgaataggttttttttcttctgttagtttttgtttttaagtgtgaatgcaagtgattaatgaatacagacttaacaagtgtggttctaaagttcctgctgtcatcaacttgggcaacaaatgacccactggaaaggcaaatccacttaaaagatctctgtatcttgttctgtgactgaagtgatacactaatcacggggaacccagaatgattcaacattttccccccactcctcccttgatctttttggttttactttaattaagccctgcgagaatgctggataaatgccttgaagttagcagggtgtatttttttagcgaatatgatttgcatgtcttgccaggagttaagcggcctctggggtgttggggaaatactttatttctttccatttattttttgtggggcggggataggggagggcattgaagttctacaattctggaatagttagttgatggtacatagttaacttggcttcggttacatattggactttaacaactgaagaatctatgcgtgtcatttaaagaaaagttgcagaacaagcaattggcttagatatacaatctggaaaaatattcctgtgcccatattttaatgtaattgtataactgggagcaaaaatatattctgcttttcaactgtaggtgctccagacttgctctccgtcactaacactaaatgtgctgttttccttgtttttcatcaaacatttaagacaaacttagacctttctgtaaattatcttttaatttctcagcaaaatctaaaaggggaagaaaaaagtccatgaaaactaaaacttttcatgtttttagccagtgagaagataataaaccctgactgtagaaggtgtgttttcatgcaaactatacttctgagcttgttagcttctaattatatcttaataaatatattttattactagagcaagatgggtttttaaggaaaataatgtgaaattctggaaattttctttggggcagagaagagcattagccctgtcttatcattacattgccatcctgttgcactgcagcttgtgtatagcatgctaaaataaatttttgtgtgtgtgtgcagaaattaagggtccaattgagattgggtgatgttagtaacataataacaagttgtctggcctgacacagcatcacatcacacacacagaaattagtatatccatgtatgtcaaatacaggttaaaatatcagggcatttatataaagagttgtagtcttctgataaaagtagactggatcccctggggtatttggggagaaagtaactactttggctctacccctagaaatgtccagttttgagtgactgtagtatggatgggttttcttgttttgttgattatttgaggcttttaaaacaagtagttcatgaaagaagctgttggactcaacatagagtagagtaactatctttttagtctggatttctgccctgcttagattttaaaagtataagcatggattgccaattccacttgatgtaaacaaaacttttttttatacataatatatatatatatatataaaataacttattgtatcagtccaggttcagaaacttgtggtaggccagttccagatagtttcatttcacctgtaaactgtatcactttgactgatattgtaattttcaaatgtataatatgtttacagatgtgccctgcatttagtctgccttgttcctattttgatttttgttgagtctcctgcctgcttgccaaaagctaggatgcttcaggcccatgtacaattgaaagcagaggcatccttgagctttaaagcattgaacaaactggaaaatgcaacataccacataactgaagtgaaaaaagtctgtgtttttgtgtttttttaaataaaaattttcaaaaagttaaaaaaaaagacatataaggttgattaaagggaaaaaaggctccagtttgttttacaggttttaaagttctgctgtgtgttcaattgccttgtgtaaccacttgtcgccttagggccagattcccctctctagtccccttttttaaatgtccattttgcttgcctggaattttaaagttcttccgtctcacaactcacaagaaactttctgggtttgtgacatacagaggttgaattgagtatatatttgaaaaggaaaaaacaaaaaacaaacccagaccccacctgaattgggctttttaacttagaagcaacacttgattaaacatctttagaaagctattgcttttctaatttccttccatatccctcaggcctcagtgttcagagaagccaaaaagaatgtatcacttctctgtctgtccaaaggtttttgagagtctcacttctaaatgaaacaatgcaacatttcactttgatttctccactgaaatttccttgattatatggttagaggtatgtagttaggaatgtctgttaactttctgagaaccctagtgccccatcatattaactgtcagtattttgggggcattaggttaatagacttaattgcctaggtacaagcaggactttgggacaaatctctttgtgctgtttggtaacacttaactctatttgttgcaatctttctccttaggtcctcacacaattccttacagagcacttattaaaaaaaaatcttaagagtt

SEQ ID NO: 7209 - DNA, 1267 bp, Homo sapiens
aagacctggcctgagaacccccaagtcctgcaaagaaaaacagagctgggcaagggggagtcctggaaagatggggcggactgaacagagggagctccagctctgtgctcctcattcagtccctctctcttaaattggtgccttgaaagagaaggaacgtcctgcgagcctgcactcacttcatcctcagcagaactcctgcctggcctctgctcaacatatccctactcatccggtcagcagcggcgcgttccagtcactgtcacctgtcactgacatcacaagccaaaggatagcactttttcaatccatggactcaggagaaaatgccctcttactggcagtggctagagggatgagacgtttgtgtatgtcactgggcagtgaccccgattctcaagctggagccatttgatgtcatgaggacaggatgtttgtgtctcggccccacttccctcatttgctctgtggttgtggcgccctgctttgaccgaatgctctggcaactgcggcagcaggcttgtgtgtgtgagaagggcggcagaggcagtggggctggctcgctgagggctgagcaggtagagaatgtgaatgtccatctcaaggaatgcgaagttccaatctctcagaggagctctgcaagtctcagctaggaatggggctgatctggcccccaagcctcactggagagatcccaagggtattttacaaataggaagcgctctcatgcaggatctgagggctttgctagaccatggttcaaggagtcagaatcttggctaccctacatgctccctctggcaccatttcaggggattactccagagagctgcagccagaactgtttatctcctgagatatggactttctctaagtcaggaaaagcacaaacctcataacttaggtgttttctggttggttgctcccttttctgatcctactactggcctctccctttccagagccaggagacacatctgggaccagaggaaacaaaagcaccaagaggttgactagagctgaccagtgatttacaaatatttcatattccaatgcttcgtctgctcaattattcaaaaggccatccctgtaaaggcagaaaagcttcctcttagatctggccactcagcaaataagtgggtatttggttttatgaagaataatgctgaggactagagatatagtatatcagagataatatatagtatacaggttgatctaaatattctggtttggattaggcaattaaaatttttttggcaacagg

SEQ ID NO: 7210 - DNA, 1233 bp, Homo sapiens
cctctctccccacaccctcacctgcaccctaggacctcactggccataggagctgggccactccagacattaatccccaccccaacagagccactggcacaagtgcccttagtgctgccacactccctggcagccaggtgccctggtgcccacccctgtcgagcccctaaggatggggaggtgggggggcaggagcttctgtcccccacattccatgcacctcccctctgtatatagcatctcccccctcctagtgagcaggggcctgcaaggcatcactcccagcccctcgccttctagggcaccctcagcaaaggggcaggtggggacactccaagtggggcagctctccgtacatgcgccccacccccatgagccagttcagccctactgggggctgagcgggggcatcccctcctttgtacatagtctccatggatgtccctgccctgtagccaccagccccttgctgctctccctttaatgccatatggcccctgcctagggcacaggccccaacctgtgtgctggggtccccagcagcaaacactggaaagtctgttttttttttttctttcttcttccccaccccttaattttaactttgtggtaactgagtgcccccgcgtgcctgcgtgttgagtgtgtgggcggcagtgccgttccggaggcctggtccatctggagttttgaggggtgaggggaccagagcagtgggaccagcatggggatcagcttcccttccccacctggagccagggactgtccgggtagccagttttggtcctgccagctgcctccctgatccctccccactctcgccccttctctatgaacttaaatcaaaaaccacttccctccatctcctcctgctcctgcgtggagggggaatgtgtgctggctagggtggaggactgagcacctgagcctggggctggctccccggggtccccgactcagctggtggctgtggagctgagtcccctccccgtaacctctgcaaggccagcacccaccatcactacctgcacctgctgtggtcccaccctctggaggcctgggaacctggctgcagcctgggaaggctggagaggcagacggtgggacccaccagctctctccccatcccgcttcttccctgggggccaggccctacctgtgtggtggtgggtgggctgtcaagacgtgtcatgtacatttgtatcaaaaataaagaagtgaccatgagctgtt

SEQ ID NO: 7211 - DNA, 976 bp, Homo sapiens
ccccgcgcgccaggcaggcggagcggggcggggcgcacaagctcggccccgccccggcttttagtcccgaactccggaccccgccttcttgggctgggcccgggggcgggactggggagggaactccgcccctcgcgggagaccagaactcttggagcttaggggagacccacgtcgctccagcggaggctggactgcgagcctcgtctgggactcggctggagctggcctagggaggcctggggtaacctggggggctcagcaatggtgctgcacggcgaggtggtgtccccctttgtcctccgcccagggcagggaaagtgcttagtattagcgtgatgcttggggttattggagcctgagcttgacctcaaacgggtggcgatttgatgggtacccccaggctggggaaaatgacagcgcttctcctaatcagctcactggattccatcaccctgagcggtaaaccagatgggcgtcaccccagttctgcagacacatacacaacccgtttgctgcagagccggacccagtggctacacccacagcggtctgtggtagagaactctcttccttctttccaccgacaggggcgagggctgcttcctcgcggcagcccccgcgaagaaatctcgagagaactggcatgaggagttaggttcatcacaaatacacacacactgcccccaaccctctgccgttgcctctctcagaaaaacaagacgtactgaatgaaatattttactaagcgttcagtctgtgcctcctgcatgggtgggagtgaggggaacgagacccccagcctctgcaaatgctacccccaggctcctgggagacctggcgatgcactcctgggctcagggtccatcaggcagcctcttaccctagagctctctccactctgaggttcagaaggaccccaacccacaccgtaggcgttccccccaagtaaagttaggtagcaaaagcctccggt

SEQ ID NO: 7212 - DNA, 4894 bp, Homo sapiens
ttctgagcctacacatgtgactttctagaagaaatgtttgtaaaaggggcaggtgtaatatgtaaggaacatgcactttattggttaattttataatattttggtcattttactgtttctggtgcatgcagggtttgggtgtttttcagtgtgtatgtgtgtgtatatgtaaggggaaagagagattgatctggatggcaagaccgtttatcattttttatttaaaaaaatcaaacctcaaaaaagtcattttcagagaacacctttatcaaaggcaaattgctgtttttcagtcagctgccacctgcttctcattttgccctctgagaaaaggcatggtttcttaattgagggaaggaagcagattcggaggggtggagataaagctggggattggagatgttcccctgcctttgtgatgatggtttggtttccagacctgaggcatcgaatgggctaaaggtcagccagaagtcagagggctctcagccttcatccagccgcagccctttagagttcctgaaggaggcaggttccgctttgctttaaaagagggtcttccggtgttccagagtgtatcgttacagtaagacatgataatggccggctctgcaaatttatcatatagtttttttcccaagaaaattatttttgaaattaaaacaggaccccaaatgaaatccaagtggtcttctgtagaggaaagcatgataagaggaggaagacataaagttgggggtggagaggctgctgcccagaaactgctgggttggtgggatccacacagatgggcatcttggctctccctgccagaaaaatgtgctctgcagtgtcctcccaactgaaaacaacagtgacatgtttgaaaagcagcaatcgaaagtcagtgtgttcttgtaaaatgaatatgtatgtagggttttaacccttccattacttgaataattctttgggccttctgagtttaatggccatattttcttccagtttattttccttccccatgctgttgtccccatgctgcctatttttttaaatttcatagattatatttgaattgttacatatgtttaacatccattgaatgcaacgttttatttttggtattatcactgttaacacttttttttccttttcctggaaggtttgtcatttctctaaagtttgtacacagtatttatgtacataatattgtcactgtcttagtgtcttgttcatgttgtagggtaattttgatttattctttttaagaaggagtagagttgcaactggaaaacacagacaccagaaatgaaagtgttgggtgttgataggaatctgtacaatatgttgatggtggctgtagttgtttaaatggagacttccaatcaccagctcctgccaaattatgcattagtaactttttcctcagagacacccctaaaggctcccattaggtcacagcgtgactgaaagctgatttctctgtgagactgaaatcccagaacattgtttgccagtatctcaaccacagccaggaagtatatgtgagttgcccagagtggaagctcctagtagaggctgaaggccacaggggaggcctcagccaggggcaagtgcccacagtgactccatttaggatgctgtcgttttgctactgttgtggagatccttaacgcagcagcgcctgtcataaacaagcctcttgtagcttcttacagaaaacagatttagtctagcatgaaacacctctgcatctcattgaaactgaagaggcttgcagatttgctttcgttgatgtccacgttactgaggattgactgagtatagactggagacaggtttttggcttatcacagcactgaggaaaatacaaatgcacagactgtcagcatgatgtcagaggccagagtttggtgggggcagatggcagggcgacccaaaagatgcagaaaaggtagactggggccactgggtcttaagaggagctgtgaagttgtgtggaagccaaggctgggtctgacatccctgccaggaagcaggttggacagaaaccacttgctaaaagcgtctctatggtgcagtgattatgtgtaccctgtgctgttgctcagtagtctccttgaatgttcaagtatctcatccactcagttttgtgattcctggatatttgtgtgttgtaaagtgttttgttaggtggtatgaaccaatgtgaggaggcttgagacagggttatggatttccagagctcttccatgtagaataccctgccttcttgaagcagttccaccaccaatatgatggggaagggcaggaacttatggcagggtggggagagggtttgcctggaagttaagagagtggcatccacttgtggtaaccccttacgatgatgacatcccacacactaagaggtacaagcaggaccaaagttttggactgttccctcttctcccctccactgtgtttaatgttcactcactgcattaaataacaacaaagatgggacaaaacccactaatactgtggggaaaaaaaattttcaagagcagaggaaagtctttctgcctttttataattactttttttatcatttaatttacctgcctaaataaacatcttctacagaatatctgtcattcaaccatgccaaggagtttgtgccagccttttcagactcccagaattgggtgttcctgggttatttacatagctgagcagtgtccaggggaggtgcgcagtgaactgtcaaggactttccagactgtcttctcttcagacttttataatctccagtggcatctttcccttttcttttgttcatgacctgacctgaagcagcagatttgatagactggcaaagatgaataggaaaaactttgactcttgcccagtgcctgcctgcctctctctctctcctctctctctctctctttttaaaccaccatagactctcacttattttggaggagtgtatgtgcatgtgtacacatatgtacatatataaaaacagttgatgttttggtgtatggggtaaaagccccaggagcatacagaacttgagctgaacctggtcagtagaaagggaaaccccaaccctttcttgatttttggagacacccaggactaatggatactgtagtagacatgtagtactatagtaccgtaatattcatctctcctcattttagttgcctttcagattctaaatgtttgggatcattcctatcatcttagtctcttcaggatctttagtattttcctggttctgaggaggcttgagacagggttatggatttccttgttctgtgtctttatccctactgatagttcctctttctcattttgcaaactacccagagctccaaggacagcctgaagatctcagtgcctcaggctctgaggtactctgctcacaggccccagacagatgctgttgggtaaactcaaagcttcctatgagaagcttctgagatgtagcaggtcacagaagtgttcacctgtttcatctgaggatttcagttctgaagtgatctaggcatgtttggtaaaaatgtttttgtgagagttctttttttaagaaagcattatgcaaaaagtcacttttaagggcatttaaaaatttttaagtaaagccattctttggcttttttggactatttgtggatactttgtttacattttgaatattaaaatgtgcatcatcttgtcggccatgcagtcctgcaggcatcagtgccctggctgtcctgtgagtcctcatgcagagcagggccatcatggtcagcccttgtgagtaagtgggtatacgctgaagctgacttccgtctgtgtcctgccctcccatccagcactctctatggaaatagttgtcatttcctcagtgatggtgtgtcttatagtgatggttgtaatggtgaatggctagtgtcattttgtttaattttgttttgctttttgatggtggataagatgaaattttagctgtttcagcatcaatccaacttaaaagcatcttggactttgttttcccttccaaactaaaagatcaaggcatgtattagacacaagcatatttgctgcctcaactcctctgacacccatattaggaaaaggcctgccaccaaagcaggaagctgcacactcctaacccttctcccagggtgtggggtcccttgacgtcatgaagagctattgcaaggtgcttctgtacttttccagcctggaaatggagggtgactggccctggctcctgctatgagaagataaccagcctcattttctcagtgccccagaggtctaggataggatttctaaactggaatcatccttaatcaccttgaagatcccttaagaggcatttgactggtgctgccgtctgtgtcctcaaagcaatgctggtggcagcgtcctgtgtacacatgcagagctaatacccaaactaaaaactgggtaactggccctgaagtgcttcccaatcagtaagcccacagggaaatgtttgatttttatgttctgttggattttggtttgcttggcatatctaaaggtgcctttacttttctttttttttttttttctttctgctttgttttgtaggacttgttctaacatggaaaacaagtccagaagactctcctctgactgttacctttgccccaagccaccccaaacttttatgctcatgttttattaaagcaggtgctccctggaatctctgggacatttttgaggcatttgaagcagaatatagagtggtctcatctccttccttaatcttcctggtggttgggatgttccacttgtatcatagatttttttattacagatatgctccactgtttttaaatgtgaacttgtgcgcaaatgtgcagattcaatgttcttgttacagattgaataaatttttattttg

SEQ ID NO: 7213 - DNA, 568 bp, Homo sapiens
cacactcaccgagaggaaaaaggcttctccacaacctcctcctccagttctgatgaggcacgcctgccttctcccctccaagtgaatgagtttccagctaagcctgatgatggaagggccttctccacagggacacagtctggtgcccagactcaaggcctccagccacttatttccatggattcccctggacatattcccatggtagactgtgacacagctgagctggcctattttggacgtgtgaggatgtggatggaggtgatgaaaaccaccctatcatcagttaggattaggtttagaatcaagtctgtgaaagtctcctgtatcatttcttggtatgatcattggtatctgatatctgtttgcttctaaaggtttcactgttcatgaatacgtaaactgcgtaggagagaacagggatgctatctcgctagccatatattttctgagtagcatatataattttattgctggaatctactagaaccttctaatccatgtgctgctgtggcatcaggaaaggaagatgtaagaagctaaaatgaaaaatagtgtgtccatgcaa

SEQ ID NO: 7214 - DNA, 812 bp, Homo sapiens
tactgccctccagctctttcctccttccatggaacctgacgtagctgcaaaggacagatccagggactgaagccaaagttatgcaagggactgtgtgttgccacaggacacagtcagatttccagtctccaccaggaacctcttcagaaagtgtgctttatgctgaaacagaatactgttaaaggaaaaaaaagaggggggaagatcaggtcatactatctactctcctcatctctaacagctcaggatctcttagcattttaattagatgtaattgtttgtctttaactgtcaaaaagtttggttctgtgtctgtgttttaataagacgagaggacgagcgattgaggtgtatggagagaaaacagacctaatgctccttgttcctagagtagagtggagggagggtggcctaagagttgagctctcggaactgcatgctgctggacagtatcactgtctttcctagatggcagtcactgaattccattttttcaaggtaatttcttgtgcctctaatagcccaagaatgggaggttgatcagatctgacatgattccttcctgttctgaactgtggggtgtgcacatctctgcttgagtcaggtttgagtagaggcttagagacagttgggtgagaacaaccaaaatcttatcatggtctcagtcataatcattagggggaactctagccaaatggtttaacttctgcctgtggaactggggattgggtgggcaggaaaaggtgatatccattctttctgataactagatggtgctgagaagcttttgaataaaaactttgctaaatgag

SEQ ID NO: 7215 - DNA, 339 bp, Homo sapiens
gaaagctgagatgccatcgaatacagagagagttttgcatcaggacctccacaatttatgtagtcccatctgtatttattgctattattaaattcactcctgtcactcctgtttcattaatcacttaacagtagttgttaggactaatttgatacacttgtggaacatttttatggaaagagctattaagaatgaaaagtaagattttgttaagtcttctccttgaagtatatgttaattaattgagatttgttccaaataggttggtaatcatttactgtttagtgtgttttttttctaggtaggagatacttgggtctcacaaattggtgcaaagcc

SEQ ID NO: 7216 - DNA, 1502 bp, Homo sapiens
atgtttgggtgcttggctttggttttcagggtctaacgtagctgtcctcagcccagcgtagttgtaattgctttaaaaaaaaagttgaattcatctctaacttaggccattggaaagtgtttactggattcattttgtaatattttagcaaaaagagacttcaatgttgtggacaaaatcatacaattcagtcaattttatttttagcatactgttaaatatcacatcacaataaaaatcaaattggcattaaaagtatagaagatataggaagttctatacccttccactgtacttctcaaagttggttattagaccaggaaaacttaatgtaatattatttttaaaatcatcttaaaggatccaagtccatgtaactctttagaacaagaggaataggtcagatagaagaagctgtgtaatgtattaatacatccgttcatgtgctgtccacatgaatgtgttgactgtgctctccatgttcaggtatttgtaagcagtgttgacttttatcccctcttcagtaatctttaagtccccaaaacattataactttttctttttttgttgagacggagtctcactcttgtcactcaggctggagtgcagtggtgtgatctcagttcactgcaacctctgcctcccacgttcaagcgatcctcctgcctcaggctcctgagtagctgggattacaggcgtcggccaccacacctggctaatttttgtatttttagtagagacagggtttcaccatgttggccaggctggtcttgaactcctgacctcaggtgttccacccacctcagccttccaaagtgctaggattacaggtgtgagccactgcagtggaccaatttttgtatttttttaaatgcttgaccaagtgtctaaaataggcaagtagtaccttttgttctttcattgcaatttgatacagtataggctacagtatttttacagggtaaaactagttatggcagtagtatgcacagcagtgttagccatttcatatgtatgtaatatgcacgtgtgtatccaatctgcctgtgacatgcattttactctttgcagagaatgagctgcagtccagtttaatgtcagtttaataagtggtctctttttagcagagcaaaaaaatatagcgtaaatacttattttttttaaaaacttacttaaatttgtgtgtaaaatatttatttgaaggactttaatatgtaaaaataattgtcttctatgccaccctacagattttattttaatgtgaattatttttttcatttcatttttaccagtatagtaaaaaagtagaaaagcaagtatgatatttttgtaagataatttatttggggattcatgttccctgttagacaatcatgaccttttctacttgtctttttatatataagtagtagatttccacttgtttagggattaagaagatgttctagaatgtagataccttgtccagccataggaatcaaaataaaaaactaaaaaagttc

SEQ ID NO: 7217 - DNA, 186 bp, Homo sapiens
aattctgaggttaacgtgctaaagtataattattagctctaacgtaacaccaactgttgtgaacatccatgttattggaaaagaacacattttcagtgtattttagatgtttaaattctgacttttggctattaaatggtttacacaataagccaagaccaaatcaataaacattttatgagattc

SEQ ID NO: 7218 - DNA, 358 bp, Homo sapiens
gggtctgcattttctgaaactaatgaaagcactcctccctgatgtacagttgggaaaatatgtccatatctaaccagtgattcgagctatatttaagtattcaagaaagccagtcttaacatttctaactctgatgtaaatgaagtaacttgtcttaaataaaagaaatgcacaatgtcttggtacttgctgctattttactgtcttaattaagtaaactaatgagtttcttttataaaaaaaatgaaatgttttaaggcttcaatttattgcacaaaatataaagcatctaaactttaatatgtattttatgtatgtttacactgtcaaacatctggaaaataaaaggtctatgctc

SEQ ID NO: 7219 - DNA, 493 bp, Homo sapiens
atattacaacttgctttttagctgatcttccatcctcaaatgactcttttttctttatatgttaacatatataaaatggcaactgatagtcaattttgatttttattcaggaactatctgaaatctgctcagagcctatgtgcatagatgaaacttttttttaaaaaaagttatttaacagtaatctatttactaattatagtacctatctttaaagtatagtacattttacatatgtaaatggtatgtttcaataatttaagaactctgaaacaatctacatatacttattacccagtacagttttttttcccctgaaaagctgtgtataaaattatggtgaataaacttttatgtttccatttcaaagaccagggtggagaggaataagagactaagtatatgcttcaagttttaaattaatacctcaagtattaaataaatattccaagtttgtgggaatgggagattaaaatgcatgtttgagaataga

SEQ ID NO: 7220 - DNA, 645 bp, Homo sapiens
tgaagaaaaatgcaaagtagcaatgagaaggcttatggagtaaaaatgaagtcagttggtatttaatcccaaagtgttgttctgattatctaaaatttgacatggtagaccttgcaatttagaatcaagcaggtgagacagggagaagtatgcctgcttaattatttaaactgtgtacttttgttttgacactgaatattttaaaaagcaaataataaaataactaagcatttgaggaaaattttaaggataaattgaggaaactgattaatagagatagcaagggataattaaataaatattccctatgtagcaacagtggttagatgatctttgtctgaatgtaattaaactttgaatagttttagtgtgtccttaaagccaagtatatgctttaacatcaaatggaagtcaaattcctaatgcatagatagagagagctaaactgtgtaatttaatggtatcttccttgctggatgtggcagaatccacaccagcttatcaaccaacacagctaattttagaatagatcctttatctttccatatggcacacgtaagaaagtgtttttctactattaatattaaattaaaacctttacttttgtataataaattaaaactcagaataaacctgtgaccacgt

SEQ ID NO: 7221 - DNA, 259 bp, Homo sapiens
gtgtggagctttctgccttgtaggtgggcgggcctccacgtcaagatctcttttcctgtcttggaggtgaaaagtcatatctgagaaaatgtttgcagtgacccctagtctggggtacacagaccagtgttccttattgacagtgttcaataaggccccgtcattctcgccagtctgttgttgttcttaatgggctcctccttgaaatgtgtgtgtgtttgtgtcaagaggagttgtgttctttgtaaataaaggttaa

SEQ ID NO: 7222 - DNA, 187 bp, Homo sapiens
agatgaagaatacagtcagctttgtgaaatagtattgcaagcaagccccgtgggcaaatttgtattgagtccatctgtaatttgctcagtgatggcagacaagatggctgtctggttttgagacacactttaattttatgttaacttgttaaatctttttaaaaattaaaaaatttttatgattgag

SEQ ID NO: 7223 - DNA, 393 bp, Homo sapiens
tcatatgttttgagataattgtatgatcaagttgtatatttaagtcttagtgtttgaaattgcagttataattgttcataggattgctatttaagatgatttgaaactcaatccagattttctttttgtattttaccaatttaacttaaataaaaatctgaagaacatcttcactgagtcctagatagataatgtatgtgagagttgtgaaattttagtgtctcactggccccataaattccacgcttcaggaagttgttgcttaaaaaatttcagagatgattttgtttgtggcttttctcaggaaaagcctgagtttgctgcagtatttagcaacttttcttctcagaaaaaccataatacttccttttcagtggactgtagcttcttaaa

SEQ ID NO: 7224 - DNA, 2149 bp, Homo sapiens
cgccccgcggaggcctggcccggagcccggccacactccgagtcctgggtcccagtccagctgctgcctcccaacccatgcccgctagaaacctgctgcgagggcccctcccagaggagccccgcccctgtaagatttccttcctggttttctgcctttggtatcatcttcctctgtccttactgtccacggtccctgttcaataagccaaagaccctggtgccccgcccagacccctgggctgacgtccagaccaatctcaccccagaggcaactggatggtgcctttagttggtgcggatgccccgtggccaggtcaagtcagagcacctggacaggtgtcctccctgctgctgaccctgcagagggaaggggtggggatgcaggaccccactctgcgggagccccatagccacctctcttgcccaaggtgagccagccctggggacccagctcagggaggctctgctcagagttcggcggacccaccccaacccaactcccagccgccagccaaagccactgggtgagcagagtcacccacagggccagcccctcagccaggagccagtggcaggagcggaacagcccatccagcagagtgagtccatccttcccaggttctcccctgggagactccctttgccaccaaggcccccaccagggcctctgaccaccgctctggagaggacagtgtggcatgctccaaggatcatcttacttaactcgcagcctgtggctgtggtcctcttatagatactttcaccgtttgcagggttgctaatcagatacctgctgtcaccacacttgggtcaggaaccctaatgagaacggggagctgccagggtgagggcagccctcagggtcggccgctttccctctggaccacctcccgctgcgtttcctactcagagaaacagcaagggcggggtcaagacacgggatgacgggaagcaggaagcggggcagcagcacagcgtggggtcctggcactgcaggccaggccaggatgcccaccccgccctctacacggccccttggggcctgcgcccgtgaaactggtgccagggagcactgccagcttgccagtttctgcccagcaaaagcacgtatgcttcaggggccttctgagaccaccttccccactgagccccagctgctgagaaggccttgagggaagtagaggctgggagcaaatgccccatgcggtgagaggatgaggggagcctacgcctcaggcatgtggtgagaggatgagggggagggagccaacgcctcaggtggagtgggcagaggtgcaagagagggatgtactgaagcttcttcccgtcctgccacagacacttctcctgccttcccaccctgacccggcagaacccaccaagtgcctgtgtgcagcctcctgtgcctcacccagggcctgaccccagagtggtcccaacaacccggtctcatgcccactccccatccctgcttcccaaaaattgcactgtgtgcagtttgcaacaaagaatcccgctggcatcctgtccttgggaaccctttctcattctccaagcctggtcagctgcctgcacaggcagaggtgccctcagcccagattagcaacactcatagttttgccaattaccagtagacactagtggaaccatctaactggaacttcctctctccttccacttatttcctcaaacttgttgctttacactagacacatgcaaatgtatgttttaaacacaccaaaacagatcatgccaaatgagttgcctgtcaaaggctggagggcaggaggagggcctgggtttgggttctttcctcccagcctttggatggtgccttgggccccttagccccagcgccagggcctcccagctgaggccacaggacaagcacttttttatgatgtactaaaagccacagtatgtggcaactgcaaaaggatcaggaatttagggtatgatctcggtcacgtgtcccgggcgctgaggggaaaggaagcgggcatgattgtagacaatgagggggttctcttgatgtaatgaaatgcaattttatggtttggtgcaaaaactcctattttccagtaaattaactttatttctaaagcatattttgatttgccatcaagagcaataaagcattaaatctt

SEQ ID NO: 7225 - DNA, 875 bp, Homo sapiens
cacccctcgagtcacccagcactccctccaaacagaccttgaggcccaagacccaggacaaggaacagcaagctcaggtgggatggccccagtgctggaaagaagcaagagccccctatgcacacattgcagactagctgcctagacctcgctccggccacgtccaacacgacgcatccttgggccccgccgtgcgtccctcttaggagagatgagtcacactctggaactgtccaagaacgaacctgccatcacatctcactgccagatgtataaagcacctgcatgctcagacttcttgtggcgccacctccacgtctgtcttgtacatgacactcctccacgcggtttccagtgtccacactgctgcccgtgcagtgggaccagattccaggtccaaagtcaccatgaggccaccctggaatcagaactgcacaatcaagagggaacccatgggactctctgctacattcagttcttgtgtcgtttgtgaaagttcttaacctgcccaaaaacccccttttccccaagctgcccatggggcttcggcgccaaaggtgacccgcgccaacctccctcccccccagtgcctatgacggcggcacagcagccagcgggtgggggacgcctgtgttcacccatggtgcccatgtcgttcttctctccctgtgacacagcttgtacagtctgattctttttatctggggtaggggggcttttatgtttgtccgatggagatttgttttgttttgcttcattttatgcttttttattttagttttgatgttctgaggtttgctttggtttttccattttctttggcatttatttattcgtgcttcaaatcacagtcatattaaaagctggtcttgtgg

SEQ ID NO: 7226 - DNA, 179 bp, Homo sapiens
gcagatttctttccattgtgggctctggaaaccacatggcttcacctgtccccgaaactaccagccctacaccattccttctgccctgcttttgctaggtcacagaggatctgcttggtcttgataagctatgttgttgcactttaaacatttaaattatacaatcatcaacccccaac

SEQ ID NO: 7227 - DNA, 3404 bp, Homo sapiens
aggggaaggcagacactaagcttctaattgcttgcaattgtggtgtgatttggcatcatgcacttcgctcatcttatggagaagactgaggcctgtggttggaaagggcgagggagcagcctgctatctttagagaacacagtttcagcctcaagttcttcctgtacctccgatatggatctacccttcctggattgaagccttgtgccaagtccatgggcctgatgatcctctgactctccaaatgccagattttcctcctccttgcctcagggaagtgaagggcagccgatagcccacctggagaataaaatatgactacaacctgcagtgctccatggacctgtcattctcagcagtgtaaatcctactgctcagagagaaggcagttggcacaaggtagacagccagttgtttcagctattccaatcctgcatgtcatttacctggaaaggggttctatacattccctctgcctttcctactaccccagcagactgccctcggtctcacctgttagtcctagttacggattcccaaacagcaatgccactggagcttagataaggggaagtcagaggagccaccccaactggagcccgggctggagagaggacctggcatgtgtgtactcttctatcccagatgagcaccttatcaacttaaggtggtagtgtctctgctgtttccattctgtttgtgtcttctggacagaggattggcaatggttggaggttatctcagtcaccagttcccaggtgatgcctggaagaaccctgtcctcctgccaagaagccaggcagcaagtggggttctgtcccaggccccggtgccctacatggatgcttatcaaggacccatacataaactggcacccacttcctcccatgcctgacctgccctcatgataggccaggtgacatctgtccttcagcatgcctctgtttttcagaatgtctaccatcaggagacaatcagatgagccaatgtggagcatcatgaagacatgttcctgggatcatcctggaatccgactctgtctcagctcaagggggttccgagatttcctaagctagccctctcattttacagctgcaaaaacggaggcctgttaattcagtcattttatgaaatcctttgaaatttttattgagctctaattgtgtgtgaagtattatggaatgcttctgtactggaatgcataggttgaacaagacagaaaggcccagatggcagaagttcaagagctttcaccaacccatatagagaacctagtaatattaatgactaatgttaatgaatccatgctttttacgtgccagtcactgtgcccagcattttgcatgcattatctgagtcctcactacaacgctgttacgtaggtactgttattataaccattttccagatgagaaaactgaggctcagtgaaggcaagtttcttgcctagggtcatagagctataaagtagcagagtcacagctcaaaagcacatatatgtgattccaaagctcagatacgtaacccatttagccactttcactgtgatatgcaagggcccaggatttcatatatagcaaagctatcatttctgggtggacatgtttaggggcagtggggtaccaggcataaataggctgttcaacacggggagggcagtgtgtgaaggaggccagcacaggggctctgggaacacaggcacctctgatgagaaagtagtgttctttctgcagtactgttctgagtagctcagcctcttgttccccttccccagcacccagattcacacctacatgctgttagacattcaccccatttagtacacagttatgcatacacgtggctattgtagcaattgtcgaactttcaccctgcagctgggctgctttgccttcccctgtaggctgagctcccagcttagattccagcaccaatagctatttgtgggacaggagaatgtcagcagtgaagggcagcatgatggccagcatgtggctttcccaagcagagacctgggttccagtcctagaaggcaaggcaactgtattagtttgctcatgctgctgtgacaaaatactacagaccaaatggcttaaacgacagaagtttttttttctcaccgttctggaggctggagtccaagatcagcgtgctggcagggttggtttccccttaggactctttccttagctagaagatggacaccttcttgctatgttttcacatacggtcatttttctgtgttcatgaatcatggtttatcttcctcttcttataaggacgctagtcatattggatttgggccccatgaaaatggttcattttaacttactcacctctttaaagacgttagctccaaagattgttgtatgctgagttacttggggttggaacttcaacgtatgaattttggaggtagaagatatatttgagagtaaaaaggggttctgttaacccatttatgcctgaggttgcaattttttgaagttttgcaatcagatcttggcaatgacctggagcggtaggatataaataattcccacatgcttagcattccaataatggaacactaggcataaatgggctaaaaattactttggagcagcagtcttaaatggaccatttagggcaaactggaacatatggacaccctaacattctggccccatcactcactctacagccatcttcttttaaaccactgcacctctctgagtctcagtttcttcatctgttgaatggagataatcatatcaactcccccaagcaggcacttttaaaatactagtaaatgcatactgattacctgacagtactgagcaccactgcatgctctgtaaaggttaaccattgctattattgaaaccaaactgctcactgaggtctatgggcctatgtgatttgacccctagctgcttttccaaattcatttcttcccccttcccccttctcccttctattttattacactggcaccacaaaggccgcccagcagtcatatatcaagcacattcctgcctcagggcctttgtacctgttgttccctccacctggaatgttttcccctaaccccttgctcctttacttcattcaggtttttgcccaactgccacttcctcagagataccttccgagatatatgatgagctgatataaaataatgcaactattgttctacctccattgctttattcttttatgctactttaattggattcatagcagttggtattttattttagaattgcctgtgtatctatctgtctcttctgatagaatgtaagctccccaagggccaagattctgtatgaaccattcaccaacgtatccccagtgcccagaatggtgcctggcatatgtgcttaacaaaataaactgactggattatttatccatattcactt

SEQ ID NO: 7228 - DNA, 128 bp, Homo sapiens
tgattgaattcaaaatcaacccttctagaagatgaaatttagtacactttacatctgactactattgtgtagcctgagccattctgaatttctacacaataaatgcagtttatgtcttttgggtctta

SEQ ID NO: 7229 - DNA, 2856 bp, Homo sapiens
gagcttgcatcggtttcttcagtgccttacagggaaatagcctggggtgtctgggctcagggttggccagcttgcagaggagcaagctagtagaaatattgcagggttcccaaaaccaggtcaagcaagatgccatgtcacccctgagcatgcctgtcttcccaggggtgtacctcttggctggcaaagcccaaggccagtgggaacttgtataaatcacatgggtatgttcttggttcagtgatcttggagtgatgatggtaactgatgaacagagaactttccagaacttgggtcctgtcttcctccctgaacctagacagtttcacccctcctcctgtacccaacccatccccaccccatatgggagatgcttgcccatgtgtttcatcaatcagaagtcctcctccccagcacattcggatttaaatttctggtctctccggctttctgtgctttaactatctttgctaaagtctcttgctacattgcctaaatccatttgtttctttggaccaaaaatgttagtttaccagaccgatagtggtccttaggacagattttagaccagtaaacttatctttggtgagaaatgaaatacaaatgctatagaaaaatttcaaagttgttaaaagccacttcattaaatgctgggattggaagctgttggtctcctgacctgactctgggagccaacaaaacatcaggctcccaaactgctgggaaatttgtttctgtctgcaagggatagtgcgtgcataatccctgctgctgcttctcttgggacctgatttgcaccatccttagtttatgcggaaaggggaagcaatgggtggaggcagtggccttctccttaattttggcttggcttctgatccttttcccaactagaagtcttaagccacttttcgctgaaaatgaaatccctcccttatccatggtagttttaaatttggtttcattgaagaaatagatttaggcaaagagcctgtgctcttctctggccagactgctgttgaagttcctggagagcaaatgttaagacagagcacttaagagctttcaggaggtactgaatgagactggattctgttgtaagccgacagttcaagtctttatttcccaggttggtggggagtgaggagaccctactttcattccctttcctagcccactgatttttgggggcaggtcagggagaaagcattttttttttttttttgagtctcactctgttgcccaggctggagtgcagtggtacagtcttggcttactgcaacctccacctcccaggttcaagctattctcctgccttagcctccagagtagctgggattataggcgcccaccaccacaccaggctaatttttgtatttttagtagagacggggttttaccatgttcaccaggctggtcttgaactcttgaccttatgatccgcccgcctcagcttcccaaagtgctgggattacaggcgtgagccaccacacccagcaggagaaaccattttctaggctctttaggaaggaccatgcaatgagtaggtgatgtatttgagccctcacagtctttacacccctagaggagctggaggacttaagagtttgctgcagaagcgtggccaagcacaaaacacatgatcaggaaagcagagtgttttcccattaccaatggatgaactatgcaaaccctaaacgccttggcagacacctcccaccccttacccctcccatgcagctgaaaaatctgagactagaaccaatcatgactctggatggcagagggaaacctctaaagggacttattacattggtacagacatatttatgctttcttccatcaccaaccactaaacccctttggaggaatgaaataactgcataaactagtcaactgaacactgggccacttacctcaatgttatacaaagtcctggatgatttgattctgaaccacagcctttgcaggagttgggggaatcagatttgctcatgaagacatccctttccacttttgtcatgggcagtaaatactatagtttacaatgcctaccaattagcaaaggatcattcattcagctactcagttcctctgtaaaacaggtctatgtatgtgcaattcagctaagatctagcagtaacttaagggcagaagctggctctctacttacaacctgctttctctgctgaagccttacctcctcttcagtttccctcctagacacaaatcgaaaataatatactgatagctggttagtaacctcagtaagaattaaaactgaggttgtttactcattttgcctttaaatcttttatccccttttggtgaaggtttccctttaggaaaaaaggtgtcaaacaaccctgattttttttttttttgcatcatttttattacaccaaattaaagttgggagttccaagatcccattccagttaatatttaaccaaggtctaaaatttgattttttttaaatctttgaatcctcccttctgcccctcatggatccttggttttaatgatatggaaacatctaattcttagaattattccgtagcttttgctgattactctgagatttcagttaagacttgtttcaaaagacagatagctgactggttcataatacattggaatagttggatccaaactaataagaataagctgtacaggaactagtgctcaatatacattgtataaatttgtggaaatctcttggatgtgaattgttacttcaagtggcttttattaagattttctcagacttacttggaggttaaagcaaacccaaatgtgtattattttgttacagagctctgctttataattttgtaataaagtttcaatacagacacc

SEQ ID NO: 7230 - DNA, 570 bp, Homo sapiens
cctgtgctgttgtttgggaaacagggaagcattggggacccctcccaacttttcttcccagtaacgcctgctgtttactgccacctggcactggtgactacagacgttctcaggctggccagaagagacatcttgggttccttggcctcactctctgtaagcatataaaccacaggcgaaagaggatgctgcattgcgaggacccagaaattcatactggtgccacgtttccttcccttatttctaacgtgtatgtttctggtggaaaccaagttcaccctggctgggagcatctctgatgaggcatgctggcgactggatggataatcctgtgcatcaccattgtgtcctgtgctccctcctagcgcagtggccaagccgggaaagcctctaacttgcctttgctgctgctgccttttttttcttttgtctctgcctttccatttgttagatgggggcccactcttccttagctctgtctctgagttactgggtggaaataagcttataaatgaaatactcttcttcatctctgttttgctcttaaaaatataaaaaggcaattccccg

SEQ ID NO: 7231 - DNA, 1088 bp, Homo sapiens
gacggcccgaagttctctctgacccccacctcgactcggcctctgccagctgccttccctgccagagaacaaaggctgagatggcagtgcacacaccctccccaccagtggggacctgagaatgcgtgtggcctgctgtcctcgatagaccggaatggggttttcccacagatccccgcctgtggcacaccccagagccagaaatcgaaggtcacaggaagttgtcactgaacttggcccgtgtctgctactctgtaccttgctggtacagacaggggtggtgggcagccaggctctatgagtgggcccctagtgtcagctctgtacagggtcagatcccaggttctatgaccaaataagtaacttaagttttgtgtgttgggttctaattccttgtcctagaatccccatgactcaatcaaggactgtgctaaatgagattgtccagcccccgcccttgcactggactacgccaaaaccacactgaccaggcacttgccttccctctcttcccccgtgttggtaagagagaggccagttgtgatagtggccaaggagaatctagggctgtattgttgtccactgcagtaggcaccggccacatgtgactgctggcatgaaatagaagtgcagttcctccatcgcactgggtaaggcctccagtattggacagcacacagaaaggttttcatcatcaagagagttctgctggtcagccctgctccaggggatgcctctgccttcgcatagcacactgcttgaggccctgccaggcaccaagcactgccctgggcccatgggatagagcggggaaggtgatggctcttccagaggattccctcagatggggaggcagcagtatgagctctgagcagaagtgggtattgttgatacagaggaagttctttgccacgagaactttcaagcagtgaaaggaattcccatcaggactcagaccccaggccgagatcttgccctgaatgtaccctgcctctgctttctcctgcatcccatgctaagcagggtcatggtctgaactactcagattggatttccaaaccatccttgtataaactgctcagaactag

SEQ ID NO: 7232 - DNA, 771 bp, Homo sapiens
gatagaacttgggagcccgggggttgggagggacagggataaataaaggcaaagactgaagacaaacatgggaggagaagtgactggaaaagaactggtgtgggagagggatacctctcagagtcaagggtgacttggggacttggtggagagggactacgtggaagacctggggccagcctgggaccaagggatgtggagtccaggctgggtcctagaatcagggcataactaaggggtaaagtctgaggagcagatccaaagggctgaggcagggaggccgtgggccatggggaggacttcactcagcagcaaagagaagagcattggggctggagtgttccggcaaagacagagccagcagctgcgctgggggagggaagcgtgcctccccacccctcccctcacggggaaggtttcctttcctcgtgcttgtgccccccgcttggggtggtgacgtgacattgacatcaaacaaggattacagtgaatgtgaaaaaaaaaaaaaaagatacctgaatagacatttctatgacattttaaaagccatgaatttattttggcacaaatattttatcatatgcagtcacttctttgtaaatgattttttgtaaagtcattggatataaaagagtgattttcctcacctgagtacatgaaaagaaaatgctgaaatcaatgtataaatcaaatcatctgtactagcactgttaatctagaagaaagtggttgcatagagaagagtaagaatgtagaccagcttattgaagt

SEQ ID NO: 7233 - DNA, 2043 bp, Homo sapiens
gaagaactccaaatcaaaatgctatgtaaatgtctatgggtgacagtctgctgatggtagaaacctttctttttagttcacaagtcagagatttggacggagctgacacaaagagtttggagctcccccatttctggctctcctttcaggggttccttccccaaccctttcagcagcggtggctgccccccattctgacccctgactcttccagccagaaagatggtggttttctaaaggaactttagctgtcctgcacaatgccgatctgtgtcttgcattttgggtaaaagccataaaaataagaaactcagcctgtggcctttctttcttccaaggctgggcttctttttttaagtgacttcatgcagtttgttgcttttaaaaatttgtccagaatcgttttctgcagaagcatggtctgttaggagcttactggccgtagcagaagcaattgtttcctgaattcttgacatttatctttgctgtattcatttagggcttgggagagtccgaagataattcagtcactgtcagattaataattttgtcaggacaaagaataccgttatgattatttaatcctttaaaattgtggtctccagagcttgttctcagaatggcccagaccaagccttaattgtgatagtgaatattaatggtcactttaaggagaaattataggccaagatgaaatgaacataaacctgtttgccctggctttcagtggaagatgatattagagaccaaaatctggttctgaaggtgtgtatcagccctaaggtgaaccagacttgggaaagattgtctttaaaaatcaatgagtttatgttttaacttctcagcttagttctatgcattgctctataacacacctagttaagttttatgttattcttgaactgtgattttttttctatttactttcatggtttggtgggccattgttatggactgaatgtttgtgtcccacccttcacccccaaattcccgtgttgaagccccaacctgcactgtggagctggggctgctaaggaagtaattaaggttacatgaagtcatggtggggctctgatctgctaaggttggtgtccttatagggagagaccccagagagcttgttccctccctccctgtgcatgcaaacaagagggcatgggagcacacagagagatggcagccacctacaagccaagaggagaagcctcacaatcaaactctcgctgctggcgagagtcttggactctgtcttggacttccagcctccagactgtgagaaacaaatttctgttgtttcagcttctcagtctctggtgttttgttattgcagcctgagaacacagctgtacgattatttgtcaaacagaaaacactgatacttaacaatgctaatgcaattatttatttgcttttcagtctctacaaaacgttctaaaacactaatctaaatattaacagtaaaatatttgcataactaatggaaactaagaaatcatatgaccaatatttcacttattggtaatcttactctactgatttccccccagactgtgatttttgaacttccttgcctttctcctgtctttctgtgtttattcatggaattccagttatctgggcttgaaattgcaggctctcctaacttaagcaaaatctgacagatcagcaaaatgagataaatgtttcttttttctttctgactgcattaaatcagatacaactcagcattaaaaagctatctttgtaaatgttgttactaataaattagtcttataagatccctggactttggagttgttgcaatgtctttgagagtaattctttaaaagtctaatttcgactggttgtatctctttatgatttattgccccactaacaatatttgaaacaatataatattttaaaatgtataaataattatgaatttttgtttagaacaaagaggattactgatatttgtttccctatgaatggcaaaaggtttagcttactactgcatttctgttttaaataaaaagttgagagtttgtgtctcattaaact

SEQ ID NO: 7234 - DNA, 5499 bp, Homo sapiens
agtgactattaggaagaactccaaaccaaaatactgtgtaaatgtctatgggtgacagtctgctgatggtagaaacctttctttttagttcacaagtcagttagagatttggacagagctgacacaaagagtttggagctcccccatttctggctctcctttcaggggttcctcccccaactcttttcagcagtggtggctgccccccattctgacccctgactcttgcagccagaaagatggtggttttctaaaggaactttagctgtgctgcacaatgcagacctgtgtcttgctctctgggtaaaagccataaaaataagaaactcagcctgtggcctttcttccaaggctggagttctcgagttcttttatgtgacttcgtgtagtttgttgctttaaaaaatttgtccagaattgttttctgcagaagcatggtctgttaggagcttacaggccataggagaagcagttgtttcctgaatttatctttgctgtattcatttagggcttgggagagtcccaagataattcagtcactgtcagattaatcatttcggcagaacaaacaatattgttatgattatttaatccttaaaattgtgatctccagagtttgttatcagaataacccagaccaaggcttaattgtaatagtgaacattaatggtacctttacagagaaattataggccaagagaaaatgctggctttcagtagaagttaatattagaaacccaaatctggttctgaaagtgtgtatcagatgtacggtgaacaaacttgggaaagattttctttaaaaatcaatgagcgttggccaggcacggtggctcacacctgtaatcccagctgtttgggaggctgaggcaggtggatcacctgaggtcaggagttcaagaccagcctggccaacatggagaaaccccatctctactaaaaatacaaaaattagcagggcatggtggtgcatgcctgtatcccagctacttgggaggctgaagcatgagaatcacttgaatcctggaggcagaggttgcagtgagctgagatcatgtcactgtactccagcctgggcaacagagtgagactgtctcaaaaagaagaagaagaaaaaaaatgcagtgagtttatgttgttacattgtaacatctcagcgtagctgtatgcattactctatagcataactacttaagttttatgtcattcttgaactgtgatttttttttctatttgctttcatagtttggtgggccattgttatggactgaatgtttgtgtcccatcctcacccctaaattcccatgttgaagccccaaccttcactgtggagctggggctgctaaggaagtaattaaggttacacgaagtcacagtggagaatctgatctgctaagactggtgtccttatagggagagaccccagagagcttgttcccttcctccctgtgcacacaaacaagagggcatgggagcacacagagagatggcagccacctacaagccaagaggagaagcctcacaatgaacccccccccccaccctgctggcacctatgtcttcgacttccagcccccagactgtgagaaataaatttctgttggttcagccatccagtctctagtgttttgttattgcagcctgagaacacagctgtatgatcattcatcaaactaaaaacactgatacttaacaatgctaatgcaattacttatttgcttttcagtctctacaaaacattctaaaacactaatctaaatactaacaataaaatatttgcataactaatgaaaattaagaaaccacatgcccaatattccatttataagtaatcctatttggctgatttccctccatattgtaagttttgaacttttctgccagtctttctcctatttgtgttaactcatggaattccagttgtctagccttgaaattgtaggctcttctaacttgagcaaaatctgacagatcagcaaaataaggagaaaaatatttcttctttctttctggctgcattaaatgagatacagctcagcaccaaaaagctatctttgtaaatgttcttagtaaactccctggtctttggagttatttcagcctttgagagtaattctttaaaagtctaattctgactggttgaatctctctatatgatttattgccctagtaatatttgaaacagtatcatattttaaaatatataaatatttatgaatttttgttcagcccaaagaggattactgatgctttcttctttttccatatgatgaggaaatgtttagcttatatatttattgcatttctgttttaaataaaaaattgagagtttgtgtttcattaaactgaaaaaaaaggttctgtaaaataaatgattaaatggaggaaaaggagaagactgaggccagcaactccatgatacagccaaaaatgagccagtaaaagattaagcaagattaactgtaaattttttttttttttttttttaaagagaaaaggtctcactgtgtttcccaggctggagggtagtggtgtgatcatagttcactagagccctgaactcctgggctcaagtgatcctcttgccttagcctcccattgctgggattataggcatgagccactgtgtcaggcttaattgggttttgatgggtacctgcctatctctgtaatttggctctagtcatataggacctgcttcattaaagatctgaaaatctatccagccattgtaaaatgaaacaaaatgttttgaaaatttaaattagccttttattttagttcagacatatagaaaagttgcaagcatagtacagaaagttcctatataccccacttagtgccctcctttttaaaatttttttaaacctagcttatttcctttaagatttctgagaattccaggaatgctcacagatctgtccttgtagtctcctgccacttcttgctatggagtgctgtaccaaggtctctgctagtttctagttggcttgacataatgactttcctaaacttcttctgctctgaatctcaagcatggaaagcggtcacatcttttgtttcacgaattaacagtcaacacctggccctacttttaacaaaacttagtaaagccttgagcatagtgaaagacaaatatttaaattatatattagcaggaggctgaggtgggaggatcatatgaggccagcctgggcagcatagcatgacccccccctcgagaagacaacaaaaaattatctgggtgtggtggtgtgctcctgcagtcctagctattccagaggccgaggcgagaggatcgcttgattccaggagttcaaggctgtagttagcgataatcgtgtcactgaatcctagcctgggcaacagaataagaccccatgtctaacaaaataataataaaacaatcaaaagtttaaaattagttattaaatgtcagtgtgcccagagtcctttgaccacagatgatcctgatggccttctctcgccttgtccctgtgcctccttctaccatttttcttcctgagattcaaaagtaagtagcggacagggttcccatttaccactaaatacttcagtgggtgtttcctaaaaggacatttatagtaccatcatcaaaatcagtaaattaaccctgatactattatctaatctgtagactttattgaattatatcagttgtgcctcaagtgtctttatgtttttttctcaaaagagaaaaagttctggtccaggatttgatctaagatcatgcattgtattgagctttcctttcttttaagtctcatttaatctggagatgttaatctgtctttgtcatatctttgacactattgaagaggactggcctattattttgcagagtatctgattttgggtcatttcatgtgttctcatgattagattcaggttatgcatttttggcatgaattccatagaagggctgttacggttctcagttcacggtattagaaggcacttgatagtgattagttccattcctgatgatgttaactctgatcatttggataaagtggcgtctgccaggtttccctactgtgcagttacaatttgctttttgtaattaataaagtgtgtgtgtgtgtgtgtgtggagggggggtgtttttgcttctgaacgcataatatttgagatttttttctaattaaaaagtaattattcaaagagttcagagaactgatactgatcacattctttgaccccacatgcaaatacattataaactagtaataaaacggtaactagaaaaatgttcatatcttttggaattaaaaaagtgtttaactcgtggatcaaagcagaaattctgtaaccattgtcacagcaggttctaacaagcaagtttaaggaggagagaatttcagtcctagagaatttcagtcttattcaaatgctttcctagaaagaggaaacagttcctaactaatttcatgaggctggcataatcttgataacaagtctgataggtaaagtatgaaaggaaaattgcaggtcactcaattatcactcaaatatctacatgaaaaattctaaacaaaattttagcaaacaaaatccaacaatttgtaaaagtgataatacaccacgaccaaggtggttcaagtcaggaattcaacgttgattttggcgttaaaaaatcaatcatcaggcccagtgaggtggctcactcctgtaatcccagactttctggaggctgaaggaggaaagatccttcaggccagaagtttgagtctgcactgagctgtgactgcatcaccgcactctagcctgggtgccagtttgagaccctgtctccaagaaaaaaaaattaatcagtgtaattcaccacagattaagagttcaaaagagaaaaatcacatgatcatctgaatagaggaaaaagcttttgataaagttcaacatccattcataataaggactctcagcaacttagaagtataaaaacacttttggaaatcaacaaagggaatttacagcatgaacaaacagcaagccagcatggtggctcacacctgtaatctcagcacttccagaggccaaggcaggagaatcacttgagcccaggggttagagacaagccttggcaacatagcaagatcctggctctacaaaaaataaaataaaatgaaataaaatttaaaaattagctgggtttggtggtgtgtgcctgtagtcccagctactgggaggctgaggtgagaggatcactggagcccaggaggtgaaggctgcagtgggctaaaaacaaccagaacaaccccccaaccccctccccgcaaaacactataaagaatagcaacacaaggttcaatgtaaactttgatatggtgttttacctctgaggagaggcttattgttaatattctttagccgtgtaaggggttcacagatgttcatacttttgttctttataccttatatgtattctataaatattgtttctactcaatagttaataaaaacataatttaaaagttc

SEQ ID NO: 7235 - DNA, 267 bp, Homo sapiens
tggaaaatggactgggctactgagatatttttcattatatatttgataacattctctaattctgtgaaaatatttctttgaaaactttgcaagttaagcaacttaatgtgatgttggataattgggttttgtctattttcacttctccctaaataatcttcacagatattgtttgagggatattaggaaaattaatttgttaactcgtctgtgcacagtattatttactctgtctgtagttcctgaataaattttcttccatgcttg

SEQ ID NO: 7236 - DNA, 986 bp, Homo sapiens
aagggaatcatgtcttatcctcacaacaaaagtattgcgctgtaatgtcacagagctggtttcagcatggtattgagttgacacttctcagcctcaattcataactatatgaactttaaatgattatatggatttctttaaaaggatatgcccatttgatcctaaccttttagcctgctctctagaaccctacttacagttgaccaagctgcttaaagtagaaggatcaggactggcaggggatatgagggccagtgtagagattaaacagaataatgagtacacaagtttttgcctatccctttccttaaaatataagaaataaaggagctcttacgaaaaacccaggttagaccgcataaaaaataaagtgaacagtgaggtggtagcaagacttctttttagaaaagaaagcatttacctgcctgtctgtaaggtggaaatttcatcagtttgcaaacgataagaaatgcagacttgctcttgatagaaatgcttagaaacactctgggggggaaaaaagctccttccatatactgtgagacatttgttaagtgacatctattgtttatcagcttttaaggataaaaaaggtattttaaaagttggatatttaggatatttgaggatattcctttatgagctctccatatccttcttgagaaactggttaaaaaaggaataggggttgagtgttacagagagtagtctgaagattcctgtgtaaaagcaaagctaacaagcaatgaagacatgaagcaaaatactaatctaattgtgtaaagaaaggatattttaataagttctttctgcttgctgctaagagtttgctaaagtgtcatgaattattctggttattactaaagtttctatgaaacacttaagtagattttaagaataaatgtttctggaaaagaactatgttatgattttgtagaaatgtaaagattacttgaggtgtttaaaataaatttttcattcagact

SEQ ID NO: 7237 - DNA, 336 bp, Homo sapiens
ggcacatgagcgtgttgggtaggagggaagcaaaaaggatggccatgtatacactggattcacagctgcgggaacagaagggatgttccctcacctccacacagggccttgggcaggagtgggtcagaagacaaatatagactccatctgctcatctgagcaaaggggcaacccactgctctcactccaactccagaggtaggccaggggcagtaggaccatcctgtatctcattactctcccctagaacggctcaccacactcctggcctctggcccctggccatgcccacctgtttccataactcccataagttattaaatgcatgtgattctg

SEQ ID NO: 7238 - DNA, 643 bp, Homo sapiens
aggcacctcctcacctcagaaactggtggtgctctcagggcaaaatcatgttccccacccccggggcagaacccctcttagaagcctctgagtccctctgcagaagaccgggcagcaaagcctccatctggaagtctgtctgcctttgttccttgaagaatgcagcattgtctttgtctgtccccaccacatggaggtgggggtgggatcaatcttaggaaaagcaaaaaagggtcccagatcccttggccctttcctccgaggacttctatcctccccaggcctttgtttcttcggctaaaggtacagttcctttcaagaggtaacagcactgggatccaagcagggggatgaaaaactcagcagagaaattcgagaccattttgcaagactgtgcccttctcctcaggaccccctggctcagttcttgaaaaacggtgtcatatttagtcagaggccccacccccaggaagcatggatggggatgaaggcacaggcgtctccaacctcagaggccctttgtggggtcaggacacagagtgggagggagactgatgcaggcctaccagtccctggctttttgtctggggctggaataaagaggtgccttcagctggtgggccgagaggcaggaagcagcctt

SEQ ID NO: 7239 - DNA, 368 bp, Homo sapiens
aatccggctaggccaagatttcccaatgtcttgaagccaatggctaggaaaacagctgagcctgggactggactttgtcagtaacctctcttccctagggcacgggaggagtgggtgaataggacctcttggcttgaggaccatgattgtgaatacagacatttaattcagaatgacacctacattgatgaattttcattgtacaagtgtttttccagatcaaacacaaaacccatgtaattccttgataaattttcaatgcagggcagataaactgttgctaacatttttcatttatatttactgaagttattttcatcagaattcattctttttcataagttattaaacaaatgtgtgatctattg

SEQ ID NO: 7240 - DNA, 107 bp, Homo sapiens
gtcaattctttgggcctactccccgactccctccctgaagatgcttctcaggctcccatgagaaaacaatctatacttatcttccgtgaataaacaagtgtcactct

SEQ ID NO: 7241 - DNA, 884 bp, Homo sapiens
gatggagagtccttgaacctgaacttacacaaatttgcctgtttctgcttgctcttgtcctagcttgggaggcttcccctcactatcctaccccacccgctccttgaagggcccagattctaccacacagcagcagttacaaaaaccttccccaggctggacgtggtggctcacgcctgtaatcccagcactttgggaggccaaggtgggtggatcacttgaggtcaggagttcgagaccagcctggccaacatgatgaaaccccatctctactaaaaatacaaaaaattagccgggcgtggtagcgggcgcctgtagtcccagctactcgggaggctgaggcaggagaatggcgtgaacccgggaggcggagcttgcagtgagccgagatcgcgccactgcactccagcctgggcgacagagcgagactccgtctcaaaaaaaaaaaaaaaaaaaaaaatacaaaaattagccgggcgtggtggcccacgcctgtaatcccagctactcgggaggctaaggcaggaaaattgtttgaacccaggaggtggaggctgcagtgagctgagattgtgccacttcactccagcctgggtgacaaagtgagactccgtcacaacaacaacaacaaaaagcttccccaactaaagcctagaagagcttctgaggcgctgctttgtcaaaaggaagtctctaggttctgagctctggctttgccttggctttgccagggctctgtgaccaggaaggaagtcagcatgcctctagaggcaaggaggggaggaacactgcactcttaagcttccgccgtctcaacccctcacaggagcttactggcaaacatgaaaaatcggcttaccattaaagttctcaatgcaaccata

SEQ ID NO: 7242 - DNA, 259 bp, Homo sapiens
catttctgaatatcccaaggcgaggtcatgtaacttccttgggaagctctgtcgtgcccctaccccacgccgccccaccactataggctgctggagtcctggaaccacctgggtcggccgcccaaatctttcctggcgaaggggagggaaggggtgttctggtggagtgggaagggaggcttgggtaggattgtgggataagatcgccctggtgacgaggagcggatctcgaacggaacttaataaaggttgcctagat

SEQ ID NO: 7243 - DNA, 55 bp, Homo sapiens
gcaaataaactcattttgaaaagttaattgaataaaaatattgatatctaaagca

SEQ ID NO: 7244 - DNA, 275 bp, Homo sapiens
aacagggtgcgggtgcaccgtggagtcattccaagactcctgtcctcactcagggattcttcatttcttcttcctactgcctccacttcatgttattttcttcccttcccatttacaactaaaactgaccagagccccaggaataaatggttttcttggcttcctccttactcccatctggacccagtcccctggttcctgtctgttatttgtaaactgaggaccacaataaagaaatctttatatttatcgaaatattaaagcactcgctctgc

SEQ ID NO: 7245 - DNA, 1066 bp, Homo sapiens
tgaccaggctttagtggaagcccttgtttacagaagagaggggtaaacctatgaaaacaggggaagccttattaggctgaaactagccagtcacattgagagaagcagaacaatgatcaaaataaaggagaagtatttcgaatattttctcaatcttaggaggaaataccaaagttaagggacgtgggcagaggtacgctcttttatttttatatttatatttttatttttttgagatagggtcttactctgtcacccaggctggagtgcagtggtgtgatcttggctcacttgatcttggctcactgtaacctccacctcccaggctcaagtgatcctcccaccccagcctcctgagtagctgggactacaggcttgcgccaccacacctggctaatttttgtatttttggtagagacgggattctaccatgttgcccaggctggtctcaaactcgtgtgcccaagcaatccacctgcctcagccttccaaaagtgctgggattacaggcgtgagccaccacatccggccagtgcactcttaatacacagaaaaatatatttcacatccttctcctgctctctttcaattcctcacttcacaccagtacacaagccattctaaatacttagccagtttccagccttccagatgatctttgccctctgggtcttgacccattaagagccccatagaactcttgatttttcctgtccatctttatggatttttctggatctatattttcttcaattattctttcattttataatgcaactttttcataggaagtccggatgggaatattcacattaatcatttttgcagagactttgctagatcctctcatattttgtcttcctcagggtggcaggggtacagagagtgcctgattggaaaaaaaaaaaaaagagagagagagagaagaagaagaagaagagacacaaatctctacctcccatgttaagctttgcaggacagggaaagaaagggtatgagacacggctaggggtaaactcttagtccaaaacccaagcatgcaataaataaaactcccttatttgac

SEQ ID NO: 7246 - DNA, 233 bp, Homo sapiens
cttcatcaccaaaaggggccattccgtctgtaccaaccccagtgacaagtgggtccaggactatatcaaggacatgaaggagaactgagtgacccagaaggggtggcgaaggcacagctcagagacataaagagaagatgccaaggccccctcctccacccaccgctaactctcagccccagtcaccctcttggagcttccctgctttgaattaaagaccactcatgctcttc

SEQ ID NO: 7247 - DNA, 139 bp, Homo sapiens
taataaagagacaaaagaggccagccacccacctccaacacctcctgtgagtttcttggtctgaaatacttaaaaaatatatatattgttgtgtctggtaatgaaagtaatgcatctaataaagagtattcaatttttt

SEQ ID NO: 7248 - DNA, 140 bp, Homo sapiens
acttgtcaaggtgaagggacacaagttgccagccaccaactttcttgcctcaactaccttcctgaattattttttaaagaagcatttattcttgtgttctggatttagagcaattcatctaataaacagtttctcacttt

SEQ ID NO: 7249 - DNA, 415 bp, Homo sapiens
ggggtccagaagcttcgaggcccagcgacctcggtgggcccagtggggaggagcaggagcctgagccttgggaacatgcgtgtgacctccacagctacctcttctatggactggttgttgccaaacagccacactgtgggactcttcttaacttaaattttaatttatttatactatttagtttttgtaatttattttcgatttcacagtgtgtttgtgattgtttgctctgagagttcccctgtcccctcccccttccctcacaccgcgtctggtgacaaccgagtggctgtcatcagcctgtgtaggcagtcatggcaccaaagccaccagactgacaaatgtgtatcggatgcttttgttcagggctgtgatcggcctggggaaataataaagatgctcttttaaaaggtaa

SEQ ID NO: 7250 - DNA, 414 bp, Homo sapiens
ggggtccagaagcttcgaggcccagcgacctcagtgggcccagtggggaggagcaggagcctgagccttgggaacatgcgtgtgacctccacagctacctcttctatggactggttattgccaaacagccacactgtgggactcttcttaacttaaattttaatttatttatactatttagtttttataatttatttttgatttcacagtgtgtttgtgattgtttgctctgagagttccccctgtcccctccaccttccctcacagtgtgtctggtgacaaccgagtggctgtcatcggcctgtgtaggcagtcatggcaccaaagccaccagactgacaaatgtgtatcagatgcttttgttcagggctgtgatcggcctggggaaataataaagatgttcttttaaacggt

SEQ ID NO: 7251 - DNA, 314 bp, Homo sapiens
aagcatctgggccagggctcatggctggataatttccctaggcttaacaacccaagcaagcttcgcatcctcgttttatttttggttaaacttatgaaaatgtattaagaaagagtgcagctcgagagagattcagagatggaacacaccagaccccagatcacaaagccaaccatgcccagcccctcccagcacccccagccccacgaccatcgttctgaattctgacgacaccgtgagcctgcctttgtacttcaaactcatggaaggataaccaccttcatgttttgaaataaatgtttcctgttgaaatg

SEQ ID NO: 7252 - DNA, 314 bp, Homo sapiens
aagcatctgggccagggctcatggctggataatttccctaggcttaacaacccaagcaagcttcgcatcctcgttttatttttggttaaacttatgaaaatgtattaagaaagagtgcagctcgagagagattcagagatggaacacaccagaccccagatcacaaagccaaccatgcccagcccctcccagcaccccaagccccacgaccatcgttctgaattctgacgacaccgtgagcctgcctttgtacttcaaactcatggaaggataaccaccttcatgttttgaaataaatgtttcctgttgaaatg

SEQ ID NO: 7253 - DNA, 314 bp, Homo sapiens
aagcatctgggccagggctcatggctggataatttccctaggcttaacaacccaagcaagcttcgcgtcctcgttttatttttggttaaacttatgaaaatgtattaagaaagagtgcagctcgagagagattcagagatggaacacaccagaccccagatcacaaagccaaccatgcccagcccctcccagcacccccagccccacgaccatcgttctgaattctgacgacaccgtgagcctgcctttgtactttaaactcatggaaggataactaccttcacgttttgaaataaatgtttcctgttgaaatg

SEQ ID NO: 7254 - DNA, 414 bp, Homo sapiens
ggggtccagaagcttcgaggcccagcgacctcagtgggcccagtggggaggagcaggagcctgagccttgggaacatgcgtgtgacctctacagctacctcttctatggactggttattgccaaacagccacactgtgggactcttcttaacttaaattttaatttatttatactatttagtttttataatttatttttgatttcacagtgtgtttgtgattgtttgctctgagagttccccctgtcccctccaccttccctcacagtgtgtctggtgacaaccgagtggctgtcatcggcctgtgtaggcagtcatggcaccaaagccaccagactgacaaatgtgtatcagatgcttttgttcagggctgtgatcggcctggggaaataataaagatgttcttttaaacggt

SEQ ID NO: 7255 - DNA, 495 bp, Homo sapiens
tccttggtgcctttgtttccacaaggccttttcctgccccctgccttgccaaagacatttaatcagcacacagctgccagactattcccacagtgctccaaatgcacatgaacaacagtgacggctccagccttcgacccagagccccgtgcccagtgcgtcagtgggcctggggttccaggctacatcaagcactgatggtgtcagggctggtagttaccaaatcagggttaagaaacatcagggccacatttcactaccttcacagatcaaactcagcagcagtcatgactgtctgtcactacactggggatcccaattccacataagcacttttggaagaaaacagccaaagttggcctaaaattggcgctggaatttgggctgggaaaaatcttgtggttatttcctttaaaaaggaacaaaactttagtatttaattagttgatttatttaatgtaatttcaaacaattaaattatgaataatgcaatgt

SEQ ID NO: 7256 - DNA, 282 bp, Homo sapiens
agcttttccctggacttggagttggtctttccctgaggatctaggactttgggcccctctgggctacctccaaggaatcagtcacctctgttctgctgagtctggagaccaggtggtggggtggacggggcataaggaagagtgatgcatacacagtgctagagtacagaatgcagtaagtgatccatgggggcagagagcaaggtaccgcatgatcagaagagagaactagtgctaccgccttgcttgtctagtacattaaaacttacaagtcatgttcac

SEQ ID NO: 7257 - DNA, 2323 bp, Homo sapiens
gaagagcttcctgcctgtccctgccctgtctctggagaaaagggctagagctgccttttacaactgtaaccactgtaatgagaaggcacaggagacccagcactggagtcaaatggcattttacttcctctcgtttcaggttatgcatgacatcctgggatgtaagatcacagaatccccctccagcccaccagtcacacctaccccattcagtatttattaccctggccaggcctagtcctccactccctgcacaggactgagaaggcaatgaaaggtacaaacatgtaccatgaggtcttactaaccaaagtagggctgcccctcctgtcctgacagccccttggcctcccagcatggggaagcgtgaggagttgcccagcagtgagcagcccccctcactcctggccccatgagccgcagccacaggcagcagaggagggctaaggagaggaggaagcctcaagtccattgtttattaccccgactcttagcccagcacacagtaggcactggagaggaatgattcccagtttaaccacactacggtaccttttatgaagaaaaattagagcataaaatctactacaagctccataggaactcaaagatgagggcaaaactgtgagccaagaagcagagaaagaaaatagaaccagttattcttgatttaggggacctcaaccttgggttcagtctctgaggacaaagggaaaggtagttgttggcctgcctctcgcctgcacgtcactgctggactagctgtcgcatgtggctgggagctgcaaggccagtgcttgaggggccccagcagttccacaggtggtgaagcctgagttggcagaggaggagccagaagagaactgccctttctgcactggtggaaactagttatttatgccatgtggagagccagtgagatagatagatagtctgtttgttttgaggacttggaaagttgttcctatgaagcctggagcttggatggttttgagaggttaatggtgcctccacactcactcttccctagttccaggattactgtcctagcagctaacggttctactctcttccccagagtgtagacaggcagcaggtctccccacagctctgaaaggaccctggtgacagctacaccctcagcaccaggagctggccttcctgatgagggaggcttccaggaaacacagaatccacatgaccttaagattatttacaactcagtcatggtgctgctgtcctccaggcttactggcccctcctgactggcatcaggggcttcctcaggtggtggagagagtttactttcaacaactagtttattcaagaaaagaacttactgattcctctgttcctaaagcaagagtggcaggtgatcagggctggtgtagcatccggttcctttagtgcagctaactgcatttgtcactgatgaccaaggaggaaatcactaagacatttgagaagcagtggtatgaacgttcttggacaagccacagttctgagccttaaccctgtagtttgcacacaagaacgagctccacctccccttcttcaggaggaatctgtgcggatagattggctggacttttcaatggttctgggttgcaggtgggcactgtatggctgggtatggagcggacagcccccaggagtcagagcctcagcccggctgccctggtggaaggtacaggtgttcagcaccttcagaaaagggcataaagtggtgggggacaattctcagtccaggaaaatgcattgaccattgctggctatttgcttacctagtaagaattggattcatttttgaccagattattcttctatgcttttttgcaataaatcaaatcccacatatctacaagtggtatgaagtcctgcaccccccaggaggcctgtccaggcatgtcttcagaggcagggtgggttacactcatttacctcccctctccccaccaaattatgacacaaacgagtatgtttcctctctagaaccctgtaatgcctcctcccccatccccagagctccttactgtaggtcttaccctggacaaggattttttcaagttggaggcacagaacatgagcaatctgacattcccacagcccctcaaacatgcaaggctactaaggcaggaggagtataaatgatggatattgaccaagacctgcttggacggagaccgccatattatctgttctcttcgttcacaaaacagccttcacttgtctcagaatttgatggacacatactgtgatgagcaggagcttcagatgcactctttacacattttgttgaaataaacctctacatttgtagaag

SEQ ID NO: 7258 - DNA, 1104 bp, Homo sapiens
acaactcctctgtgaagcattgacttttttttttctgtgacaccccacggggtgacagggaccaataaatagaatgcgagcactgcacagttcgcttccctgaatcgatatgaagaacaccgcaagggacggggcccccgtcatccccacggccagtctgcaggacttcaggtaaaattgtcccacccaaactgcacgtggcaccagaagcttgctcacttatctctacttaagattttctgaaatacggaccacggctttcttgatctaaggaagaacttgctgctgcagtattgaaactgtgaagaactgacatttgaagaaaaatagattaccgttgcgggactagaatgggcgactgcttggagccagtgcttgtttttatctaggacacttactgtcctgtgaagtagaatacatttatctgcatttagtttgttaatgtctgaaatgaataaaaagaggaaattgcgattaaactgatgttctgctttttatggagaagattctgcccatctcccctggacagtagcaggcaggtgagggcagattttacccacttggttgtcacaactgaaccagttctctactccttcccttcacttctgtccactctcaagactttttcccaaaacatgcctgggcactctgcagccgtgaagaatgctcattttgacagaggcccaaatcctgtgtattaggataatatccttccccccgggagccttcgctgcaaacctgttctgccgcatgcaaagactgtgaccatggagttttctcagacaagatttggaaaggcagtggaatgaaatctctttgcagtggcctctctccaaatttccaaagatgactgcatagggaccaacactgcctgactttgcagtatctgtgagaaaaacctgaaaattaattcagggtgaaaatgtggagctctcggcctagtgtaaagtatcaagatgtatatttatgggatagatacatgacttagaagaagtagaagaaaattgtccagaaacagtactgaattttagatagaaaaggctcatgcttcctggagtagggaattgtctttgccatttaatgtgaatgcataaaattagggga

SEQ ID NO: 7259 - DNA, 1928 bp, Homo sapiens
aaacagactttaaaaatactgtcccagaaatgtaattttatgatcccagcatgaatgttattttcatggaatacttgaagtcttacagtcacctgtaccaaacatttgaaatcaactacaagtacatgggactggtgataaatgatcctaaactatcaagtcagtttcaatttgtaggtgccttttttttttcctgtagagatgagggtcttgccatgttgtccaggctggtcttgaactcctgacctcacacaatcctcctgccttagcctcctgagtaactgagattacaggcacaagctgctgcacccagctctgtaggtgacttttaaatgattatacaatggaaataacattcattgacatttctgtggtttgaatccagagagatacttcttatagaaaaacaaatgtttatgctaaaaataacaccaaaatgtggtgaactcttaaggacttttcccttcaagtgtgaaggaaggtgtgatgaatgctgtggagaggcatctggaacagaaattcaaaataaagccttgacattaaataccccttccactgctcactttgtggatggtagcatgagctgtctaccaagaagaaacctgctgctctcttaattttaatatttcctaatttgttgatggccttttgtgttgtgaaccacaacaaagagaggcctcttttgtggctggttattccagttccctgggattttaaattctttggtctattaagtatccttgtattggatacgtaataccttagtgctgtcataatgttgtacaagatcatgatcagcttctccctttcttcattttctgtgatttaaccatgttctttcctgtctctttccatttaagatattttatttgaatactgataaacattttatcctgataaggaagaatgttcttgttacttgatatacctctgtcttcattctcttacagcttatctttccttaggttgatggtgcctcatttaataagtagatctctacttaagctaaaggattatgatcatatggtgttggagactattagctattagatttttctcaaaatatgagttttgtacaatggaatgaaaaagtgacttcatatacgtaagactggtgcctaagaatgacttgaatgttatcagtactaccacagaactataatatacattgccttttctcagcagcatttgaattcaacttatttatttcctctatttgtagctttttgttctagagtcagaacaggtggactttgctttgaatattttagatgggacaaaaattgttcatcttcggaatttatttaaagaaagatctactggtacagggtgtaaaaatacttacaagaatatgatttttttgtttgttcatgcaaacagatcctttacccaatatatattctggaggtaggtatactggtgcaacccatttgccagctgtgtgactttgagtaagttcttaatttctcagagtttcagtgttctcatctataaaattatgtctccaattgtgagtacctagcactgtacctgatacatagtaaactcacaataaatatttcttaaacatagattttgttaggaatacaggcttgataacacagtccttacccttacaatgtaatgttagagataaaggagcaaatagagtcacgcatcacttaatgacagagatatgttctgagaaatgcatcgttaggtgatattgtcattgtgtaaacatcatgttgtttacttccacaaacctagatggtatagcctaccagtacacctaggctatatggtatagtctgttgctcctaggctacaaacccgtatagcatgttactgtcctgcatgctatagacagttggaacatgtagacttgtataaacactgcacacttaacctatactaaatttattgaaaatatttttcttggccaggcg

SEQ ID NO: 7260 - DNA, 2820 bp, Homo sapiens
tgtgtggctctgatcagtttcctccaactcctggttcagccattgccctgtgagggctcactcggcttccagggagccctttaccctatttgtctccttccctcttcttctccctgtgtggctgctgactcagcggtcattctacactgaggaggctgccttatgggtgggccagatccaaaccgcaggcaaacgggtcgtgatggcgtggcaaccctcactgtgttggaggatggcactccggccacctcctccatctctggccatatcctgcccctcgctcggtccggctgcctcaggagaagctcagtagcctttggggacggccactctgttggtggcctctgcttgttggcttccgtgtgtcatcagggttggtgggggtcagtcacttgaaatctttgcagcaatgagttgggaaaaactgaccgagtacctgctccatcatgcttgattgagtgctcctgtgtgctgggccctggcctggattagaatgcctctgctgtgggctttgggtttgtcaggatggaatcctacagcctcctcgggggaaagcacacctcatgctgagcgctgtgttaggcacaggctgggatggagcacttcttctggtccttcattcttctggcaaagctggcttcctagaatggatgtgctcactggggtctgtgtggtgcccatgaggacaaagtgtagcagcctcctgcctgctccaagaaaagggcttgcgaaaggaaagccaaacactgtttctaactcaggggtgattctgaaacctgttggctcccctcacctgtcggttgcccttctgatgagaaaggcctgagggctgggggctgacccaagtgttgaggggaccaaagccaccaagacaggctcggagccatcagctgggtggtgtacaagcatttgttccatgcctgctgtgccctcccatagcactgcctcttccagggcctctgggagcctgacagtgcccagcatgaaggtggggccagtgctgggggtttctgtaggtcccactcccacagaggagagaggctcagccacacaggaagaaagtcttggttacttaagaggcagagaagcccctaggcaaagactggcctgattgcagagtaacttcgcccctttagggaaattcaaagcagggttctgagggttgtggcaaatggcacatggctggcactgagcagtaccagtgtgcttgcccaccacagcgatccacggagctgaagctgggagctacagggggcgtggttggggcaaggggcattactgggaagacaatggccattgtgttgggacctgtgatctccacaccaaagtcagggagcctggaagccaaacaaaggcccagcagccttctgacaagcaagggctgtgctgaggtcaccacggggtcgttggtttaggcatcctgtgtgctgacaggagacccagagagctagggctggagggacagggagcagggcagaaaacacagcctgtgtactcctctgactggagtctaggaagggcgtgtcccatgggaagtggatactctggggtgcccctgaagtctggatctttctaaaaatcttgtaatgttagaatttggagggaatttgaagaaaggaactgaggcccagaaagaggcagtgatttgccaaagtgacacagagcaatggtagcaaaacaaggactagagctcaggcctgctggttcccactccatactttcccacagcactacgatgtgttgaatgcttaccaagtcctgggaatatgctagtgatgtacgagctgcgcgtcctgccctctgggaggttactgtctggtaggaaggatatcgggtcactgtcgagtccccagaaccagctgcagatggaggttttgtttgggggctttgtggatctttctgcggtgtaatagatcctattactgtttctggagcaacagttatgggacactgaatattatcagtggctgcctttcttctgtcttttttttttttttttttttttgagagacagggtctacctctgtcacccgagctagagtgcagtggtgcagtcttggctcactacagcctcgaactcctggtctcaagcagtcctcctgtcttagcctcccaaagtgctgggattacagttgtgagattgtgcccagcccttctgctttaattttcactctgggctcctcaacatggtccttgtcccaagcccagggactggcttctctttctctgagtgtagttatgtatctgggttctaaccagtaaggttataactgtggctaattcacataacttctctgagtctgaatttcctgcctacaaaatggagaaataggaccttccacacagggtgcatgtgaggatgaaaggagtgaatgtataaagacacctttcccgataacccatactaccctcattatgactcttaacattagagagggctaaacaagggcagtgagaagactggcaggcagcagaaatcattttctttttgatctcacacaccagggcattccccctaagaggcagtgagatgtagcctggccctggaactagaaacagaggtggctgctgtgctagtgcctgagatgcacgatgctggggtcaaagacttgtgtccccacctcaggctgccaggatggcgtgtgtgccgtgacagggctcccgagtcatgcactcaggcagacagcaggctggagcccagcattcaggggtggcttctgtctgtagagccgcatggcactcttcccacctcagtgcccacagccaaggtagggtcactaaccaagccagaaacgtaactgtgtgcagaataccgaaaaa

SEQ ID NO: 7261 - DNA, 940 bp, Homo sapiens
tgcccacacaccacttacttcgtgcgcaacaacaaggaccctgttttccacaccatcaccctctgggcagctgtcatggaaaagcccagtgacctgaccggcacctgcgagaggtccctgcttacctgacggacgtcctgctggcacctcagacaatccactctcaggaggcgcagcccgaagcccagtttcccttctatgcagtattgccacaatgcctctcccacgatgtcaaggactcctgtctgtcctggaggtgggagacaaggaaccaccgaagaggaagcaagaaagccgtactgtctatgttgtgatccttcatcgaacaaactgatgcgaaaacttgaatctgttactgaaatgaggagagaaggacatgtgctattgaactgagccaaacacactgtaaatatccacagactccctcccctgcccccatcccacatgatcttgagatttcttttaaagaagtaaatttgtccaatggctgtaaactataaactactgtaattaagtgcaatttcccctctgtgtcctctcccctctgccctgtatataatactaaagtgtctattagttttctttgtaaaggtcagagtcaaaatttcaaaagtgatctgtcccctctcccctcatggagaaacatcctaagtgggaagtgaagccccttgtcctctcccgcgggcctggacacttatggggacagcataccttggactgactaccagctaactccagtctcctgacattaagacacacctctggatccctggaggggctgaatgtagtgtgtcagagtaacatgccagcttcctgtgggccaggagctcagccgtgcactccctaagaaaccccagggcagggaaactggctgtttgatagcagaagaaaaagttgcagtctcagaaagccttccattaaaacaatttattttatcact

SEQ ID NO: 7262 - DNA, 854 bp, Homo sapiens
cagccttattaggtgaggtcaaacacagagctagctttcaggagccaaggccctttccaagtccaggtgttcccaaagagctgaatcaaagacagcttggccacttcccctccttgagaagaccagaagtcaacccatcccaaagacaaactgcatgaaaagggtacagcttagaccccaatgggaaggcccaccctctctttacttctaacttttcttcctgtttgaggaaacaaagactggacactctacttctaaggacgcctcccatccacctacagtactcacaacacaaaccacccgagtctggacactcacccacaaagccactgttagggatgaaaaaagtcagttgtgcccagcctaccttctctcacagggggacccaattctctgaagtctacgatggagcattttttgagaagaaactaaaccatacaaagtgttggcaacgtagggatggtggaccacagaaggctataaaggccaccatagaaagctgaagagccatttaattgaagcggaagataaattgggggaaaagctaaaatgactcaaaataggggcctgaaaatgctttaaggaccttgtcattttgactttgaatctcctgtttctgctttattgcttctcatacctgccctgcttgactgctgaagcagaaacaatcaggcacgctgacacccttatcagcatctggcatccaaagcaacatcagagagagagaacacagaagaaaagcaattgccccaggtcctccccacagtcaagggagctcttccttccagacatccttgtgtgcctcttgctagttttttagggggtctccccctcttcctgccctagctctcacc

SEQ ID NO: 7263 - DNA, 3272 bp, Homo sapiens
aagcccctcaccccgctgccccgcctgtccccctccctcactcctgccatttctcccctctcttccttcatctccaccccaccccaccctactctccagacgccctgaggggtgtgccctgaagaggagggtgcggccctcctcagcgacccctacccatcatctgttggtgtttttggttttgtttttttttttttttttaacaattaacttttaattatctttttttaaacagtaaaactaaaaaccaaacacaccaccttccttgatcccagctggcctctcgctggccgcacctgtcacatctctccttcttctctttcaccactctttcccccagtccatcctgaagctcctgcacccccttcccgccttcccctcacttcccaagaatactccaaacaaactctgaaccacggagacttggagcagtgggagacccctctcccgtttctcgataccttcctggaggaacgcggggacatcggaccaacccatacatcaagccagagagcggggcttagggagactggccttggagatgccccactccctgtctaagctccgacaagactgtgacttcctctgtggctgctctgcctcctcccactcacacccaagtgggcctggagtagagacggacaggctggagacgaggccggagtttgagaggcctcagggtgggtgtgaggccatggagtctgtatccctggggaggcgctggcctcctgggccttgccgtccagtggggagtggagggcagaggccctttggtctgctggctgtggagggtgggttgcacggacagccggatatcggggacactgccttgggagagggcggcccggacgggtatttggtacttttagtttcctgatttagcactttaaatggcattaacttattgaatggggatggggtgggcaagagtgaggggcctagaaaaccaggttttgtggcttgcagttgggggaagggtctggtttgagggaaatgggagggtcgagaggggcttgacggggagcactgaagacacctgggacccgcaggtggggtgacttgaacttcagtcatcctcttggcaatttgagggttttcccaggaaaggatgagacgtagtttttcaatggggctctggtgaccctggtgagatgtctgaaggtccctgaggcctgaccatccagccagcgcccctggcctgtggacgccctgcctgccctgcagaggcggttggcagtgccgcctggcttttggccgggtcctggggaggcagagagaggccaattttggttctcactcctggccccccagagggcacagtgaggagccggtagggagaggataggagaagaggaggaggaggagcggggtccccggccgcaggattcccacttggagcacaaagtgaagtaagcacaggggagggggactagaatcagtcccccatagcaagcacagaaaggaggagctgcgcagaaggcagagccccccagaccctggggcctggctggggaaggtccgcacctggggagagctgggagctgttgaaggtttggggggaggggaaacgggttgtgtttcttcatttctttttttgtttttgcctttgttggttcatccttgttttctagctttggatcatttttgtaccaaggcgagcaagcctttttgaaaaataacaaaagaggaaaaaaaaaatccctcctggaaaaaaaaaaaaaccctggaaaatagaaaaaaaaaaaaggacctcataaatgatgcaattacttttaattgcaggcaactctttacatttaagtgaagtgtcttaacattttatattgttttaaaaatatatttacatattatatatataatatacgtaatataaatatatataaatatttaaaaaagaaaaaaaaaagaaaaccacggcactctccctggccactgttttggcgggggaggggggctggggggcgggcacgtcggcctggcttctgtggtcccagtgaaatggtctggtttgatttggctgtacagagaccccctgacttgggaggggaggggggagtggtgccccctcctccctccactccattactctctgcttgctacttcgcttgcccccagctcccaccctcagccctgtgactggaatgtgtgccccaccgtcattgtcctgagttgaatgtccctttgtgggggaggtggggggggcagtgtccatccacgaaggggcagaaggagggagccacgtgccccgccccacccgctcgggtgaagcccagtgggatttgcatctttctttctctttggttcctgcacatttatgggctgggaggcatccgtgtggaattgcgtgcagcctgtgtgtgtgctggcacaagcccatgcactgtgtgtgcagacgcatggggcctgcacccacaggcatggccgagcacatgtgtgggggaaggcgtgggcacataggtgcatgtaacctgtttgggcattggcacgtgcctacctgcatgttagcgtgagaggagctttgtgtgtgagaacatgtgtaatgtgtgtgcagacatgccgagagccagagacttgtgtgtgggccacgtacatgtggatagagacgcatacatggaggtgcatgtaatctgtgtctccgagtgtgtgtgtgcaggtatgtgtgctggtgcagacccaagtgtgtgggtgtgcctctgtgtgcgtgtgttccatcatccctgcaccactggctccagatcccttcctgagcccccgtccccgctggccctctcacagcctgcagcacatcagtgcccccagctgcatgcgcctcgctgctctgtccatcagtgtgtgcttgaccaagagaaaactaagacgtctcgggggacccctgtacctggtcctctcagcccccgcccactgtgctgtgttactcgcatgggggatttcctgccccttccacaatatgctgtttccccaggagcctcaggcctgaggctctgagtggggtccccagggggccccccggggtgagccccggctccacaccctgccccatccaccctgtagggcccatgttggtgtagcagtgatggcttctgtggatattctgtgacctctgtcggtgtaacttgacaatttctaaatggaaaagggttgctgtgttttctctgtctctcttttttaatgtccttttttcttctcccccgctccctgctctctttccttttcagtttttctagccaagtgtttggggctttaataaaacttgtttctttttcctctcctgg

SEQ ID NO: 7264 - DNA, 1326 bp, Homo sapiens
ggccagggaccctctcccttcttccagccaagcctctccactccttccactttttctgggcccttttttccacctcttctactttccccagctcttcccaccttgggggtggggggcgggttttataaataaatatatatatatatgtacataggaaaaaccaaatatacatacttattttctatggaccaaccagattaatttaaatgccacaggaaacaaactttatgtgtgtgtgtatgtgtggaaaatggtgttcattttttttggggggggtcttgtgtaatttgctgtttttgggggtgcctggagatgaactggatgggccactggagtctcaataaagctctgcaccatcctcgctgtttcccaaggcaggtggtgtgttgggggccccttcagacccaaagctttaggcatgattccaactggctgcatataggagtcagttagaatcgtttctttctctccccgtttctctccccatcttggctgctgtcctgcctctgaccagtggccgccccccacgttgttgaatgtccagaaattgctaagaacagtgccttttacaaatgcagtttatccctggttctgaggagcaagtgcagggtggaggtggcacctgcatcacctcctcctcttgcagtggaaactttgtgcaaagaatagatagttctgcctctttttttttttttcctgtgtgtgtggcctttgcatcatttatcttgtggaaaagaagattcaggccctgagaggtctcagctcttggaggagggctaaggctttagcattgtgaagcgctgcacccccaccaaccttaccctcaccggggaaccctcactagcaggactggtggtggagtctcacctggggcctagagtggaagtgggggtgggttaacctcacacaagcacagatcccagactttgccagaggcaaacagccttccaattgcccctccacccccagctgaggcccggtcacctggtcaggacagagcaactgcatctaaaagcacaagaagacagaaacctgtaagctctgaccccacccccaccccttgagaggtcagcggaccacctccttagggacagaccctggcaggtcgctgcccaccgagatttcctcaagtgtgcatagatctgagaggagtcgggagtcgagactcgagattccatcatagcgtaggtgtgtggggttgggagccccctgatgggcttgtctgtgtttgcaccttgtcctgtgtctgaggtcctgtgactgtaccctcctttgccctgggacatctgtatctcttggctttgtaataaatgctgcatactttct

SEQ ID NO: 7265 - DNA, 3999 bp, Homo sapiens
ttctcttctaccttcagccagagccagagagctggatatggggtcggggatcgggagttagggagaagggtgtatttgggctagatgggagggtgggagcagagtcgggtttgggagggctttagcaatgagactgcagcctgtgacaccgaaagagactttagctgaagaggagggggatgtgctgtgtgtgcacctgctcacaggatgtaaccccaccttctgcttacccttgattttttctccccatttgacacccaggttaaaaaggggttccctttttggtaccttgtaaccttttaagataccttggggctagagatgacttcgtgggtttatttgggttttgtttctgaaatttcattgctccaggtttgctatttataatcatatttcatcagcctacccaccctccccatctttgctgagctctcagttcccttcaattaaagagatacccggtagacccagcacaagggtccttccagaaccaagtgctatggatgccagattggagaggtcagacacctcgccctgctgcatttgctcttgtctggattaactttgtaatttatggagtattgtgcacaacttcctccacctttcccttggattcaagtgaaaactgttgcattattcctccatcctgtctggaatacaccaggtcaacaccagagatctcagatcagaatcagagatctcagaggggaataagttcatcctcatgggatggtgaggggcaggaaagcggctgggctcttggacacctggttctcagagaaccctgtgatgatcacccaagccccaggctgtcttagcccctggagttcagaagtcctctctgtaaagcctgcctcccactaggtcaagaggaactagagtacctttggatttatcaggaccctcatgtttaaatggttatttccctttgggaaaacttcagaaactgatgtatcaaatgaggccctgtgccctcgatctatttccttcttccttctgacctcctcccaggcactcttacttctagccgaactcttagctctgggcagatctccaagcgcctggagtgctttttagcagagacacctcgttaagctccgggatgaccttgtaggagatctgtctccctgtgcctggagagttacagccagcaaggtgcccccatcttagagtgtggtgtccaaacgtgaggtggcttcctagttacatgaggatgtgatccaggaaatccagtttggaggcttgatgtgggttttgacctggcctcagccttggggctgtttttccttgttgccccgctctagacttttagcagatctgcagcccacaggcttttttggaaggagtggcttcctgcaggtgttccacctgccttcggagcctgccacccaggccctcagaactgagccacaggctgctctggccaggagagaaacagctctgttgttctgcattgggggaggtacattcctgcatcttctcaccccctcaaccaggaactggggatttgggatgagatatggtcagacttgtagataaccccaaagatgtgaagatcgcttgtgaaaccattttgaatgaatagattggtttcctgtggctccctccaaacctggccaagcccagcttccgaagcaggaaccagcactgtctctgtgcctgactcacagcatataggtcaggaaagaatggagacggcattcttggacttcactggggctgctggattggatgggaaaccttctggaagaggcagatgggggtcaaaccactgccttggccccaggaaggggccataggtaggtctgaacaactgccgcaagaccactacatgacttagggaacttgaaaccaactggctcatggagaaaacaaatttgacttgggaaagggattatgtaggaataatgtttggacttgatttccccacgtcataatgaagaatggaagtttggatctgctcctcgtcaggcgcagcatctctgaagcttggaaagctgtcttccagcagcctccgtggcctcgggttcctaccggcttctctgcatttggtctgctgatcatgttgccataatgtgtatggaaagtgtaacacattcttactggttaaagacgactaccaggtatctaacttgtttaacattgagtttgtgtgtgtgtgtgtatgtttgtgtgttttgtatattgtttacattttgagaggtagcattctgtttcaaatgctttttgtttttctgacagtattgttgactgggtcataacattttgagctgtggtttggtggattttcaatttttttttttaaaggtcattcgctgtgctatcttcaaaaccttgagtttggcccccaatttttggcattcaaatgtttaaaagctatttatcttggtttatacaagtttcctttctcttctttttgtcatggtattctatttggtctgcagtttgaatgtagagaaagtggactgatcccccaagcgttgtctgcccccactctttcctccttgggtcccgccattcttttactgggcagtcgagggcattggaggggaagtgactgccctcagcctcactccctggggccatgaagaaaagctaaacagtctcatggcatctcagaataatgttgggtctcccaagaagaaaggtgtaagaataacgacatggctgattaggcgaggccaggatagggctaaggccaggattcctggctggcatccagtcaccccttctcccatccttccccctcttcttccacaagtccgcagccgagacactgtagtctcccagccacagtgatgagtgccctggagactccactgacctctagatgaaggcccctggccctggttcctgttaattaacctctgggtctttgagtcccccagcacaaacttctttcctgtaccctgcggcttggggtcacagggcatgccgggaagccacagctgaggggcgcagactgaagcagtgctccacctctccttctttagctcaggggttgctggtctgtggcaggcgccacgagtggcccctgtggctgttctcagtggcagtctcttaagttcccaccacaggcagctctttatcccctctccctacttgactctttctcttgcctgtgcttttggcctcaaacaggcctgctggtagcgctcagggcgtgaggctacactcctgccctgcctttcctgtcttcatggtctgccagggcataccttggggaggtggaccaaagacccaggactttttgcagtagccagtcctaccccccagttgtctttttaccaattcagggtgggagagaaaactgcagcaccccagcatgtgagttactcaggtgttgggggctagaagggacagtgcgtttaaacaacactcagagctctggccttaaacctgtggccccccaagtctaggagcctcatctcttcctggcagtcatgcgggcaggaggtcctgaaagggaaaacccattcagacaactgttccccaatctaccagccatctgcaggggtcagtgaccgtggccctctccctcctctagaatgtgccacttatgaagagtgccccatggggaaaaggagactcagctgtcccttggcagcttgtgccagtatcccagggcagaagtttccacaggagcctcttgcccttgcgcagagccactgtgagaggcggtgggagccaacacccttgggggagggggcagtactgctcggcacatcccagcatcaggtcagatcattgaaattaaaaaatgtgaattaagttcatatccaccttttggggaagcaggacaaaccaccaccccaccaagtgtgtgacttctccatatcccactgcagtttccattttttaaatgggaattttcaatcccctgtgcttgtctaacgtctgctttaaaaagtttgagaccctgttactgtttgaaaatgcatgcatgttacgatgaatctccaacctgaggaaaaaaataaaactcaaaaagctttgtgt

SEQ ID NO: 7266 - DNA, 898 bp, Homo sapiens
aaactgtcccctctcttattggttttcctgcattttccagggaagctgctgaccccttaattctctttataagagttcaaatgacttctttcacagatgtcaaaccaccagtgttcaaagtgaccctgcttcattgagtcctgaaacagctcacttcctttgagagctagtgtgacttgctttgtgggacactcagtaactttgggttttgactctttaacgggtgggcactggaccatctcggtgggagtgcttgtgccactctggaaggctgttccctggggttgtgatgtttatcatgccacttccttcttacctgtgccaacagacctatttcactgcctcagcgtacaccagacccttcagaaacctctctggtgtcacccagatagattgtgcttactgagacaaatgaacgtttacttgatttagaagataatgtgacagaatgatgtcaggttaggtcaaagccaagggagtgacagaatctggaaaatcaaacaatacaaaaagccctaaatgaactgttaactatttgatctttggatgtaaaattgtaatgcgtatatgtacaaatgtacaatttttacatgcttttaaaaaaggttagctttgtgaaaataccttgtttggtcaatgactttactgggtaatagaaccacattgaaccttgatggcaagtaatacaataaggcaggccagctcgtttttctctctgaatctggctggtttaggaggagcctgggtttatcgacgagatctggagtatctattcttttccactgcttgcagtctccaatgtaggcagtgtaaaggtatagtaaaatgattttaggagtcagaaccaaattgccaatatgctccatggctcctaaaggaaaataaaatggaagttttt

SEQ ID NO: 7267 - DNA, 63 bp, Homo sapiens
ttctccagtatatttgtaaaaaataaaaaaaaaaactaaacccattaaaaagtatttgtttgc

SEQ ID NO: 7268 - DNA, 710 bp, Homo sapiens
atcctcagaaagccttgcctttagagaacgtcactgaacgaatgattagaggagtgctactttttcactcaaaaaatagcatccatgggactttttatcatctaagtaacctaagaattcaaaagctggatagaattttagaagcaactacgtacatcattattaatataaaaataacaggcagcctcaagaatgtgctgagatttctctggaaaacaagctctgcctctccgggttttagtcaacctaacaccaaaccaaaatagaatgttagctgttcaagaatctgggaccagccaacctgtatgtatgcatttttgaagcaagagaaaattccattttatagttagacccaaattcactaaatagtgtgtatgttcactttgtttaagttgtatagacatagcccagaatgttttgtgaagatttgcaatatggtgttttggaatgtgtagaatacaaatcacagtttttactaccttcttggcatatgcttacaaagaacattatattttgttcatgttttacatgaactaatggataaaaaacaaagtatacatatatgtctatatatatatatagacacacacacacagacatatatttccttctttaaggtaatcatacaaaaggtctatacatacaggaaggtatatattgtctcaatgcaatcaaatcatcttttactggggattcaaataaaatgtagc

SEQ ID NO: 7269 - DNA, 4536 bp, Homo sapiens
gaacaccaagtctcccctttgaagactttgaggccacagaaaagacagttaaagcaaagaagagaagtgacttttcctggcctctcccagcatgccctgggctgagatgagatggtggtttatggctccagagctgctgctcgcttcgtcagcacaccccgaatattgaagagggggccaaaaaacaaccacatggattttttataggaacaacaacctaatctcatcctgttttgatgcaagggttctcttctgtgtcttgtaaccatgaaacagcagaagaactaacataactaactccatttttgtttaaggggcctttacctattcctgcacctaggctaggataactttagagcactgacataaaacgcaaaaacaggaatcatgccgtttgcaaaactaactctgggattaaaggggaagcatgtaaacagctaactgtttttgttaaagatttataggaatgaggaggtttggctattgtcacatgacagactgttagccaaggacaaagaagttctgcaaacctcccctggacccttgctggtgtccagatgtctgcggttgtcagccccttcctttcccccgacctaaacataaaagacaaggcaaagcccgcataattttaagacggttctttaggacattagtccaccatcttcttggtttgctggctctccgaaataaagtccctttccttgctccaactccttgtctctcaacgtattggctatgacgcagcaagcagaatgaatttggactcagttacaggctgtcaatggtctgctctgtagcagtctcagagcctccccgacccactacctggagatagccagatagccagatgccctgctcctggccacctttaaagcccctgcatatgacacaggttaactaaagtcaagattggggctgctgcattccaggttccctagactcacaagctggtccttggccaggtgcagtggctcacgcctgtaatcccagcactttgggaggctgaggcaggcggatcacctgaagtcagaagtttgagaccagcctggccaacataattaaaatgtctctactaaaaatacaaaaaattagctgggtgtggtgacgcttgcctgtatcccagctactcaggaagctgagacacgagaatcacttgaacctgggaggcagaggttgcagtgagctcagatagtgccactgcactccagcctgggtgacagagcgagactccgtctcaaaaaaaaaaaaagaaagcagatcctcatggctatagagttggcattttagccccagcttctgtagctctgaaagcctaaagaaggtattctctccatctgttaaacacagtatagtggctctcagcccttggggcatgttatcatgggagggaagtcaaataagaggagagaaaagaactcaagggggaaactgcatttttaggctttgctctcttaccttgccctttctactcagaaccaataacttctgcatcaaaacatgttacagcctgcatcaagggctttaccccaacctgcagcccagccttccctgggtgagcttgctatgcgcagccacatttaccatgtggggctccctattctgatggcctgttcggtgccgggtttactcactgccctgttctgatgtcagtgcctgtacatacctccaaaggcaggacttgcctgataaatatttttcctcctctgaactggattttataggcattaaagacaagtcgggtggctagagggctccttgagacatacctagcagggaactgcaggtggattctgttgagaggcaaagcacctgagtggttgggacacaggcagctggcatgggagggactttttttgagacagggtctcactgtgtcgcccagggcaaggatgcccaaagacaccaggttggagaggcacctgccaactacttgctttccctggagcctgcatgtgcctgtggggtggggaggcgtaggggtctacggctgcctgagatgggtgtgcacagtgtgtgaagtacctacctccttgccttgctggactgtcagccagtcgcagggccggccacaagacccatgtctccatctggtcatactccatagctaccaagttaacctgctctaaactttggagaactggatctgtccaataaacgcttatttggccaagcctgatggctcgtgcctgtactcccagcactttgggaggctgaggtgggagggttgcttgagcccaggggtttgagaccagcttgggcaacaacaacaaaaatgccaggtgtggtggggtgcacctgtagtcccagctactagggaggctgagccaggaggatcacttgagcccgggaggttgaggctgcagtggggggtcataatcatgccactgtactccagcctgggtgacagagtgagaccctgtctccgaaaaaaaaaaaaaaaaaaagaacggaaaaagaaatgcttacattgtcagggatcctgtagacaatcattaactctatgagatgcttggttctatttttttgggagactttgtccaagtgttttggcttaagaaatccataggcctctcttggtgacacatctctagtactttttgtcataaacaaacaggccatctgccgccaaatacatccactccccatgccactgacatcctatgggtcagccaggcttgctttgactgaggccgaggcatctggaactttctctgcctgcaggggctagcagcagaggcttcaccgcatcaccaccccttcctccactcctgacattctttcccttcagggatccaaaatggttggccgagctcccagtgggaaaacgtgtgctagagttggggagtgagatgagtggtgctgtccatggaatcaggccacagcaggaactgccccactggccatttgagacacacacaggtggtaaatgctctgctggtgggctgtgcttccctcattcagagagctctgttacagcccactgtgtcctttagaagcttgaaaggaacccaactctttgctgcactgtcctttttcttcctcaaattcagaccctccttccaccggcacccccctactccaccctcagctcttccttgcctggtttatcaagcagagctgaggccccacgtttccaactctgattgtcacttgcatcttcacaaaggataaaccacggagcaactggaaaaccatcagccaagcgttcggatgagtctggttattggtccacccccgaccagattcccttacacttaactcacttctttctttggcaatgaccctcatgacatgtataaatgggtatgactaagaagaggctgtgatctaacatttatttgctgccattttttactctggggagaagcagccccaactcatcactgggaaagaactccccctgcaaaccagctaaatttgataatttaaaccccctgcccctaaaacttctcacagagctggggagttggtggcaactttccaagtcaaggtcttgcttagaaagtccttcactacatggccaggtgcagtggctcacgcctgtagtcccaggtacttgggagcctgaggcaggaggattgcttgagctcaggagttcaaggctgcagagagctatgatcatcccactgcatttgtttaaaaataaatttttaaaatttgtgtgttttatcaggggtctcctgtacagtgtatctgtgtatgtttgtgtgtgtgtttgtatacagccttgtttaatgttttgagcaataagatatgcacacacaggtattttgttgctaaagagattggacaaggttgtagctgtgctcaggcttcagcttggtttgttaaattgagagataaacaatgacaagagctgccagccaaccacactattcaaaaagcaaagtgttcaccactaaagctaaccattcatctggttgcaggcaaggctaaggctctctctcctctagttcctggaacagactcacagattggcatgaagcactgatcaggggctgcactcagactccctggccaagcaaacctacaccagaagagtcagtgtcacagatatgatgcggccaatctctgtctccaaaaacctacctgaacttaatggtagaattcaaagatctggggactgagggcacccagccttctaaaacacaatgtattcatgtgtttagtgtaaactctctgcatggattctcagtgttaataataaaaggaagcattcttttacaactcctgctgtgtgcaaaagaaagtgcaaaggatttggagtggcattccgaagatcaccacacataccttggttctgatggctgctgaactccgacttcttcgctgagacatgactgtgggaacagcctccagctatctgctcatcagaggtgctttcctcaacctcctgcaccacctccaagagaaacagcctaaaaagaaaccccagctgtttacttatattggtctgtaaatccctggaagtaaaccccatgcatttttatctactgtctgaggacatacaataaatctgagaaagtctatgctgtc

SEQ ID NO: 7270 - DNA, 1737 bp, Homo sapiens
gaggcaggggccacacggcgggaggaagggctctgagcccaggggaggggagggagcgaggggctcacacctgacatgtattcgcctccagggggcgctgtctccctcctttcagatgcctttgctcaaagcttggggtttctttggtgttaccatcccagctcccgggaggcccttaagccccagctgtcggtttttacctgcctgttgtggatggatgggggatacccacctttctgaagtgtcccctttctcccatcttaaggggctctcctccctcaccctcctagagaaaaggtgcacttccttaactctttctactcggggccctaagtgacggtcctaagtgggatggctctccttctcccaagctgcagtactggggaagggctgggcgcttttcctggaaagggaggccacagattctttcccatgggggctctcttccccagaccccagatccaaggtccctcaccctgcctgccccttcctcccagcttcctggcagcatcgtctggtcggtgaaagccatagcatggacaccccatggggagcttgtcttggggagggttctgggtggaagctggcaggcatacagcaccctctaccctccgtggccatggcaacgtccagggcccagaaccctgaggagtgagcggccgagacgctgctccccaccccccacctccatgcctcagcctttgcctaccccaggaatgagcttggcctccaacatcccttgcctgctgccattagtagagggggcccctctgcatctgagccccccatccctgtgccacctgggtgtggagcccatggaacactctggtccgcctcattttaaaccaaaaaactgctccttcaccctcaccctgaggccccaggggagaggacccgtgggatggtgcccaggggttgccttgggacctcggatctcctctggggggcttggctgctgctgttgctgctctgtatttgcctctcgtgattctgtttgttacccatgttcacttcccccaggagaggccttggtaccccctctcccctggggcatccctttgccttggcatccctgtagcccagcaaccctgcccctccccagcatcccagctgggccagagagagccgagtgtgccaacaaggactggggcctgcccggctgcccgcctcagggatgggcacctcatgcctgtctcgccacctcctgtgccaatgtcccaccctccacctgggggtggggtgcagcttccacttactgattagaagacaccactgccctcccttcccccctccctgtctggtgtcctgtgcccccatctgtctgtctatatttgtctgtactcccctaggagaagtattttgccatatataaaaccactgtcctgtcctttgtggctgcctcccaagcctgcttctttgtcctcgccacatagtcgtcagcgtaggcacctgggagctgctgatatgcacggggagttgaaagggtgggtgcctgaagatgttgtgccctgagtcattgactcaaaagaaaagatgatcctttgattttggccctctgatgtattgtgcccaagccaggagctgcttgggcagtcccagctccacactggccctgagccccttcacttacctgtctctccacaagtagagccaaaggcaatgggaagctcaatgttgctcagtgggtgagatccagacccactggtgcaatgtcttaaatacacatgactgtttttc

SEQ ID NO: 7271 - DNA, 108 bp, Homo sapiens
tgggcgccctgcccgtcttccctcctgctctggggtcggaactggagtgcagggaacatggaggaggaagggaagagctttattttgtaaaaaaataagatgagcggc

SEQ ID NO: 7272 - DNA, 1755 bp, Homo sapiens
gaggagccaagggaacccagatgacacccttgcccatgcctggaccttgcttctggccagggaggggatcaggcccccttgtccactccatacccttcctccctctgtccctctcctaggtgccacttaccgtggcttaggagccttttgtactggggaagattttatttcttgggtggggtgccctgagtgggttgatcctctgggacttggcggggatggggtggggtgggagggaatgaggaagctacaggtaggtccacccaacgcccaggcaccccagtctacttgctgggctgagtccagccctggggaagattcctggggaatttatttgctgcttctcccagccttcccctgcccacaccacctgcgcatgcctggcacacccctctccccacagagcctctgcttgggtctatgtgtgtgtgaccgtgcatctgctcctttgcaagtggggtcttgggagcaggcctttttgtgtcctcggccctccacccttggtggggaggggacccaggaccataggaaggtcctgagtccacctcctggtctccacctctgtcattccgtcaattctcaggaaagttttgcaggaatctctcccgttacttgaaacctgggcggacagatgaggggaaggctgaggtccctggaaggtgtaacaaatcagagactatctgttcaagtagaaaacccaagagctggccaggtgtggtggctcatgcctgtaatcccagcactttgggaggctgaggtgggcagatcacctgaggtcaggagttcaagaccagcctggccaacatggtgaaaccccgtctctactaaaagtacgaaacttagccaggcatgatgggggtctgcctgtaatgccagctactccagaggctgaggcaagagaatcacttgaacccgggaggcggaggtttcagtgagccgagattgcaccattgcaccccagcctgggcaacagagcgagactccgtctcaaaaaaaaaaaaagaaagaaagaaaaggaaacccaagagctgcctggacacacggaaacccaactgagaacaaaatcctggcccgtgcttggtcaaagcaaacccatttcactgtcaggacccccggtcacacaggaaccacccgccaggggagcctgtgactgtcagttcctgtcccaggctttgcccggccgccccaggaacccaaccctctgggctgacctttctcctgcttctctccaggctctgcaggggacagggcaggtgctgcaggagcccctttgctggctttatctgctcccttgttctggacacagagccctgggaaaaagagggggtggaagacagacaaggaaggtggaatgttctgttttggccaccaggaaatggggtggggtgggcatacacagagaggacccctctcttaatacagctgcttttctcggtgccaacctccctcccccaagctcagatcctcctcttatgcccttgattgtgccagcccatgccacccccatcctgggcacagttacaccctcccatgcagtgggagaaacacagaccctcgtacccaaaggcccctgccccacttctcccccacaaagcggggtctcaagccacactgccctgtttgctgccatgaggcccccccccccagcaatatcccaggggcgggcccaatgcccactgtacatgaggctgcatgatgggtctggggccttgctgattccccagacccctaattaaatgtttcttgtcccagccc

SEQ ID NO: 7273 - DNA, 872 bp, Homo sapiens
caatggaggtggtcaaccttggcgaactgagtatttaatgacacttctagagctaccgtggagtctctccagtggaagcaaccccagtgttctgagcaagggttacaaagtgagggagggcagtgtccagatccccagagccacacatacatacacatacacacccttacccccatccactctagctttgtgaccatgggactgaagtttgtgatggcttttttatcaagtagattggtaaaatttaaccattcctgttgaggtgcccataagaaaatcataggccaagatagggaggggcattccagcaaaccccgtgttaatgctactgtggtttttaaatttttgtctaggggtttctttggggattttagaacagcatctgctgtcctccggggtcaagaaaagcatggaaagacaatatatgatgtacccagggaccagaaagaaaatttctttgcatcttagaaatggtagacattcattgtgactaaagagcttctatgcttccttgtttccatgccaacatgctgagcatgctcacaaagaaggctcgtccattcctcctgtgttttagtatttggcccagaggtttcctaaatggttgccttgaaatcactgtggtccaaatgtaattcttacacactcaaattatcactgtctgtagcacacttgtgcacctgtcttacattctctgttgctcccccccacactcttgctcagtctgtcacctgttcagtctgcttactcactcaattgttacccttttgctgttgtcgtgtttacagtttgcattttgaatgattagttgggattaccaaacattttttaaaaagatattatcaataaatatttttttaattctaaatttt

SEQ ID NO: 7274 - DNA, 3190 bp, Homo sapiens
gaaccttatttcctaaaagaaacagggccagaggaaaaaaaactattgataagtttataggcaaaccaccataaggggtgagtcagacaggtctgatttggttaagaatcctaaatggcatggctttgacatcaagctgggtgaattagaaaggcatatccagaccctattaaagaaaccacagggtttgattctggttaccaggaagtcttctttgttcctgtgccagaaagaaagttaaaatacttgcttaagaaagggaggggggtgggaggggtgtagggagagggaagggagggaaacagttttgtgggaaatattcatatatattttcttctccctttttccatttttaggccatgttttaaactcattttagtgcatgtatatgaagggctgggcagaaaatgaaaaagcaatacattccttgatgcatttgcatgaaggttgttcaactttgtttgaggtagttgtccgtttgagtcatgggcaaatgaaggactttggtcattttggacacttaagtaatgtttggtgtctgtttcttaggagtgactgggggagggaagattattttagctatttatttgtaatattttaaccctttatctgtttgtttttatacagtgtttcgttctaaatctatgaggtttagggttcaaaatgatggaaggccgaagagcaaggcttatatggtggtagggagcttatagcttgtgctaatactgtagcatcaagcccaagcaaattagtcagagcccgcctttagagttaaatataatagaaaaaccaaaatgatatttttattttaggagggtttaaatagggttcagagatcataggaatattaggagttacctctctgtggaggtattgacttgtaatctcattttcctttcaaaaaaaaaaaaaaaagctaaggtggcttgttgggatgtaaacatgttttcagatgcagtaaggtttagtgtaggacagccttcctgacccagtggcatgaaaaccattacaggattaatagttctcctacttccacaatgtgccaaaagtctgcatcccagcattttgtttgcaggagaactgatgccattcctaagagctggactcactgtttctcttcatcacaaggagaaggagtccaaactttaatcactccactgtatgctccctgagataaaacagtaaaaaatccgcagccatagttcacttaaaacaatttcaagctcacttttgaagtaatgggggcctggaatgctaggtgagcatgaagataaacccttgctactatgtagcaacccaattggacctttttggagaaataggtctgagtctggattctgggggacatcaataagagcccttcacataaaaatatagaaatccaggagactgtttcgagtgcaacagaagttctcagtatttggagggtcctctcaaaaattctgcggccttactttgatattgacacctgcactgtgccattcctgattattccattcaggatctgtatcagcgggatggggcatggtccccagcacaactcttctgggttaaaaaaaaaaagccaggtgattcctttgtgtgttatgtcgtaagtggagtgacttcatcatatatggaagaagatttctatattcagctttttctgcaggttggagtcagcatagagttggaaaatcagctttggctttctttcctgtctcatttcctctagtgttctcctttttattgtcatcagctctcaacaactctgccacttttgtgtcccaaggtaataagatgtaggaaacaaaacattgtaaagtggagcaagaaaagttatcaattaaccacatcagagtcaaatgtcttgggtgacactaaggaggatatgggcaggtgataccagagtgctttatcttgtgatgttgatacagtagcagcctctcagacattcagccaggttggatttctcatgagtttgtcacctagttttgaatcctatcccgttggtttctgcaggaaaaaaaaaaaaatttatgtggtttttaaaatttgttctgagtggggagaatcttagggggaatgtactgaatagtatcatgggctcagctcccccatgcagggccaacaaataccaaaatgagtaaactgggaagcttttctctctttctgtcttcatcccagatcaaagaatcccgagttaggatctggatgaaggataagcccctgaattgtcgatgggctcacccccacactgacccagcatctgaacttgcttaacagggagccggggctaaactgcttcaccctgcctgagaaccagggagcactgcatttctccacagggtggaggagaagaggcagaataaaccaagcctgggacacctccctcctgtctaggtgtactcattcttctgtttcaaaagaaggcaaggacatgaagtcaacttctacctatcttctgctgctggtgtcttatgtattctcagtttgacctgattcctcttctgtcttttgacttaacattaggggttcttggtcataacctgctctgatgtacataaagatttcaggttcaatatcaatgtgtcttaaaacagaagtattttagcgggtggggggtggggtggtggggacaaacaacgcaggatataattgccaaaaccaggcttgaggttggtgactcttgaaagattttctttcttcaggcctagatcagaaaattaagtgcagcaatatcatgaattctcagaagccctttcagggagccagtgagtcatacagtatccacagttgagtcacttaaagatgtcagtatacgaaacattattcacaatccttgggcaatctcatttttttttccttctcccctcctcccctgccccccatacatttctatccttgagttagttttggaggggcaggaagtacttaacatctcagaagctagattgggaaacatgctcagctataagaactgagctttaaattttgagtttaaaaatgtacatcaggagcagctggggagggtctttttttaaaaaaatctttcaaatttggttttctgtgcatatggccgttttgtaaatactttggggtttttcatttttttgaaagtagatgaaatctgttgtgggatttttttcccgaaacattacaaaataacctgtttatttacatgcaaataaacttctttgataaaaagtaa

SEQ ID NO: 7275 - DNA, 1682 bp, Homo sapiens
gacttcgcgccggctcccttctttttcttttgcctttgcccgcccccctgtccccagcccccagagcgcagggacacccccatcctaccccggcgccgggcgcggggagcgggccaccggtcctgccgctctcctggggcagcgcagtcctgttacctgtgggtggcctgtcccaggggcctcgcttcccccaggggactcgccttctctctccccaaggggttccctcctcctctctcccaaggagtgcttctccagggacctctctccgggggctccctggaggcacccctcccccattcccaatatcttcgctgaggtttcctcctccccctcctccctgcaggcccaaggcgttggtaagggggcagctgagcaatggaacgcgtttccccctctcattattattttaaaaacagacacccagctgccgaggcaaaaaggagccaggcgctccctctttcttgaagagggtagaagttagggcgccggagcccgggcctggaacgccctcacccccaacctccagtctccgcgttttgcgattttaattttggcgggaggggaagtggattgagaggaaagagagaggccaagacaatttgtaactagaatccgtttttcccttttcctttttttaaacaaacaaacatacaaaaaaaaaaaaaaaaaaaaaaaaaaaaaaaaaaaaaaaagctaagaggcgacggaagccgaacgcagagtccggatcggagagaaaacgcagtaaggacttttagaagcaataaaaggcaaaaaaaacaaaaaacaaaaaaacaaacaaaaaaaaaccactactaccaataatcaaagacacaaatatctatgcaaggaggctccactgagcctcgcggcccggcccggccccgggatgccccgcccggcctgcgggccgccccgcccgagcgcggatctgtgcactttggtgaagtgggggcccgcgccgccccctccccctccccaggttcttacaatcagtgactcggagatttggggccccagtgccactgccctcccccgccccgtccccgttgtgcgtcatgctgttttttaaaaacctgtttccaaatttgtatggaatggcaaactgttggggggtcggtttggggagggagggtttgcatgaaagacacacgcacaccacaccgcacgcacaagcaggcccggcgccggcgtccggggggcagaaggaggtgagctcgccggctcctcctccccgcggccattctgtcccctcctggggtgaggggtggggatggagacctgggggcagccccacccctgcccggactgtgcctcggtgggtgccacctggcgatttccggtgtctggagagagtattttttggtccaaggagtcctcttggctttagctggtgggtgggcggggagaggtctgagggctcctactggaggttcccccaaaaaggggcaaaaggagaccctctgcccaccggaggcaggggatcaggcatccaaatacacgatgcaaaaatgcaatcccacaggcgacacacccacacactcacccacacacacgcaattttaccttcctcttgtagcgaagatgaaactcccgtcggacacccgaagtgcattgcgtgtttctgttcagtttaatgacgattaataaatatttatgtaaatgagatgcaaagccgg

SEQ ID NO: 7276 - DNA, 1680 bp, Homo sapiens
agaccttggagcgagtctgccccagtggggatcctgcccccgccctgctggcctcccttctcccctcaacccttgagatgattttctcttttcaacttcttgaacttggacatgaaggatgtgggcccagaatcatgtggccagcccaccccctgttggccctcaccagccttggagtctgttctagggaaggcctcccagcatctgggactcgagagtgggcagcccctctacctcctggagctgaactggggtggaactgagtgtgctcttagctctaccgggaggacagctgcctgtttcctccccatcagcctcctccccacatccccagctgcctggctgggtcctgaagccctctgtctacctgggagaccagggaccacaggccttagggatacagggggtccccttctgttaccaccccccaccctcctccaggacaccactaggtggtgctggatgcttgttctttggccagccaaggttcacggcgattctccccatgggatcttgagggaccaagctgctgggattgggaaggagtttcaccctgaccattgccctagccaggttcccaggaggcctcaccatactccctttcagggccagggctccagcaagcccagggcaaggatcctgtgctgctgtctggttgagagcctgccaccgtgtgtcgggagtgtgggccaggctgagtgcataggtgacagggccgtgagcatgggcctgggtgtgtgtgagctcaggcctaggtgcgcagtgtggagacgggtgttgtcggggaagaggtgtggcttcaaagtgtgtgtgtgcagggggtgggtgtgttagcgtgggttaggggaacgtgtgtgcgcgtgctggtgggcatgtgagatgagtgactgccggtgaatgtgtccacagttgagaggttggagcaggatgagggaatcctgtcaccatcaataatcacttgtggagcgccagctctgcccaaggcgccacctgggcggacagccaggagctctccatggccaggctgcctgtgtgcatgttccctgtctggtgcccctttgcccgcctcctgcaaacctcacagggtccccacacaacagtgccctccagaagcagcccctcggaggcagaggaaggaaaatggggatggctggggctctctccatcctccttttctccttgccttcgcatggctggccttcccctccaaaacctccattcccctgctgccagcccctttgccatagcctgattttggggaggaggaaggggcgatttgagggagaaggggagaaagcttatggctgggtctggtttcttcccttcccagagggtcttactgttccagggtggccccagggcaggcaggggccacactatgcctgcgccctggtaaaggtgacccctgccatttaccagcagccctggcatgttcctgccccacaggaatagaatggagggagctccagaaactttccatcccaaaggcagtctccgtggttgaagcagactggatttttgctctgcccctgaccccttgtccctctttgagggaggggagctatgctaggactccaacctcagggactcgggtggcctgcgctagcttcttttgatactgaaaacttttaaggtgggagggtggcaagggatgtgcttaataaatcaattccaagcctc

SEQ ID NO: 7277 - DNA, 364 bp, Homo sapiens
ctgcacaggactctgggttcctgctctgttctggggtccaaaccttggtctccctttggtcctgctgggagctccccctgcctctttcccctacttagctccttagcaaagagaccctggcctccactttgccctttgggtacaaagaaggaatagaagattccgtggccttgggggcaggagagagacactctccatgaacacttctccagccacctcatacccccttcccagggtaagtgcccacgaaagcccagtccactcttcgcctcggtaatacctgtctgatgccacagattttatttattctcccctaacccagggcaatgtcagctattggcagtaaagtggcgctacaaacact

SEQ ID NO: 7278 - DNA, 842 bp, Homo sapiens
atatctggtctcagggattgctcctatgtattcagcatcgtttctaaaaaccaatgacctcgcctaacagattgctctcaaaacatactcagttccaaacttcttttcataccatttttagctgtgttcacaggggtagccagggaaacactgtcttccttcagaaattattcgcaggtctagcatattattacttttgtgaaacctttgttttcccatcagggacttgaattttatggaatttaaaagccaaaaaggtatttggtcattatcttctacagcagtggaatgagtggtcccggagatgtgctatatgaaacattctttctgagatatatcaaccacacgtggaaaagcctttcagtcatacatgcaaatccacaaagaggaagagctgaccagctgaccttgctgggaagcctcacccttctgcccttcacaggctgaagggttaagatctaatctccctaatctaaatgacagtctaagagtaagtaaaagaacagccataaaataagtatctgttacgagtaactgaagaccccattctccaagcatcagatccatttcctatcacaacatttttaaaaaatgtcatctgatggcacttctgcttctgtcctttaccttcccatctccagtgaaaagctgagctgctttgggctaaaccagttgtctatagaagaaaatctatgccagaagaactcatggttttaaatatagaccatcatcgaaactccagaaatttatccactgtggatgatgacatcgctttcctttggtcaaggttggcagagcaagggtataaagggggaaattgtttggcagcaccaacagaaaac

SEQ ID NO: 7279 - DNA, 215 bp, Homo sapiens
ctacaaaagccctttctccccacaagcctctgggttttccctttaccagtctgtcctcactgccatcgccactaccatcctgtcaccagtgggacctctttaaaacaagcagccaaccattctttgatgtatcccattcgctccatgttaacatccaaaaccagcctggatttcatacatggacttctgattaaaagtggcaggttgtgcatgtt

SEQ ID NO: 7280 - DNA, 1507 bp, Homo sapiens
gagtgcagccccttcccctgcccagggtggcaggggaggggtagggtaaaaggcatgtgctgcaacactgaagacagaaagaagaagcctctggacactgccagagatgggggttgagcctctggcctaatttcccccctcgcttcccccagtagccaacttggagtagcttgtagtggggttggggtaggccccctgggctctgaccttttctgaattttttgatcttttccttttgctttttgaatagagactccatggagttggtcatggaatgggctgggctcctgggctgaacatggaccacgcagttgcgacaggaggccaggggaaaaacccctgctcacttgtttgccctcaggcagccaaagcactttaacccctgcatagggagcagagggcggtacggcttctggattgtttcactgtgattcctaggttttttcgatgccacgcagtgtgtgcttttgtgtatggaagcaagtgtgggatgggtctttgcctttctgggtagggagctgtctaatccaagtcccaggcttttggcagcttctctgcaacccaccgtgggtcctggttgggagtggggagggtcaggttggggaaagatggggtagagtgtagatggcttggttccagaggtgagggggccagggctgctgccatcctggcctggtggaggttggggagctgtaggagagctagtgagtcgagacttagaagaatggggccacatagcagcagaggactggtgtaagggagggaggggtagggacagaagctagacccaatctcctttgggatgtgggcagggagggaagcaggcttggagggttaatttacccacagaatgtgatagtaataggggagggaggctgctgtgggtttaactcctgggttggctgttgggtagacaggtggggaaaaggcccgtgagtcattgtaagcacaggtccaacttggccctgactcctgcgggggtatggggaagctgtgacagaaacgatgggtgctgtggtcctctgcaggccctcaccccttaacttcctcatacagactggcactgggcagggcctctcatgtggcagccacatgtggcgttgtgaggccaccccatgtggggtctgtggtgagagtcctgtaggatccctgctcaagcagcacagaggaaggggcaagacgtggcctgtaggcactgtctcagcctgcagagaagaaagtgaggccgggagcctgagcctgggctggagccttctcccctccccagttggactaggggcagtgttaattttgaaaaggtgtgggtccctgtgtcctcttccaggggtccaagggaacgggagaggtcactgggcctgttttctccctcctgaccctgcatctcccaccccgtgtatcatagggaactttcaccttaaaatctttctaagcaaagtgtgaataggatttttactccctttgtacagtattctgagaaacgcaaataaaagggcaacatgtttctgtt

SEQ ID NO: 7281 - DNA, 431 bp, Homo sapiens
ggggcttggcatggccgcagtgggggctggggactggcgcagccccaggcgcctccaagggaagcagtgaggaaagatgaggcatcgtgcctcacatccgctccacatggtgcaagagcctctagcggcttccagttccccgctcctgactcctgacctccaggatgtctcccggtttcttctttcaaaatttcctctccatctgctggcacctgaggagagtgagcagcctggaccacaagcccagtggtcacccctgtgtgcgcccgccccagcccaggagtagtcttacctctgaggaactttctagatgcaaagtgtgtatgtgtgtgtgtgtgtgtgtgtgtgtgtgtttgtgtgtattttgtaatatgtgagggaaatctaccttcgttcatgtataaataaagctcctcgtggctccctttgtg

SEQ ID NO: 7282 - DNA, 295 bp, Homo sapiens
cccgcccggccggccttctgccgctgcccccttgtacagaatcgaactctgcacttctctctcctttacgagacgaaaaggaaaagcaaaccagaatcttatttatattgttataaaatattccaagatgagcctctggccccctgagccttcttgtaaatacctgcctccctcccccatcaccgaacttcccctcctcccctatttaaaccactctgtctcccccacaaccctcccctggccctctgatttgttctgttcctgtctcaaatccaatagttcacagctgagctgg

SEQ ID NO: 7283 - DNA, 2278 bp, Homo sapiens
gggcgggcaccgcctcgcgcggactggacggcgagggccggaccccgccacctccgcccgcaccgcagaagccggaagctgcttccaccagagctgtcgcgggacctgccccggcaggagacgcgttgtggggacggcccgcgggcggcatcgcacttgcctcgtactgcctcccagtggctgccggcggcacctggggcaggccgggctgggggcggagaatgaactcaggcaggtcctggatgccaccacccaggtggaaaggaaggagaccaggaccctgagagagagtggacccgagggggagaacagagcggaaggtggagagtggttgttttactggggacaaaaacaactgtgatgccagcattctcaggcactctctgtgttcagagagagagtggtccccctgtgggctctctgcgagtgtgcatacacggacacataagcactgtgagctgtgtgcacgcgcacctgtacaccctgtgtgagcgctgtgcatgtgcgcgcatgtgtacaccctgcgtgaggcccacttgtgcacacagacacacgtaaccctcccgggtgagctgtgtgcacatgcacacagaaacatatgccccttgagagctgtgtactcacatccctgtgagctttgtgtgagtgcattgtgcacacacgcacatgtccattctgtgtgggctgcgtgtgcacacctgtacacagaaacatccttgtgcgctatgtgtgcatgtgtacatccggcgtgacctctgtgtgtgcacgcgtgtgtgtgtgatctctgatatgcactgcgggggtggccaggatccgatgccagctgcagccacaatggctccctccctaccaccctaacccagcccacctgccagggcatcacaggaggtctgtccccccctcccaagagaccccgcccagggagggaagaggaggagaggctccctttccccgggcaggcctcaatcctcgggagcctatgagcaacatcctcacagtaccccttgtggcgaggcgggggctgggcgctttcatggaggtggggtgggggtgggcggcgggccagagggcaacccagacgtgtgttatgcctccctcctccatcttcatcctccccgccgctactgctcccccaggctataaacgggaaagtcccttctgtcctcaggagaaagctcccaaaacacacgcgctcccggccctgccttcccttccaaccacccccttcttcctacttgcgggcattcgaagagctgctgcctatgcagcgcatccccctcctgtgtctcccctcccgtctgccctcccccttcaccagccagtgggctgctctccataagatcacccaggacctaagcgagaaatccaggggccgtcatcggactgcaccttgcgggcctcaccgcatcctgcctaccaggctgtgcgttccccgccatcaccccaccctgtccttctgagttcctggcgtctttctcagctctcctgtgccccacacagcagtgggaggtgtttctgaatagcgccccccacttaaacccgggactgagggcagcacccctgccctcagggtgagtcaagcgccttcacaaagcttccttctgaagccctgcccctgtcaggccttcgactccacagcaccggcttccaggtgtgctcagaaccatagggaattttctcttctaacaagcaccagacctgcttgctgccaagcgtttgaacgtgctgttcctttgcccagagtagccgctgcttcctgcagccttctcctcccctagctaatgcccacccacctattgttgtcacttgggaagaaaacagacaccttcaaggagagggctcccctggtagcccccaccccaagacagagctggatgcccctcgcttccgtagggaaagcacttctcctgcaggatggcattgctctctccccttccatggcacgtagtatgtgctcagtaaatatgtgttggatgagaaactgaaggtgtccccaggcctacaccactgccatgcccgaacactatccatgctatggtgggcaccatctctctgatgacagttctgtgtccacaacccagacccctccacacaaacccagatggggctgtgccgctgttttccagatgtattcattcaacaaatatttgtagggtacctactgtgtgtcagaagatgttcaagatcagcatcatccgatggaaatagcatatgagccatgtatgtagtttcaagtttttcattagccacattaaaaaagtaaaaggaaacaaatgaa

SEQ ID NO: 7284 - DNA, 973 bp, Homo sapiens
aatgtgaggcgattattttaagtaattatcttaccaagcccaagactggttttaaagttacctgaagctcttaacttcctcccctctgaatttagtttggggaaggtgtttttagtacaagacatcaaagtgaagtaaagcccaagtgttctttagctttttataatactgtctaaatagtgaccatctcatgggcattgttttcttctctgctttgtctgtgttttgagtctgctttcttttgtctttaaaacctgatttttaagttcttctgaactgtagaaatagctatctgatcacttcagcgtaaagcagtgtgtttattaaccatccactaagctaaaactagagcagtttgatttaaaagtgtcactcttcctccttttctactttcagtagatatgagatagagcataattatctgttttatcttagttttatacataatttaccatcagatagaactttatggttctagtacagatactctactacactcagcctcttatgtgccaagtttttctttaagcaatgagaaattgctcatgttcttcatcttctcaaatcatcagaggccgaagaaaaacactttggctgtgtctataacttgacacagtcaatagaatgaagaaaattagagtagttatgtgattatttcagctcttgacctgtcccctctggctgcctctgagtctgaatctcccaaagagagaaaccaatttctaagaggactggattgcagaagactcggggacaacatttgatccaagatcttaaatgttatattgataaccatgctcagcaatgagctattagattcattttgggaaatctccataatttcaatttgtaaactttgttaagacctgtctacattgttatatgtgtgtgacttgagtaatgttatcaacgtttttgtaaatatttactatgtttttctattagctaaattccaacaattttgtactttaat

SEQ ID NO: 7285 - DNA, 1740 bp, Homo sapiens
gggagagactgcctgtgcacctaaccaacacctccaggggctcgctaaggagcccccctccaccccctgaatgggtgtggcttgtggccatattgacagaccaatctatgggactagggggattggcatcaagttgacacccttgaacctgctatggccttcagcagtcaccatcatccagaccccccgggcctcagtttcctcaatcatagaagaagaccaatagacaagatcagctgttcttagatgctggtgggcatttgaacatgctcctccatgattctgaagcatgcacacctctgaagacccctgcatgaaaataacctccaaggaccctctgaccccatcgacctgggccctgcccacacaacagtctgagcaagagacctgcagcccctgtttcgtggcagacagcaggtgcctggcggtgacccacggggctcctggcttgcagctggtgatggtcaagaactgactacaaaacaggaatggatagactctatttccttccatatctgttcctctgttccttttcccactttctgggtggctttttgggtccacccagccaggatgctgcaggccaagctgggtgtggtatttagggcagctcagcagggggaacttgtccccatggtcagaggagacccagctgtcctgcacccccttgcagatgagtatcaccccatcttttctttccacttggtttttatttttatttttttttgagacagagtctcactgtcacccaggctgaactgcagtggtgtgatctaggctcactgcaacctccacctcccaggttcaagcaattatcctgcctcaggctcccaagtagctgggattacaggcatgtgcaactcacccagctaattttgtatttttagtagagacagggtttcaccatgttggccaggctggtcttgaactcctgaccgcaggtaatccacctgcttcggcctcccaaagtgctgggattacaggcgcaagccacccagcccagcttctttccattccttgataggcgagtattccaaagctggtatcgtagctgccctaatgttgcatattaggcggcgggggcagagataagggccatctctctgtgattctgcctcagctcctgtcttgctgagccctcccccaacccacgctccaacacacacacacacacacacacacacacacacacacacacacacacacacacacacacacgcccctctactgctatgtggcttcaaccagcctcacagccacacgggggaagcagagagtcaagaatgcaaagaggccgcttccctaagaggcttggaggagctgggctctatcccacacccacccccaccccacccccacccagcctccagaagctggaaccatttctcccgcaggcctgagttcctaaggaaaccaccctaccggggtggaagggagggtcagggaagaaacccactcttgctctacgaggagcaagtgcctgccccctcccagcagccagccctgccaaagttgcattatctttggccaaggctgggcctgacggttatgatttcagccctgggcctgcaggagaggctgagaccagcccacccagccagtggtcgagcactgccccgccgccaaagtctgcagaatgtgagatgaggttctcaaggtcacaggccccagtcccagcctgggggctggcagaggcccccatatactctgctacagctcctatcatgaaaaataaaatgt

SEQ ID NO: 7286 - DNA, 970 bp, Homo sapiens
gcgactcttctgcctggactagagggacctctcccagggtccctggggtggggatagggagcagatgcaatgactcaggacatccccccgccaaaagctgctcagggaaaagcagctctcccctcagagtgcaagcccctgctccagaagatagcttcaccccaatcccagctacctcaaccaatgccaaaaaaagacagggctgataagctaacaccagacagacaacactgggaaacagaggctattgtcccctaaaccaaaaactgaaagtgaaagtccagaaactgttcccacctgctggagtgaaggggccaaggagggtgagtgcaaggggcgtgggagtggcctgaagagtcctctgaatgaaccttctggcctcccacagactcaaatgctcagaccagctcttccgaaaaccaggccttatctccaagaccagagatagtggggagacttcttggcttggtgaggaaaagcggacatcagctggtcaaacaaactctctgaacccctccctccatcgttttcttcactgtcctccaagccagcgggaatggcagctgccacgccgccctaaaagcacactcatcccctcacttgccgcgtcgccctcccaggctctcaacaggggagagtgtggtgtttcctgcaggccaggccagctgcctccgcgtgatcaaagccacactctgggctccagagtggggatgacatgcactcagctcttggctccactgggatgggaggagaggacaagggaaatgtcaggggcggggagggtgacagtggccgcccaaggcccacgagcttgttctttgttctttgtcacagggactgaaaacctctcctcatgttctgctttcgattcgttaagagagcaacattttacccacacacagataaagttttcccttgaggaaacaacagctttaaaagaaaaagaaaaaaaaagtctttggtaaatggc

SEQ ID NO: 7287 - DNA, 1055 bp, Homo sapiens
gtgttgccttgttttgtgtgttctaaatactttttttaatgaaaaaatgttttttggttttaatggtgttacgtggtttgtgtattaattttttttcttgtccatatcacaccaccaaaggcttttggaccatttagcatcatgagcctaatggctcagtcagtcacctttcttaagtgttgtgaagatggctcttttctttggatcttgtttctagccctcaactgctgaaagcctcagaatttagattaattgagaaaacacccacctcttttagagaattatcctttgatgctgcagaatctactcttacaatgccttcctacagctcactggggtgcttaccaaagccatagctttaaaccttcccagtccccatcagtagcttcctgaaagtctcctctcttgtttacttctgcaaagggtagcttcttaaaaacgtgatcatgtatgagtatgtatttgttcacttacccttttttacttttaatcaatgtcagataccaagagttgtgttaagctgagtgtagtgtgtaactaactacacttggatcttactgatccagaaatagtccccatagttagagtagttacttatgaagtggttattaaagtgaacacagcacatatacattatctatactgctttttgttatgattaatactgggtatgttctggtaaatccatccttattgtatagaaaaaaaattacttttttaccaggttttccaaagacagaatagatcacaaagctcaaggaatttaatattcttgtaatggactagataattcaaactgattagcccattccagaagaaaaacagctgggaattaagttaatccacttgaaattgttttacaataatcagaacatccaaacctcaaggctcaggatcccatagaccagagcccacctttttgataaacttagtaaagtcttggagactagaagcaagatagtttgtgacacataagcttcccaaaaactagaatagatttttactgaatagtggtatatctgatggtatatgtttcttaaaggtccaaatgtaat

SEQ ID NO: 7288 - DNA, 782 bp, Homo sapiens
tccaaagatagtatttgacttgattggaaaatgttaggatggaccaaggtgggccataccaactccctctgtcccaaaatgtaagttattacgtatgtatggaaaatgttatgatcaatatgtggttctcttcagaagaaaaaaacaataaaggacatttctctgaatctaattatggagatagacatatatatatatatatgaatgagagggagtagcttaaaaataaaatcacaaatccagtacagtctctttctttatattctcccaatagtcttctttttcccttgaaacttcatcagagactgtaagcattaacctggtttagtaaagtctttgtaatttttttcaatggctgaatacgctaaggaaaaaagaattgtttgaataggattgtgttaagagtcacactgagttattcaccattattccatgactggttaaacctacaatgtttgttctatttttcaaaaagagcaattataaacaagtttttaaagggggactcactattcacctaatgaggattcttctttttgagataaatcatttgtatactgagaaaaatgagttattttccatgagaaattctgagcaaactatagaacacaccccagggctaatttgagataagtacaattaagttaatctacatatatctaaaaggttttttttgtaataagtatctgatttccggaagatttactttactcaaggaactttaaaggttgtatcccccaccaaaaaaagaaaaaaaatcagaaggccaactgcgcaaacaa

SEQ ID NO: 7289 - DNA, 244 bp, Homo sapiens
ggaacttccagatcaacaaaagtgtctttcaaagaaaaaaaaatcaagaaggacacaagcgaagaaatggcatcaatctaggcatctttctggataatttcaggaaaagcttcagtccagaaatggatgactagccaacttttctgcatcttcttatttcctcattagaatgctcttgaaatagctgaattaacaactttgctttaattgtttctatgcttcaataaatttacttttgcaagtt

SEQ ID NO: 7290 - DNA, 255 bp, Homo sapiens
tttgagatgcaacagagaacgtatgccacatagcccctgcgaagaaaaggcattatgtatctgtccagaaaaatgtgcatgtctaagaaaaatgtctaacctgttgtctttctgttactttctttctgggcaatcaatgacagcatctccccattcatctagaagaatgccacacacaaatatgactcatttgattatcctacagaaatctgttgtcaattctttgtattcaataaacctcttctttagcaagtt

SEQ ID NO: 7291 - DNA, 275 bp, Homo sapiens
tgaggaaaaagttatttggaaagaaagaaagaaagagagagagagagaaagaaagaaagaaaggctgcctttgcaaaaatcctactggtcaaataacctaaggaaattattcatttctgttcttaaaagggctagaatttgttctccttctcttccttttctcatgttctatgcatgtaatccttttccagagtagaaaaatcctgctctgtccctaatttttgtttttattttgggggccttttttgacatttcattaaaaattcttctattgc

SEQ ID NO: 7292 - DNA, 191 bp, Homo sapiens
actccagcctctgagacagaatggcccccaaattaaaataccaaaatgaagctagtttcctaaataagggtccccttatttttctgcttttcttccaatgaattaagacaagttatttttagaatagtaccatttctttggctttttctctatggtggtgtttcaataaaagttcttcctgttgcaagtca

SEQ ID NO: 7293 - DNA, 231 bp, Homo sapiens
ctgtcattttagagaaaagaataatttgggaaaggatcctgtacaattgcattattctaaatatcagagagaatatacacactttttacttttaaagatacattacttagcaaaaatacctgttttcttagttttacaggatattgagtgtttgtttccaataaataaaaaagttgatgtgcattcatttccattcactgatgactaataaataactatttgtgatttttt

SEQ ID NO: 7294 - DNA, 358 bp, Homo sapiens
caaaaccagagtaatcaagacaattattgaagaggtggcgcccgacggtagagttctttcatctatggttgaatcagaaaccaagaaacactactattaaactgcatcaagaggaaagagtctcccttcacacagaccattatttacagatgcatggaaaacaaagtctccaagaaaacacttctgtcttgatggtctatggaaatagaccttgaaaataaggtgtctacaaggtgttttgtggtttctgtatttcttcttttcactttaccagaaagtgttctttaatggaaagaaaaacaactttctgttctcatttactaatgaatttcaataaactttcttactgatgcaaact

SEQ ID NO: 7295 - DNA, 357 bp, Homo sapiens
aatttcacaagatctgccccatgattggttccttaggaacaagaaatttacaagtagaaattattcctttcagagtaacatgctgtattacttcaatccctatttttgtctgttccattttctttggattccctattcacattgaatcctttttgcccttctgaaacaatattcagtcacaagtcattttggtcatgttggtctttgtaacaaatcaaaattaccttatatccttctggacctggagtagtcttttaacgaactttcttctggtaacccggaatattttttaatcatagagctttaatcaagtagtattgttttaatagagttaattgtaataaaagatgaatggta

SEQ ID NO: 7296 - DNA, 418 bp, Homo sapiens
atagctaccagaaggagatgctgctgaggttttgaaagaaatttggctataatcttatctttgctccctgcaagaaatcagccataagaaagcactattaatactctgcagtgattagaaggggtggggtggcgggaatcctatttatcagactctgtaattgaatataaatgttttactcagaggagctgcaaattgcctgcaaaaatgaaatccagtgagcactagaatatttaaaacatcattactgccatctttatcatgaagcacatcaattacaagctgtagaccacctaatatcaatttgtaggtaatgttcctgaaaattgcaatacatttcaattatactaaacctcacaaagtagaggaatccatgtaaattgcaaataaaccactttctaattttttcctgtttctg

SEQ ID NO: 7297 - DNA, 289 bp, Homo sapiens
gaccaatgaaagtttccgcctgttgtaaaatctattttcccccaaggaaagtccttgcacagacaccagtgagtgagttctaaaagatacccttggaattatcagactcagaaacttttattttttttttctgtaacagtctcaccagacttctcataatgctcttaatatattgcacttttctaatcaaagtgcgagtttatgagggtaaagctctactttcctactgcagccttcagattctcatcattttgcatctattttgtagccaataaaactccgcactagc

SEQ ID NO: 7298 - DNA, 184 bp, Homo sapiens
catcccaaggtgatgaaaatgacccacatttatgaaacagaggccaatacatgctcctgccagagaggtttaagaaaactccccagtcccttaaggtacttagtttcttactactacagcgggtccccattgctaggtagaatatcttttattctgctccttccctaactcaccactgctaaca

SEQ ID NO: 7299 - DNA, 481 bp, Homo sapiens
atgttaaggacagcaggtagaggaatcaaagccagcagcatcctagaaaggagatggggcttcaaccagggacatccaaaccggaagcacaaatccaggaggctctcatatcctggaattgccctccaggtatcctcagtctttctgctttactatttcctctccttccggcttatttgtggtatactggaagcccataaagcattcttgctcatctccaaataaaacgtgttttattcctttagcgtggtaaatatagctctatggctgattactgttgatagaatattcattttatggcaaggaaatcatctaaacccataaccatagtttcaatgtacataaacccaggctgaaaatattttttaactcctcaaatacaaataaattaatgaacccatgagaaatgtcatatatcttagaaaatagttgtgtgtatctttctgaggaaaaatattaggaataaaatatgataaaatgt

SEQ ID NO: 7300 - DNA, 369 bp, Homo sapiens
tggatggctactttgctcagtgcctgagattgaaaaagtcaacatagaagctttagcattcacctatctcagtacctacaactaatgtactctgctttagaaattggaacaaggatggtactaccacaatcaccccctgcaaaaaaaaagagaccaagaaactttcaatgaccattcagctataaccaactgcagtttgaatcagtggatgcctatagcttcctgaagctgttcgattccttcatattaaagtgtctctttctgtgggtggtttgggaattctgttttcagtcttgggtggtatctttctgaaaattaaggaagttcttcatgattatcctaataaattttacatctctggcatagcac

SEQ ID NO: 7301 - DNA, 362 bp, Homo sapiens
tggatggctactttgctcagtgcccgacaacgaagaatccagaagctgtcccttcagtattcacttgcctcagtagtttgccagatgttaaggtagaccagatgacccagatatgaagaacttacctttggttttaatgggggaaaaaaagaaaagtattttttatggttatttagctgaaaaaccatttggttcctgtgggcaggtgaatgagttttattagcaaaatactgtttcaatctttaagacctcagattacatgttcttgatcatattgcttcctggctcttgtttcttgtactgggtattttcatagaagaaaatttcttggtgggttttccaataaactatatttctctggc

SEQ ID NO: 7302 - DNA, 254 bp, Homo sapiens
ccagccgagtctgcacaggttccgtgaggtggctgcccaatgtcctctgcaccatctgggcttcagcactcactactgcctacatcaaggctaaggccatcccaatccccggggccaagtcttgatgaatcttcttaattatttgcacatttgggtaccattggagacctcccttctgtcttttaggctatttcatcactctttgagaaataaccattttgaccatttgttaataaactttattctggcttagc

SEQ ID NO: 7303 - DNA, 602 bp, Homo sapiens
aagccagtttgcttattttcaattgcctaggtcacagtgtctctgaactgttcatcccttgaccacctctggaccactaacaagttctcagactttgcattgcttgtgatggagactactaagtatatgagctcacaattctatctgattccattctacaatgaataccttgacccttcactggggacacagaaatgctacaaagccacctgctgatcatcaatttgcttgggatatactatttctgatatttctgcaggattaaaaattactgacatgttgtggaatttatccatgagaactatccacaagtctaatgtttccatgctttataatctattttatcttgtttacctaaaattttttgcaacatcaaagacaccaaattatagccaagtgacattcctcaagtcaccagagagaatggaagctcatcacccaacattcagcttctaagaagtaggctggactttccacattttaacatctgatccatcccttggtttttggatcataatgatcttgcctgctggatatttcagttatatctgtgatacaatgtcttctgtcatttcttaataaatattatatactaggcaaag

SEQ ID NO: 7304 - DNA, 431 bp, Homo sapiens
aagccagtttgctgattttcaacttgaaatttccactttcagttccattcatgaacgaattatttcttcaagcacttatggacaacgaacaaattcttcaacctttctttgtctttcttatgggggttaccaaatattttggcctcagaattatctgattcctttcaattccagaaagaccttactcttctctctgaggacgccaaaatacaaatttgacccaagaaatgaaaaagccgatttaccttgaaactgagcctttgcaagcattgaagcccacgctctgagtctcagcgccgacgagaccatggaagagccatctgtccttctcaggacactcacttcctgtatcccaccgtcctgcaaattgcaccccctatgaaagaggaataatataccaaggtctaataaattttaactattggtgcaac

SEQ ID NO: 7305 - DNA, 305 bp, Homo sapiens
aaacctccttctgctggggatcctgataagatggcaccttaaaactagccaaattagaatcctaacaatcttctgaactccagtacctataactgggcttgcaacctctcatcacacagccacataaattccctaggaagtaaattcatttacaatggaagaccaaaaatttttcctagacctggttgtcagccaaagtcctacaatgtgaaaagagttagatactattttactataaatatcacctgaaatatttcaacagttattgggacttaaatttaataaaagttttcatctcttcaatg

SEQ ID NO: 7306 - DNA, 342 bp, Homo sapiens
gaccccaatgcccccacagagcaatacactgaagcctaaacatctatctggtgtttttaaaaagttaaaagaaaaatagattttttttcacaaggtgacaatagtgatttttaccatctggatacagcctggtgtaagcagacgtccattaccaccctcacccacattttcaggtgtctacatcagccttagtcattatggatagtaaatcgacctttaagaattcctggggtggactttgcaaacacattctacaacctgatggtttttactgctcaaactgtcaccatcatcttttgcaatgtgttgctcactgttgtcaataaactaatttttcctggc

SEQ ID NO: 7307 - DNA, 544 bp, Homo sapiens
gcccactgccctggctcatctctcccttcactgcaggcccacagttgtagaccattcttctgtgctgactattaggacacatggagtgggattgatgtcattcagcagggtggacttcatgtttccaatgagcccatcaccatcccactgactctgtgagaacattctggttcattttaaactccctcccttgctttctttctcttccagtcatggcaccaaatatgaaataatttgtaatccactagctaagaaattattccaatcctctaaattcctcattttttaaatcgttttgagcctacagaatatccttcccagtgaggtacacattatctccatttcaaacatattatttgtctgtcagcctttcagtcattcttttctcttggaaaggtaggaggctgcccctcccatgctctcctgctttctccctgttctctctttgtctctgtttgttcaagtttgccagaatttttctattttattggttctttatctttattgtgttcacaaaatatattgtattaaacttttcatttag

SEQ ID NO: 7308 - DNA, 424 bp, Homo sapiens
atctctgctgtgaacacaccacttccttattacgtcctttcctacagatgaaggctctcattgcaaacatgcggactgttcaagagaattgatctgggtcccataagcaaacctcatccttagaaattctgtatttgcattctaccttttgtccaaactcccttccttccaaaggaattcattgacaatctcctaataaattgacaaattgtcctccaacatcctcccacctctttgacttcaggacatttattcatcatgcctaaggaatttgaagattgcctccatcatttgtagggccacagatcttaaagcctccaaccttgaagtccagtgaagtctctctcttaaagtcttttgcaaacatttttgtaccttgttatttccatgtaccaaaataaacctctattctattggcactgaa

SEQ ID NO: 7309 - DNA, 296 bp, Homo sapiens
tgtctccttgtgatatttgtcatactatgaatgtcttcattagtcatttaaaatgcactgtagccagccagtcactggaaaaatgaacacttccctgccagtttgtctcatgtggcattcagagtggacattcagctcttctaggaaatgacagacaatcacattcattaaaatatgttatgccaggccccaatgcagttatttttagatgagcagtgtcttcattcgaaggggacactaactgtgatgatctcatataatattgttttcatgtattaataaacagccacttccct

SEQ ID NO: 7310 - DNA, 535 bp, Homo sapiens
cccatctgctggcaaaccacctgctacaggaccacctgctgccaccccagctattgcatttccagctgctgccagccttcctgcagtatctctagcagcagtagctcctcctgctgtggcttcagctgctgcaggctctcctgctgcatctccagttgctgccgccccaactgctgccagaccatgtgctgccgcccaacctgctctagtgcttcttgctgctgaggctgtcatctggactcaccagattctcatcaaccagcattcttgatgtagctcatctatgagctgagttatgggaagctagttggaaaacttcagttccaaccaattcttagattgaatctggcctccaaatatatgctccccccacattttacctctctaccaaatgaacataagttgtaatttgctctgaaatctgtcaactatcttaattgaaatatttgctctctgccataatttctcatatggagctattccattttaaacaaatatttatctaaataaatcttaaataaattttcaggcatag

SEQ ID NO: 7311 - DNA, 306 bp, Homo sapiens
tgccctcacctatactcacctgcctttattaaccagcattcttgatatgatccacctgtgaactgaatcatgcaaggccaattggacaacctcagttccaaccaattcttggattgagtttggcctccaaatatgctcaccaaacactatgttgctaccctctaccaaatgaatacaagtttgaattttctctgaaatatgtcaaccccatgttccctgaattgaaatatttgctctctaccataatttatcacatggagctattcctctatcttaaataaattttaatttttgaggcatacaaat

SEQ ID NO: 7312 - DNA, 312 bp, Homo sapiens
acctcatattggactatcaaccatgagccagtcaccatcccatgatatgaaagtgtcatttatatcaacttgtccatgtgttaaatggccatcagctttattatcctgttattccactaagtaactggtgaaagggcatccatctacatttaataccactcatttttcccatggatctcttcccagcagcattcagacctcagatgcatgatgcagttagactaagcctctaagtttctgactgttatgcttgatttgaccttcaaaattacatattaactgttcttcaataaatattatcttaatatcagt

SEQ ID NO: 7313 - DNA, 414 bp, Homo sapiens
agacctttccctccaccactgatgcagtcccaccgaaagcctccatctgctccagggggacagcccctcgtgtccagaaccttccatacccccaagacagtgtcttgtctttctgtgatttgtagaggagggcttgttctccaacaccttctctggtatttcaaggcaccgagaacaagagccatactctgatgaaacattaaaactcggtcacaactaagtgatcccaagctcaagggtgaatccccaatactttacttattcacatgaagttcaatgtcttgtactataagacatcctcttcttcaaggtgtctttgggactgatcctccgccctggctttctgcagctttgagatgcaaaaaaggtccatcttctttgtgagcctcttaataaatttgagcatgctggcat

SEQ ID NO: 7314 - DNA, 341 bp, Homo sapiens
ataccctggggccagcagaagtatagcatgaagacagaactaccatcggtgggccagttctgcctctctgacaaccatcagccaccggaccccaccccgaggcatcaccacaaatcatggtctggaaggagaacaaatgcccagcgtttgggtctgactctgagcctagggctacttgatcctcctcaccccaggtccctctcctgtagtcagtctgagttctgatggtcagaggttggagctgtgacagtggcatacgaggtgttttgttctctctgctgcttctacctttattgcagttccccaaatcgcctaataaactttcctcttgcaaagcagac

SEQ ID NO: 7315 - DNA, 388 bp, Homo sapiens
aaagcttgtatcctctttgaagacatctacaaagccatttagatcaaccacaggaaggatcctcaagtcctgacttttctggagctcagctgacatcaagaaacctcatcttgcctctatgttatttctagaatgctgaaaagctttcctgacccaagcaaagacacacatcatcaacttccaatgtctggacaactccttcctgttgagggtcgagcctgtttgtttctaaagatgttcagctccctgtaatctgagctccagttactacttaaggtgtttcctgaacgtactactgcatttcctgttttccttttttctttggcattctctggaatgcaaggaggagacttcatttacttcccaataaacttcatttctctggcat

SEQ ID NO: 7316 - DNA, 290 bp, Homo sapiens
aacctagggaatgccagaggagcaaggatgcagggcccaggactccagagctgtgacctggctctggttcaacaaaaggggcctgaaaacatcatttgcatggctggagttgcccgcgtaaggcagccaagaaactcacccaaagcctgtagcctccccaactactccagactgtcctgctcaccctttccttcctgggggtctgttccttcctatgctcacccagagaactctctgatgtgccagtgggcctcccttttaacctcctaataaatatcatttccttggca

SEQ ID NO: 7317 - DNA, 321 bp, Homo sapiens
ttctgaaggcccgagttaggagattgaggctggttgcactggggtcaggagtgccctcaccttgcccagtcttccttcaagactagactcactgaggcattttccctaaatcaaccggtagcagatacttccaaggagtggctccctgcctatgcctctaagctgtattttttgttgttgctaaaatgttgtaattatcttccatgaaagcaattatttttcctggtgtctcttcttggtacttttagttctattccagtgtttcagaatctccaaaaatgtaactgggttccctgcattaaatggtcaataaacctcctt

SEQ ID NO: 7318 - DNA, 1043 bp, Homo sapiens
attcctgtggacccacaggggctggctaaggcgagggatacccaaagagagatgcttgttatacctttagaaaatctggcttctaactttctgtatgtataggcctgtccaaaggctatgagataccagggacagtggaatcttgatggaaatccttcctttcctgctcttggttttcccaggtgagctctatgccctcagtggctggattgcagccacccatggtggctcagaatatctggattggagaggcataaggttgaaaagcattttggagtaggaacacggcatgatttaaaattgcacttgcacttcaagaacaccaactttaacttgaaatttttatagtttatgacaaaggaagtgaagaacagacttcactgtctgagatttcccacatttcttgggttgtttctaacattggcagcctggattatggccctagggagagggaaatagaatcagaattgtacctgaccctgtcttttctaattcccttctcctatcctcctgcctccctatcttggaaactgattaagtggaaactttccttgtatcaaatcctgagttttctctacttcagggtttctagctttgacaaaggaccaggcttgccttttctgtggcaacacagcctcttacatatggcttccatagcttcttgctatgtgaaaggaactttcagattaagaaatttctctcttttttctctataaattctgactctccagacttgtctggctataacccctgtccctgtctaattctcccagtctaaaatctaaacaatgacttcatttttttctagtactttctcctgaagtattgaaacctattgattcaatgggtagagatttgctaagtatgatgtgcttccacctcttctcttcatactctctaccttccttaccatgattcagccacactggcctttctgttccttggacatgcctggagacctgtccctgctcttccttctctctggggtgctcttccccctccttataaatgttcaggtcagcggaaatgttccttcctctgag

SEQ ID NO: 7319 - DNA, 596 bp, Homo sapiens
agtccctttgtgccagtggatcctggagggcctggggctgggcagcctggtattcagtggccaccagaagagcagggccagccccggtcagcaaggaagaccctgagcaggaccgtggatcacctgcaacaagctctgatactccaggggatacttaagccctcatcacttcaaaactgcctcttttttccatgggtgaactgttctctttggtgatgtttctggttgtctgtgctgcctcaaagagcgtgtgttcttagttaactggcaaatagagctgtactcagtggccttgcaaacatgtctgtctctgtttgtcacttacgctgctgcatccacaagccaatcctactcaattgggcttaagaggaacgtgggcaaattctgtatttatttttatgctccttctgcttccatagaggcttgagaggtgttcactaaaagggcccgcatgccataaaccagttaaaactaatcaattactctagagccaagtaataaaagaataaagagaggagggagataattatgccagaaacctaggccaaattactgtaattgagaatcatatcataataaacccacccctaaatctc

SEQ ID NO: 7320 - DNA, 154 bp, Homo sapiens
aactgagctgcctctaccacagcctcctgcccaccagctggcctcacctcctgaaggcccgggtcaggaccctgctctcctggcgcagttcccagctatctcccctgctcctctgctggtggtgggctaataaagctgactttctggttgatgc

SEQ ID NO: 7321 - DNA, 151 bp, Homo sapiens
ggactcagctaccccggccggccacccaggaggcagggaggcagccgccccatctgccccacagtctccggcctctccagcctcagccccctgcttcagtcccttccccatgcttccttgcctgatgacaataaagcttgttgactcagct

SEQ ID NO: 7322 - DNA, 253 bp, Homo sapiens
ggtctggctgaaaaggctttctgcaaatacatgccctaaagtttctcagagcctgtcacaaaggccggctgcccccaaaggtctcaactcctcatcatttcaatgggtgccagggtctctgttctcaggctgcctcctgggtcaggttttccttctaggtgctgttccggtggattctgaaatgcagtagagggcttttgttggcagaacaataaagtgcatttgctcaggcccctgatgcctaacttgcacc

SEQ ID NO: 7323 - DNA, 239 bp, Homo sapiens
cagcccacttggtccaccagggcagggccctgaccacaggaaggaggacacccctgtggctcctggaggcttaacgaccctgcccttctctagaggggtccccctacgcttagcaggtttttctaccaaaacactccccgtattgtgtttccggacttaactgtgcttttacgccatgcaaaaccaggtttcctggaaatttacccaataaagtgtgttctcctggcatagcaaactca

SEQ ID NO: 7324 - DNA, 363 bp, Homo sapiens
cacctctgttaccacgacttctagtgcctctgttaccaccacctctaatgcctctggtcgccgcacttctgatgtccgtaggccttaaatctgcctggcgtcccctccctctgtcttcagcacccagaggaggagagagccggcagttccctgcaggagagaggaggggctgctggacccaaggctcagtccctctgctctcaggaccccctgtcctgactctctcctgatggtgggccctctgtgctcttctcttccggtcggatctctctcctctctgacctggatacgctttggtttctcaacttctctaccccaaagaaaagattattcaataaagtttcctgcctttctgcaaacata

SEQ ID NO: 7325 - DNA, 277 bp, Homo sapiens
gtgtctattgcaggagaaacgtcccttgccactccccactctcatcaggccaagtggaggactggccagagggcctgcacatgcaaactccagtccctgccttcagagagctgaaaagggtccctcggtcttttatttcagggctttgcatgcgctctattccccctctgcctctccccaccttctttggagcaaggagatgcagctgtattgtgtaacaagctcatttgtacagtgtctgttcatgtaataaagaattacttttccttttgcaaat

SEQ ID NO: 7326 - DNA, 126 bp, Homo sapiens
ggcagcaggctctggggcttctgctgtcctttggagggtgtcttctgggtagagggatgggaaggaagggacccttacccccggctcttctcctgacctgccaataaaaatttatggtccaaggga

SEQ ID NO: 7327 - DNA, 309 bp, Homo sapiens
gcttcctttcgcgatactagagcctctgtaaacttctcctgcccagccccagctgagcatccccagatgggcagactcccgatgaagcctgcttattggatcctgacatcaggaatagctggcaacaagcccctgtgcccgtttgggactgaactgacttggcatatgtgcctctggctttccattggcttccaaccctgcttggctttgatgccttcagggttggggagacagacctctttcctctctctggcctggggtgctctcacaccctgcacgatcttgactataataaagcttccctactgc

SEQ ID NO: 7328 - DNA, 154 bp, Homo sapiens
ggctgcccagccccgctcaggcctaggaggccccccgtgtggacacagatcccactggaagatcccctctcctgcccaagcacttcacagctggaccctgcttcaccctcaccccctcctggcaatcaatacagcttcattatctgagttgcat

SEQ ID NO: 7329 - DNA, 2062 bp, Homo sapiens
aaagagagggtggataagctccccgagtgctcacctgccccagcctggctctacctgctgtgcttatttgcatggactttgcatatcatttgcatagacacctctgatccccttcagtgggaaccgtagtgtcagtgctcatttatgtggcatttgcttaggattccagatctccatccacttttctcctgggggctgggctgggggttagggctgggactgtgcccccacactgcgcctcagcttcccatctctgcccgcttgcttcccctgcccccaacccctgcctcctctatcccccaggctctccaactctgcagcagtggcagcagcagtcaaaacaaacacggggggcggtgggtgggatggtggagcagcccgggggctgacccaggctggaggacagggccagccaccctcccacggcctgggaggaagagaggccttctgggactgcccaggctatggggacaaaggccttcaccagcaagggccacagttggaacagtcccctgggtgtcagaaggtgggctagggcctcctgcagggttgtggggtggaacagggtctcctctccccagccagaaaccccaaagtctgggagctgcaccttccgagtgcaggccatgtgagccctgcctctttaaggagccgcaggacatgaaagatgaccttgtgacactcatgcacagcagccattgcacgtgcatcagctcccatcagcctcattccgtggcaggtgatgtgtccccattggttaggtgaggagggtgaggctcagagagctaaggacacttgtttggggccacacagccggggtagatctgagcccgtcctctctactcctgtgctgtagcaccttcactggcccatccctcccctctagtgctgtcctggtacccgtcccagcctgtccccattctcatggccctttggtcactgccgggtggaatagcactggcttcagcaggcgtgtcatgtaagcttgtgcaggttataaactgaaccatgacctttatggcgcatgcagggggcaacctgcataattatcaatggcgactttccgtgtccttctgatacagttgatcagacccctgcccaccgcccaggccaggcctgtggtcatcaatgccccagttcacatccacctgcttctcttccaggctttgctgttccccagcagcctgcagaggccccacagacagcttgaggcccctccttctgctgcctggccaagccccacacccgcagaccctccttcccatcctctgaaatgggaccctgtgtctgtcaccagcccaccctctgtgttcatgaacctgggctggagcttggggacccctccctgcccctggcttcctcttccatgttctgccctttcccacatgttggaggcttttccaacgtcttcagggacaggcggtaggaaccccggccctcgctctgcagctggtgcaaaagctgtggctgccaggtctgggccacatggcagcccagggggcaggagaagcccgggagaggcccactggctaccagactcagccctgagcagggaacagggcccagcttccaccggcagggagttgtgagcgccttcccaacaatgtgcccctcaccccttgatgcccatgctaatggtagccaccctggttcttgttgacttgagggacctggctgtcttccctgttcttcatcctttcttctcagtccctacctactgtttgtaaccacaagtgtctctgtgtgtgggtgggtgagggcccctctgcccagtggtgtgtctcctctccctccctccctcttctgccagtggcctgggggtgtccaggctcccatccgtggcccagcccctctcccctctgtcttgatccccccctccctgcccctggcttcctcttccatgttctgccctttcccacacctttgttcctcaatagctgggggctgggactgaggcctcctgcaggtacctgccccccttcacacagcacctctcaatctcctattgcttgtcagcctgtgtgcgtgtggtgcaggaaataaaggatctataccctcctgg

SEQ ID NO: 7330 - DNA, 1132 bp, Homo sapiens
gcggcctggccccagtacggccccctctttgcaggcttttcctcctctctagaacctccttctgttggaggccctcccatctccccgctgaaacctgcgctccttttttggggggatcctttgctgctgagcttccccaagcacggtgtgccctggcctgccttcttcttgtgtctttggtggggatggggaggcctattcctgctggccccttctgggggtggtgggcaggtgacacggagtggcttgagcttctggggatgcaggtccaccgagcccctgacccctgtctgtccccgctcccctaacaggtgcggttcctcatctgagaggctctccgtgcaggcgatggggcaagacagaaaagtgcctgagctggggaagccggggtgtaacttcctgctgcaccctgcgcctccagaggtcctccgtagggtctttcttgggatagtgttctgctcctgcttttctgtcctgggcatgggtccagggcctgacaccccctccccgcccctgtggccctggccactaaagcttcagactcaagtacccattctgttttcccccagcaacgcccctccaaacctccagcctccctgtctccagctgcctgggcccggaagggctttggttccttctctgggtctgattttctcactgaactccaccgaccaactgccctaagcccccagggcctccagggcccaggttcgagacccaaacccccaaaatccaaaacttctcttgaaaagttcagggaccgtccaggggagatggggaggagatatggagtgagtcacctgctccagaagatgccagcttctctctccagggtgcttagttggctttgcccacccctcactccccagggagctctggggacagcttcctcacacccctgtcccacccacacagctgccctagctgaccccgagaagtgctcttggctgacccctctggtgtgtggtgaggggctttctcttccccttcctgtttcagacccccccatttcccgcacatggtgtggggggctgggggaggtccaagcagagtgttttattattatcgctttatgtttttggttattggtttttttgtatagaccaaagcaaagaaaataaaaataacacag

SEQ ID NO: 7331 - DNA, 1003 bp, Homo sapiens
gaaggggacaccccacaccgctcaagcttgggaagcctggtgccgatggccccaccctcaccagcctgggcagcagcaagaactatttattaaaaacttaagatgggccaggtgcggtggctcacacctgtaatcccagcattttgggaggccaaggtgggtggatcacttgaggccaggagttcaagaccagcctggccaacatgatgagacctccgtctctactaaaatacataaattagccgggtgtggtggcaggcgcctgaaatcccagctactcaagaggctgaggcaggagaatcgcttgaacctgggaggcaaaggttgcagtgaactgagattgcgccaccgcactccagcctgggcgacagagcgagactccatctttaaaaaaaaacaagacgggccggcacggtggctcacgcctgtaatcccagcactgagaggccgatcacttgaggtcaggagttcaagaccagcctggccaacatggtgaaaccccatctctactaaaaaatacaaaaattagccaggcatggtggcacacacctgtaatcgtagctgaggcaggagaatcgcctgaacccaggaggcggagcttgcagtgagccgagatcgtgccactgcactccagcctgggcgacagagtgagactccatctcaaaaaaaaaaaaaaaaacttaagatggacacagctgactggacccccatcctgcctcacccatgggtgctgcaccccagacccatcctgccacttctatgtctctggaccacaggatggtggtggcattgcaggttggcaagtgggctgatggggtccgccctcctcactgctgagctcctcacctggacagtctcctggacaaggagtttccagctgctggctggagtctcaggccaaattgcagagggtcctccagggtcctgaagagcactggactaagagtctagtggttccagggccctgaccagtaggtgctcaataaatgtttgttgttgaatg

SEQ ID NO: 7332 - DNA, 314 bp, Homo sapiens
aggcgcaggctccagcccggcctgcaggccgtggtgaggaggggcgcctccccagagtctgctcccccgtgaacacagagcagaggccagggtggccagcagtggctgggtccttccgcgcccctccgtcctcctttccctgagcaccttcatcaccagaggcttgaaggaaccccgccatgtggcagggcacaggcactgttcctggtgaaccttggaccacagcatgtcagtgctctagggattgtctactccagggattttcttcaaaatttttaaacatgggaagttcaaacaaatataatgtgtgaaac

SEQ ID NO: 7333 - DNA, 193 bp, Homo sapiens
gttctctcaagcgtgccgattaaaactgttacacccgtttcgtgaagctgaagatacccaggctgttatttaaaaaagtatgtcgataacttattttctacatgaactgattattaccccatataaaggaaatagagttaaaaactaaagaatgggagactcagttcaatacatggtcattttgttagcttgc

SEQ ID NO: 7334 - DNA, 882 bp, Homo sapiens
cagagccaggaaccctactgcagtaaactgaagacaagatctcttcccccaagaaaaagtgtacagacagctggcagtggagcctgctttatttagcaggggcctggaatgtaaacagccactggggtacaggcaccgaagaccaacatccacaggctaacaccccttcagtccacacaaagaagcttcatattttttttataagcatagaaataaaaaccaagccaatatttgtgactttgctctgctacctgctgtatttattatatggaagcatctaagtactgtcaggatggggtcttcctcattgtagggcgttaggatgttgctttctttttccattagttaaacatttttttctcctttggaggaagggaatgaaacatttatggcctcaagatactatacatttaaagcaccccaatgtctctctttttttttttttacttccctttcttcttccttatataacatgaagaacattgtattaatctgatttttaaagatctttttgtatgttacgtgttaagggcttgtttggtatcccactgaaatgttctgtgttgcagaccagagtctgtttatgtcagggggatggggccattgcatccttagccattgtcacaaaatatgtggagtagtaacttaatatgtaaagttgtaacatacatacatttaaaatggaaatgcagaaagctgtgaaatgtcttgtgtcttatgttctctgtatttatgcagctgatttgtctgtctgtaactgaagtgtgggtccaaggactcctaactactttgcatctgtaatccacaaagattctgggcagctgccacctcagtctcttctctgtattatcatagtctggtttaaataaactatatagtaac

SEQ ID NO: 7335 - DNA, 254 bp, Homo sapiens
tgaagggcaaccacccagaacccagaaaatgcagattcactcagtttaatcttgaatgtggaaacagttcacctcctcccttcatcacgtctccgtgtgcttagagcagtttcgttttctcagttggatgccctgtgtctctgtgagtggggtggagcaaagggaaccaatgccgaagaccgagggcaggggagggaggcgggggtggacagggaggcagcttgtgaatttttgttttactgtttaactttatt

SEQ ID NO: 7336 - DNA, 1321 bp, Homo sapiens
ccctcatggggaggccagagctgatttcccaatagccactccttgtctcctcctgtcctgagacaccttggtttcctacatgccacagggactgtgaacagcttcaggggtcctgcccgatccagaaagagctgggctagttttaagggcagctgccttccaaggactgtccccaccctcctttcgcaggccttccagggttaatcctaggcttgcctgcatttcccaccctgacagaccccaaagatctatgcaaaatctcagccccagccatgtggtgctctcactttcctccacccaagacccacatggccagactctaggaatcttagcttctacaagccatcctctcctagccaggggacgactctctgacctctattcctaggctttggggcttcactggagatagggatggggtctctagctgcagcaggctcaaggctgtcaggacaaggtgaccatgggagtgtgacagaggaccatggaggagaaagggggacccaaaagtccttcgatcagcagtgctaaggtggggcagagccaaggaggtagtggggctggttctgaaagcttttgggggcttcatctgctctgaaggggtgggactaagagaggaggtgatgttctggttgggcccagggttttgttttaatcttaagtcttctgggcattcatgggcccagtctttttttctgtctgagagtatcattctgttgcccaggttagagtgcagtggtgcaatcttggctcactgcatgcagcctctgcctccctggttcaagtgatacttgctgataagcccagtcttaatattgagggagtaactcatccctcagaagctcttcttcttagcctttctctgacttcctgaaccccaactcttggagggcgggtgtgggtctccctcagactatggactcagctaacaccgaaccccccgcagagctcccaaaggaagagctttcccctacagcttcccactccaaactggtcctagcactaaattcagctttcccttctcccaaccagcccctgccactgtgaagctgagtgttgggaggcagtctcacatgcactggcaagacccattttcatgctgtcaatgtcaatgtcacaaactcctttccactgcagcactgccccctccccaccccacaatatgggaccctgccagtatccccctgtatcttttttttgttttttaaagacatttccaatgggagaaccagaaaaagggggaggggagggaaactttttgataacaattgtggttttattgtgtccaaccaatgcatcaataaatgaacttgaagcccaa

SEQ ID NO: 7337 - DNA, 355 bp, Homo sapiens
ccacctcattgctgcagtgcccggtttgggctgtagggggcgggagagtctgcagcagactccaggcccctccttcctgaatcatcagctgtgggcatcaggcccaccagccacacaggagtcctgggcaccctggcttaggctcccgcaatgggaaaacaaccggagggccagagcttagtccagacctaccttgtacgcacatagacattttcatatgcactggatggagttagggaaactgaggcaaaagaatttgccatactgtactcagaatcacgacattccttccctaccaaggccacttctattttttgaggctcctcataaaaataaatgaaaaaatgggatagaa

SEQ ID NO: 7338 - DNA, 538 bp, Homo sapiens
gcccatctttgggccgcagccctgacctggaatgtctccacctcggattctgatctgatccttagggggtgccctggccccacggacccgactcagcttgagacactccagccaagggtcctccggacccgatcctgcagctctttctggaccttcaggcacccccaagcgtgcagctctgtcccagccttcactgtgtgtgagaggtctcctgggttggggcccagcccctctagagtagctggtggccagggatgaaccttgcccagccgtggtggcccccaggcctggtccccaagagctttggaggcttggattcctgggcctggcccaggtggctgtttccctgaggaccagaactgctcattttagcttgagtgatggcttcaggggttggaagttcagcccaaactgaagggggccatgccttgtccagcactgttctgtcagtctcccccaggggtggggggtatggggaccattcattccctggcattaatcccttagagggaataataaagctttttatttctctgtg

SEQ ID NO: 7339 - DNA, 803 bp, Homo sapiens
gccccccttgcctgcccgctgcccccgcctcctccgcctgaatgacccgactggaatccactctaaccaatcgcacttaacgactcgggccaccactgggggggcagggggaggggtccaccatgatttctccatataattttgatcataggccggagtgagtcattccacctgcacctttctgtacaaatactaattcaattttaagtcttaagtcacttttttaatatatatgatcttctgctcttcccacttcctcccctttctactgctctcccattttcccttgctgggagtagccacatgctcttgccccccaacccttgtatatggggacagtggggtcagtgcagctaccctttctttccctcctgcggaacagcggacccagcaagagcatccacatcctcactttgttcggagtggtctttggtttgggcggtggggcagaccttgggaaggggcttaggaagggagaggcagctcttccttcagctggctctcatcaggctgcagccccctccccgctcccacctccctgctgggaaaccacagcattatcacagcattattgtgacagccacgaacccattgcccacaacccctccaccctcggtcaccccaacctctggctctgagccctgttctgaccaaatcatgatgatgagtatttgggggtgggtgggtaagggggggagtgggaggggacggaaccaactttttctgtattttgtattgtatgttttcttcaacatgtaaccaatcagtatcttgtcaatatagtcagccgatcgatcgacctc

SEQ ID NO: 7340 - DNA, 224 bp, Homo sapiens
gctgtctctcaaggtggtctcttctgctgctagcaactcaaaaatcccaacagcactccctatcctttccctgaccccagaccgctgccaagcctgttctcccccattacaacatggtctcactcagggcctggactgctccaaaactcgcccaggtctccagctctcctctaccacccaacaccctgggctcacttttggataggaaataaactctttatttt

SEQ ID NO: 7341 - DNA, 94 bp, Homo sapiens
gtcgttcttcgggccctgtcctggcccaggcctctgccctctgcccacccagcgtcagcccccagaaaaaaggcaataaagacgagtctccatt

SEQ ID NO: 7342 - DNA, 615 bp, Homo sapiens
gtcaagtcctgccccaccgcccagctccccccagaggccacctcgcccctccctctgggacctctccggatggggagtccttggccagggtctctgactctgtgtcacctgacatttgcccatgagagccgctgggccttagagaggccttggcccagctgaccggttctgaagtatgggcctccggggttagcagatgccagcagtgcctgcccgtgtccccatgtcccggcatgaaggacactgctagagagttaccatgcacaccgatggtttcctgtatcacagcccaaagaggttctctggtggccacagctgtgtgctcagtcagtgcactgggcaagctagaagtgttggggggttaatgtccccaggagcagcaaccctgagtcaataaggagcaggacctcagcttcattgtccttgagcaggacaattctgaagtgtattctacataaactctcagaggatgcccagcaggatggagtcccagttgcccgcagcagtaacccactcattcatgtacttcctgcgggggctctcccttccctctcttccccactcccccgccttgggcttcctgggatggctcccaaataaacctcttgcacccag

SEQ ID NO: 7343 - DNA, 2560 bp, Homo sapiens
ccccgcgacctctccatcttcagcttcttcatcttcaccagaggaatcactcttgtggatgttttaattccatgaatcgcttctcttttgaaacaatactcataatgtgaagtgttaatactagttgtgaccttagtgtttctgtgcatggtggcaccagcgaagggagtgcgagtatgtgtttgtgtgtgtgtgtgtgtgtgtgtgtgtgtgcgtgtttgcacgttatggtgtttctccctctcactgtctgagagtttagttgtagcagaggggccacagacagaagctgtggtggtttttactttgtgcaaaaaggcagtgagtttcgtgaagcctggaagttggccatgtgtcttaagagtggctggactttgacatgtggctgtttgaataagagaaggacaaagggaggagaaagcacatgtgctccagtgagtcttcgtcactctgtctgccaagcaattgatatataaccgtgattgtctctgcttttcttctgaaatgtagataactgctttttgacaaagagagccttccctctcccccacccctgtgttcttgggtaggaatgggaaaaggggcaacctacaaagattgttggggcaagggaagtcacaagctttcggatgggcggtggcttttcacaaaacatttagctcatcttattctctctttgtcctctctcccctcctgcccgcccgcaccctggaattgccactcagttcctctgggtgtgcacatatgtttggagaaatagaggagagaaaagagggccacgtaactgagagcttacagtgccaatgccgtttgtgttctggccagagtggagtgcgcagccctgactcccaggcgctgagattgttgcctggttacccaggaagctgctgttccggctgcccagcctttctctgagccagcggatgcacagtccgtggccttcttcaggcttattgatgatgctttttgcaaatgttgaatcatggttctgtttctaagttggatcttttttgttttctccttgccaccctaatttgacatcaaaattctctcttgtgcattgggccctgggtcattcaaacccaggtcacctcattccccttctctgttcacacctaatgtcttgaagagtaggtagcagcagtgtgggctgaacctaggccagcttgcttagcgggtcaccctgctgtgaagtcctggcaggtgttggtaatgtgtggaaatgcagtcagcaagtttgctggggagtttgataaaagtataaaacaaaacaaaaaaagcctcggtataattttgttccacgacttcttctgtagctttacaccagaaggaaggaatgggctacagcaggtagtggaggaagaggggggtgagcaggtgtattaaaatagcttacgggtaaggcctaaaaggtcacccctcggccccctctccaaaagaagggcatgggcacccccaggagaggatggccccaaaaaccttatttttatacatgagagtaaataaacatattttttttacaaaaataacttctgaatttatcagtgttttgccgttaaaaatattcctctatagtaaattatttattggaagatgacttttttaaagctgccgtttgccttggcttggtttcatacactgatttatttttctatgccaggcagtagagtctctctgcctctgaggagcaggctacccgcatcccactcagcccctccctacccctcaagatttgatgaaaattccaaccatgaggatgggtgcatcggggaagggtgagaaggagagcctgcctgctcagggatccaggctcgtagagtcactccctgcccgtctcccagagatgcttcaccagcacctgcctctgagacctcgctctctgttccagcaaccctggttggggggtcagacttgatacactttcaggttgggagtggacccaccccagggcctgctgaggacagagcagccaggccgtcctggctcactttgcagttggcactgggttggggaggaagagagctgatgagtgtggcttccctgagctggggtttccctgcttgtccagttgtgagctgtcctcggtgttaccgaggctgtgcctagagagtggagatttttgatgaaaggtgtgctcgctctctgcgttctatcttctctctcctccttgttcctgcaaaccacaagataaaggtagtggtgtgtctcgaccccatcagcctctcacccactcccagacacacacaagtcctcaaaagtttcagctccgtgtgtgagatgtgcaggttttttctagggggtagggggagactaaaatcgaatataacttaaaatgaaagtatactttttataatttttctttttaaaacttggtgaaattatttcagatacatattttagtgtcaaggcagattagttatttagccaccaaaaaaaagtattgtgtacaatttggggcctcaaatttgactctgcctcaaaaaaaagaaatatatcctatgcagagttacagtcacaaagttgtgtattttatgttacaataaagccttcctctgaaggg

SEQ ID NO: 7344 - DNA, 2230 bp, Homo sapiens
gccgcccccgctgccacccaccccattcctcgctccttccgaacttcctctttcgcattctctctcggctcgagctggctgagatttttctaaattgaaaacacgcccccctccccacacctccaggaactccactcccagtcttagagctgttaggacccgatggggaggcagcccccgcagtggacaacccccgcttggacacagtccgagtggaatgggaagggaatggtcaatccctgtcctggttgtccaagtcgggatctcagaggaaattgcagtgattccacggttaggcccccctgggggggctgccttcccctcagcctctccccacaccacccacccagctgctgtcattccgctcactgagctcttcttcattctcaccctgatccctgggggactcaaagccaaaactgcccaaagaggaaagattgaatcctaaaggggatccctgcccccatgggaggccccctactagaaggacgtgaaagcagcttttgggggaaactgaggcagtggggaagacagagcagaatgagccctcaccctggctgggggtccagcacaggctgtatctgcagagggtcccagaggaacgctggagccaagagaagccctgggaaggaggggtggggaacgacatgcatgtgagggatggcacactgatgtgtttatgcacctgtacacaggagcgcatggccatggctttggaaaggagaatggaaaaatagaagaaggtcggccgggcttggtggcttatgcctgtaaccccagcactttgggaggccgaggtgggcggatcacctgaagtcaggagttcgggaccagcctggcaaacaccccatctctactaagcgaaaacccatctctactaaaattacaaaaattagctgggcatggttgcgcatgcctgtaatcccagctactttggaggctgaggtggggagaattgcttgaacctgggaggtggaggttgcagtgagccaaggtcgcgacactgcactccagcctgggtgacagagtgagactccatctcaacagaaggaaaaaaaaggaaaataggagaaggtggaaatgggtgaagagagaagtcccctcactagctgcatgagaaatctatcttactgtggttctccatgggcagcaggaccatttttcagaatcaagagggaggacagtgtgagaaggcgatgatccaaagaagacagagaggtcagccccacccgatccctcaaatgggctcttggaggcacccccaggggcagcccatttctcaaagtccagaaaattagggtcccagaagggggcagcagcaggctgggagttaggagggagagcagggtgccggccctgccaccaagttgagagctggaggggaggtggggagagaacatcacagagcagccagccctggttcactcctggcagtttcttctcaagctccttccctaggagcatggtggcacgtgcctgtggtctcagctacttgggaggctgaggcgggaggatcgccagagcccaggagtttgaggctgcagtgagctatgagggtgcctctgtgctccatcctaggcaacagagtgatacgctgtttaaaaaggaaaaaatccttccctagagctagtatcctaaagctgcagagctagcccagacctcattggtttccttgtccttggggtgcttttcctgaatctttgcgggtgaagggagtgttgctcccagtccagaggcctgattctgtttggactgggttctcaagacacgaccaggttctcaagacacgagtccccttgttcctccccattaaagggggtttgtcagaagcaagaacagcccctctccccagtcacagcctgaagggaggccccgagagcttcctccttccccccacctgctccttaccttctctgccctgctttttagaactgcagttcattgttttaagggattgggggagggagcctggggacacaaaccttttatacaatacaaagctttgctttttttttttttttcttccttttccctttctcggttctcttctctcctctgaatggctgaagacccctctgccgagggaggttggggattgtgggacaaggtcccttggtgctgatggcctgaaggggcctgagctgtgggcagatgcagttttctgtgggcttggggaacctctcacgttgctgtgtcctggtgagcagcccgaccaataaacctgcttttc

SEQ ID NO: 7345 - DNA, 2476 bp, Homo sapiens
agtccctcacctttgacatggagttgacctcggagtgcgctacctcccccatgtgaggagctgagaacggaagctgcagaaagatacgactgaggcgcctacctgcattctgccacccctcacacagccaaaccccagatcatctgaaactactaactttgtggttccagattttttttaatctcctacttctgctatctttgagcaatctgggcacttttaaaaatagagaaatgagtgaatgtgggtgatctgcttttatctaaatgcaaataaggatgtgttctctgagacccatgatcaggggatgtggcggggggtggctagagggagaaaaaggaaatgtcttgtgttgttttgttcccctgccctcctttctcagcagctttttgttattgttgttgttgttcttagacaagtgcctcctggtgcctgcggcatccttctgcctgtttctgtaagcaaatgccacaggccacctatagctacatactcctggcattgcactttttaaccttgctgacatccaaatagaagataggactatctaagccctaggtttctttttaaattaagaaataataacaattaaagggcaaaaaacactgtatcagcatagcctttctgtatttaagaaacttaagcagccgggcatggtggctcacgcctgtaatcccagcactttgggaggccgaggcggatcataaggtcaggagatcaagaccatcctggctaacacggtgaaaccccgtctctactaaaagtacaaaaaattagctgggtgtggtggtgggcgcctgtagtcccagctactcgggaggctgaggcaggagaatcgcttgaacctgagaggcggaggttgcagtgagccaaaattgcaccactgcacactgcactccatcctgggcgacagtctgagactctgtctcaaaaaaaaaaaaaaaaaaaagaaacttcagttaacagcctccttggtgctttaagcattcagcttccttcaggctggtaatttatataatccctgaaacgggcttcaggtcaaacccttaagacatctgaagctgcaacctggcctttggtgttgaaataggaaggtttaaggagaatctaagcattttagacttttttttataaatagacttattttcctttgtaatgtattggccttttagtgagtaaggctgggcagagggtgcttacaaccttgactccctttctccctggacttgatctgctgtttcagaggctaggttgtttctgtgggtgccttatcagggctgggatacttctgattctggcttccttcctgccccaccctcccgaccccagtccccctgatcctgctagaggcatgtctccttgcgtgtctaaaggtccctcatcctgtttgttttaggaatcctggtctcaggacctcatggaagaagagggggagagagttacaggttggacatgatgcacactatggggccccagcgacgtgtctggttgagctcagggaatatggttcttagccagtttcttggtgatatccagtggcacttgtaatggcgtcttcattcagttcatgcagggcaaaggcttactgataaacttgagtctgccctcgtatgagggtgtatacctggcctccctctgaggctggtgactcctccctgctggggccccacaggtgaggcagaacagctagagggcctccccgcctgcccgccttggctggctagctcgcctctcctgtgcgtatgggaacacctagcacgtgctggatgggctgcctctgactcagaggcatggccggatttggcaactcaaaaccaccttgcctcagctgatcagagtttctgtggaattctgtttgttaaatcaaattagctggtctctgaattaagggggagacgaccttctctaagatgaacagggttcgccccagtcctcctgcctggagacagttgatgtgtcatgcagagctcttacttctccagcaacactcttcagtacataataagcttaactgataaacagaatatttagaaaggtgagacttgggcttaccattgggtttaaatcatagggacctagggcgagggttcagggcttctctggagcagatattgtcaagttcatggccttaggtagcatgtatctggtcttaactctgattgtagcaaaagttctgagaggagctgagccctgttgtggcccattaaagaacagggtcctcaggccctgcccgcttcctgtccactgccccctccccatccccagcccagccgagggaatcccgtgggttgcttacctacctataaggtggtttataagctgctgtcctggccactgcattcaaattccaatgtgtacttcatagtgtaaaaatttatattattgtgaggttttttgtcttttttttttttttttttttttggtatattgctgtatctactttaacttccagaaataaacgttatataggaaccgt

SEQ ID NO: 7346 - DNA, 653 bp, Homo sapiens
ggggcccacggtcaggactggtggggactgcaggatgtcagaagagtgagatgtcttgcactggctaccttgtttttggttggcttttgttgttgttcctgctactttcacctttaagcagagcagtcaggagacaagcataaaccagagcactgggtagagaggatgagggctggtggctgggggtagacccagcccatttcattgtctaaattgcagtagcttgaggttaacatttagacttggaacaatgctaaaggaaagcatttggcaatatttattataatttaattttatataaaaatatttaatttcctctggatagtcaaacctgccagatatcaaacctgaggaaggcagaagtgaatttggagaactagggtagagagaggttgctataaaacgagcatttggagggcccacggcttcactcaggacctgctgggcttgtgtaccccaggagcccttttaagtatcttttgtacgcttttcaccccacccccaagtcctgggagaaatgcaggcaacactgagacatgggagaggccaagatatgcttgacagaaagggtgattttgaggctcagttaatatttcaaaattgtaaccgtagcaaaactgcattggtatttagaaaaataaaaaatttccaat

SEQ ID NO: 7347 - DNA, 2296 bp, Homo sapiens
ggcagagactccttttgggagtcactgtggtttaggtttttttctccccatcccacttaaggtgatggggcaagggaagaactcagctcccctcccctgaattatatttgtatgctgggtggcctggctgatgctcagaggcctccttagagaggacactcactcccctcccaccagctggatgcccatttctgagctcagtcactgaagtgagagtgtgctcccccaagggaggcttctctccatcaggatggtactttgggggaacaaaatagtcagggatattggttcccctttgaggaggtgctgctgtttgcttttaggtatgagtgctcaggggccctcactgaaagagcccatgcctgccttcctcctttcatcgcctctctagagcccccaaagtcaggcagcagctggagtagttacattgtcatcatctttttttttgagacagtttcgctctgttgcccaggctggagtgcagtggtgtgatcttggctttctgcaacgtctgccttccaggttgaagaggttctcctgcctcagcctccttagtagtgggattacaggtgcccgctactatgcccggctaatttttcttttggtatttttagtagaaatggggtttcaccatgttggccaggctggtctcaaactcctgacctcaagtgagctgactgccttggcctcccagagtgctgggattagtcgtcatcttttgttaaaccaggatttgatttttttcttttcttttcttttcttttttttttttttgagacagagtctctctctgttgcccaggctggagtgcagtggcacaatctcggctcactgcagcctccgcctgccgggtcaagcgattctcctacctcagcctcctcagtagctgagattacaggcatgcaccaccatgcccggctaatttttttgtgtttttagtagagatggggtttcaccgtgctggccaggctggtctagaactcctgactgcaaatgatcagcccgcctcagccacccaaagtgttgggattacaggtgtgagccactgtgcccagcgtgatttttttttttttttaaagcaaacttgtcctttggttttgcagaacaggcctgctccctctcatctagcccatcatttcttggggcctgaaccccagtggtccaaagtattgcttgtgaaatttaaaaaatgtgaatatgatgtggggatgggcctcttctacattaccttggcccagggggatcagctggctgggaggattagtgagcacctctgtattttgaggtctgagtcttctggagctgtgtagttaatcttcggtttctgataacccctgggtccatctggccatcagcctcagcagtgagcaaagcaataccatactcatttctatgttcctgttccttcctctgctcctcctttggagaagcaataattcatgggggatgatacagtagcactttacaaatggctccatgtcattcatcccaggggccataatctcttgcaccacctattcttacttcctgttcagctcctttacagcttttattttcaactgcttcccaacttggtggggcctcctttaaggatgagccaatagtaagaatgtggctgtaatcagcagagacccctctgaggggtatctgttctgcagcccctagtgaaatcatgtgatgtgagacagaaacctaaacatggtacttgattctaaacctgtgccagtctatagcctctgcctccccaagcagagctcaagccaaacgcttctgtcctctttccttctgcattaaccctttgctgatcctcaggggccactcccccaacacccctgtacttgggtgagggatgttggacagagcctgttttcatgtactgcaggtgggggtgtgctgacatgtttgctcttggttgatggagaaggtacagaggccagggagtgaaaatggttgacagaagagggaagagttaggtgtctcatagtcactcatagtggggtggtcaggggtaatggcatctccccactttaggcttctcaaacagacttttgacacctctcaagttcagagctctgatgtggaaagacaggaggtgtggggaaggagggggatttcgtgtgtttgcatgagtgtgcgcttcaggccttgggagttggcaagagggagggaaggaaggagagcaaaatcttcggaaggtgtttcttgtacctgagggatcctgccctgaatctccatagtctccactgtgaactgaggaggggaggggtgtgctggggaataaatcttgtatgagaac

SEQ ID NO: 7348 - DNA, 210 bp, Homo sapiens
gcctgccaagaggtcacgacttccctcctgcctgcagcctgggccaggactgctctgagatttgagggaaacatggacccttttggccctgcagggacagggcacatcccacacccaagggctacaatgggtgtgggtaattttctagtttgtttcttaatttatttgtagaagagaagcaaaaaaaaaaaaaaagtttcttatttacac

SEQ ID NO: 7349 - DNA, 151 bp, Homo sapiens
ggctgcgaatctagaggagggggcaggctgagggtcgtgggaaaggggagtaggtgggggaacactgagaaagaggcagggacctaaagggactacctctgtgccttgccacattaaattgataacatggaaatgagatgcaacccaacaa

SEQ ID NO: 7350 - DNA, 2256 bp, Homo sapiens
ccctcccaggccccacggcagcacttatggtagcggcactgtcttggctttcgtgctcacaccactgctgctcgagtctcctgcactgtgtctcccacactgagaaaccccccaacccactccctctgtagtgaggcctctgccatgtccagagggcacaaaactgtctcaatgagaggggagacagaggcagctagggcttggtctcccaggacagagagttacagaaatgggagactgtttctctggcctcagaagaagcgagcacaggctggggtggatgacttatgcgtgatttcgtgtcggctccccaggctgtggcctcaggaatcaacttaggcagttcccaacaagcgctagcctgtaattgtagctttccacatcaagagtccttatgttattgggatgcaggcaaacctctgtggtcctaagacctggagaggacaggctaagtgaagtgtggtccctggagcctacaagtggtctgggttagaggcgagcctggcaggcagcacagactgaactcagaggtagacaggtcaccttactacctcctccctcgtggcagggctcaaactgaaagagtgtgggttctaagtacaggcattcaaggctgggggaaggaaagctacgccatccttccttagccagagagggagaaccagccagatgatagtagttaaactgctaagcttgggcccaggaggctttgagaaagccttctctgtgtactctggagatagatggagaagtgttttcagattcctgggaacagacaccagtgctccagctcctccaaagttctggcttagcagctgcaggcaagcattatgctgctattgaagaagcattaggggtatgcctggcaggtgtgagcatcctggctcgctggatttgtgggtgttttcaggccttccattccccatagaggcaaggcccaatggccagtgttgcttatcgcttcagggtaggtgggcacaggcttggactagagaggagaaagattggtgtaatctgctttcctgtctgtagtgcctgctgtttggaaagggtgagttagaatatgttccaaggttggtgaggggctaaattgcacgcgtttaggctggcaccccgtgtgcagggcacactggcagagggtatctgaagtgggagaagaagcaggtagaccacctgtcccaggctgtggtgccaccctctctggcattcatgcagagcaaagcactttaaccatttcttttaaaaggtctatagattggggtagagtttggcctaaggtctctagggtccctgcctaaatcccactcctgagggagggggaagaagagagggtgggagattctcctccagtcctgtctcatctcctgggagaggcagacgagtgagtttcacacagaagaatttcatgtgaatggggccagcaagagctgccctgtgtccatggtgggtgtgccgggctggctgggaacaaggagcagtatgttgagtagaaagggtgtgggcgggtatagattggcctgggagtgttacagtagggagcaggcttctcccttctttctgggactcagagccccgcttcttcccactccacttgttgtcccatgaaggaagaagtggggttcctcctgacccagctgcctcttacggtttggtatgggacatgcacacacactcacatgctctcactcaccacactggagggcacacacgtaccccgcacccagcaactcctgacagaaagctcctcccacccaaatgggccaggccccagcatgatcctgaaatctgcatccgccgtggtttgtattcattgtgcatatcagggataccctcaagctggactgtgggttccaaattactcatagaggagaaaaccagagaaagatgaagaggaggagttaggtctatttgaaatgccaggggctcgctgtgaggaataggtgaaaaaaaacttttcaccagcctttgagagactagactgaccccacccttccttcagtgagcagaatcactgtggtcagtctcctgtcccagcttcagttcatgaatactcctgttcctccagtttcccatcctttgtccctgctgtcccccacttttaaagatgggtctcaacccctccccaccacgtcatgatggatggggcaaggtggtggggactaggggagcctggtatacatgcggcttcattgccaataaatttcatgcactttaaagtcctgtggcttgtgacctcttaataaagtgttagaatcc

SEQ ID NO: 7351 - DNA, 626 bp, Homo sapiens
cttttttccttagggggaggtttgccttaaaggcttttaattttgttttgtttgcaaacatgttttaaattaaattcgggtaatattaaacagtacatgtttacaataccaaaaaagaaaaaatccacaaaagccactttattttaaaatatcatgtgacagatactttccagagctacaacatgccatctatagttgccagccctggtcagttttgattcttaaccccatggactcctttccctttcttctctgaaaaaaactaatttaaatttgcttttcttttttttaactgagttgaattgagattgatgtgttttcactggatttttatctctctcaacttcctgcacttaacaatatgaaatagaaacttttgtctttactgagatgaggatatgtttgagatgcacagttggataatgtgggaaaatgacatctaagctttacctggtcaccatgtgatgtgatcagatgcttgaaatttaacacttttcacttggttcttatactgaatgccgactctgctctgtgttagagatatgaaatggtgtttgatactgtttgagacattatggagagatttaattatttgtaataaaagatttgctgcagtctgaaaactg

SEQ ID NO: 7352 - DNA, 65 bp, Homo sapiens
gggcttagggcactcacctcctgtttccacaggaatcttttggtcaataaaatagattgactcag

SEQ ID NO: 7353 - DNA, 1456 bp, Homo sapiens
ggcaagtggctgtgagaccctagagaccagcgaagggagaagttgggaagctacgttctgttggccaccagacttgcatttcagcctctgtcataatgctctgccctccctcccccgaaggtctctgtggtgatgaccgctctcccctgcccctccccgcttcctgacctctgaagaggttgggaagtgaccatttggatgtctgggccctgccaaggcgacagggagggtcagagggaggccggctgcttcctgcccccaccctttccccgggcctgctgtgctgcttttgtgccaaggttagccagtcccccctgttgtgttccatgtgctttcacctctgcctcatctttcctcccgtccctgccccgccacctccccaaagaattgaaacgtcagctcaggatatggggccaatctctgtgagtccagcatgtacctgtctctccctagtgtcccttcagcctgggctgaccagtgcccgcctctgggcttgaccagttcccaatctcgtcctctgtccccaacttcttaagcacaattgggcttcttccatctccaggttttctgccattcttaaccaaggctgcctcttccaacagggcgggaatcagacctactcccctaggtcacaactctgggaaggatacagagcccccacccttcactgagttctctggatttgttctcagtgccttagcaacgaaaacctgtgcttgtgtgtgtgtggcggcggggagggaggatcctgtttcccacctccttctcctcccctgtactccccagtgccttccttgttctggtggagctggggtttctctcctccccagtcccacaacactgccaaaaatctgtgtatgtgccattgggtggggcagccccaagcctcctggggaggcagggcaaaaacaggtgccctcatcgtggtctgtgccatgtcccgtctctatggtggttgaggagaaaggcggggaagcttcctcagccttgcagatatgtgtggcatttactagccagagctctgaaaggcagtgctgtctgtttcttgtactgggaccaaagtaaaaatccaagcacattccccttgcagttaggggaggccctactgccttctcaaagcagagaggcagcttatcaaactcagcccaaaactctgtttacatgggtggggagatggagcagggaagtacagagtgggatggtcaggacctgggccattgcaaccaaaatggggacttcctgggtagggaggtcactccctctactcactgagctaggattagggagggttattgccccaaccattgcaatgggaggtggagggacaggctcagcctcctcattgtctaaatgaggcctaaatgtgtgaagtgcgatttctgcttttgtgtaccccaccaccccattaccacagctgcctttgtgtgtttgtgtcaataaaaagccaaaccctggg

SEQ ID NO: 7354 - DNA, 1381 bp, Homo sapiens
ctgcagccagccacaggtacagagccacaggaccccaagaatgagcttacaaagtggcctttccaggccctgggagctcctctcactcttcagtccttctactgtcctggctactaaatattttatgtacatcagcctgaaaaggacttctggctatgcaagggtcccttaaagattttctgcttgaagtctcccttggaaatctgccatgagcacaaaattatggtaatttttcacctgagaagattttaaaaccatttaaacgccaccaattgagcaagatgctgattcattatttatcagccctattctttctattcaggctgttgttggcttagggctggaagcacagagtggcttggcctcaagagaatagctggtttccctaagtttacttctctaaaaccctgtgttcacaaaggcagagagtcagacccttcaatggaaggagagtgcttgggatcgattatgtgacttaaagtcagaatagtccttgggcagttctcaaatgttggagtggaacattggggaggaaattctgaggcaggtattagaaatgaaaaggaaacttgaaacctgggcatggtggctcacgcctgtaatcccagcactttgggaggccaaggtgggcagatcactggaggtcaggagttcgaaaccagcctggccaacatggtgaaaccccatctctactaaaaatacagaaattagccggtcatggtggtggacacctgtaatcccagctactcaggtggctaaggcaggagaatcacttcagcccgggaggtggaggttgcagtgagccaagatcataccacggcactccagcctgggtgacagtgagactgtggctcaaaaaaaaaaaaaaaaaaaggaaaatgaaactagaagagatttctaaaagtctgagatatatttgctagatttctaaagaatgtgttctaaaacagcagaagattttcaagaaccggtttccaaagacagtcttctaattcctcattagtaataagtaaaatgtttattgttgtagctctggtatataatccattcctcttaaaatataagacctctggcatgaatatttcatatctataaaatgacagatcccaccaggaaggaagctgttgctttctttgaggtgatttttttcctttgctccctgttgctgaaaccatacagcttcataaataattttgcttgctgaaggaagaaaaagtgtttttcataaacccattatccaggactgtttatagctgttggaaggactaggtcttccctagcccccccagtgtgcaagggcagtgaagacttgattgtacaaaatacgttttgtaaatgttgtgctgttaacactgcaaataaacttggtagcaaacacttc

SEQ ID NO: 7355 - DNA, 675 bp, Homo sapiens
cccccagcggctgttccccctgccgcaggtgggtgctgccctgtgtacatataaatgaatctggtgttggggaaaccttcatctgaaacccacagatgtctctggggcagatccccactgtcctaccagttgccctagcccagactctgagctgctcaccggagtcattgggaaggaaaagtggagaaatggcaagtctagagtctcagaaactcccctgggggtttcacctgggccctggaggaattcagctcagcttcttcctaggtccaagccccccacaccttttccccaaccacagagaacaagagtttgttctgttctgggggacagagaaggcgcttcccaacttcatactggcaggagggtgaggaggttcactgagctccccagatctcccactgcggggagacagaagcctggactctgccccacgctgtggccctggagggtcccggtttgtcagttcttggtgctctgtgttcccagaggcaggcggaggttgaagaaaggaacctgggatgaggggtgctgggtataagcagagagggatgggttcctgctccaagggaccctttgcctttcttctgccctttcctaggcccaggcctgggtttgtacttccacctccaccacatctgccagaccttaataaaggcccccacttctcccatt

SEQ ID NO: 7356 - DNA, 1548 bp, Homo sapiens
ggatggggactccacagcctctccaagttcagagtgagattctgcatggaggaaaaatgactaaggactgagccccctacccaactacccccaccccaatcccaccttcaccctcttccttccccagccagggcagcctctccacatctttccctgactcttggatatgaaactgcccagcattcctgggagtcttaggattttctaggaagttctgtccagcctcttagcagcctcttccctagggcctttgctcccacactctcatggaatcagacagagatcctaccgggccggatgaatctggaaacagcttcagagatactgcttctcagcgtctcttggctgccacccatgcctcctcctaccgctgttctcctaggtcagccaggcctcctcctggtctggacaccacctggcctggtgggagaggagctttggaaccagctggcgactcggaaagtaaatgcttcaaaaggaaggaaatgacagagacacacgcccttgcccaccttcctctgtaggctgcacatctgaggctttggggccccttagttgtcccgaaaccccaagaaaaatcagaatgaggagagtcaaggacagcaactcagctgctgcaagccagaaacacatccctgtctccaaatttgttggctaagtggagacacttctgagaactgactagagaagacagaaaaatagcccgatgtaggtttcggtgtccccatataggcccgtccacacaggcttgactgggtggacaagaatgaacccatgacagcacctgctgcttcaaaatcaaaatcaatttagggatacagcaggggctgttgggctgtgctccagagaaaaggagcagctactccttttaaatccacgatttctggattgaaaacctgtccagatgctgagttgttgggctgaacaactaggagctgaaaacaacgtagaggctggaaagtgtcccctgcattctggaggggaggggagataataaggagggctgctgggtgagggcctggagatgtggaaccctggagtggaaggttctccagtgacagtgtcctgtgactgcaaaaggggacaagaaaatccctcttcctccatgggatggatttaagctcttgctgtgtgttctacaaatgctgttattgtgggaggaaatgctaggtttttgtgtgtggactgcccagacctcagccaggtcttctggagatgacatttgaggactgatggccaaagagcatgggggactgaagccctggctgcctcagcgctctgtctcccaacaccagctggtgttgcagagggaggtcaacgtgagtttggatctcttgtacgcagatgtaatcattcacatgtaaaaataaccccacctccccaccccaaaaagggcaagagctgtggaaaatgattgccaaatgagatggctggttagagcatgattttttctaaagcatacttcatatattttcttaagattacatcaagctaattgtgcgagctcaattcactttgtaagaaaactctcggagaaataaaatcaat

SEQ ID NO: 7357 - DNA, 1611 bp, Homo sapiens
agcccgcccgcgcccctccccaccggcgggcgccccggccctgaacccgcgccccacatttctgtcctctgcgcgtggtttgattgtttatatttcattgtaaatgcctgcaacccagggcagggggctgagaccttccaggccctgaggaatcccgggcgccggcaaggcccccctcagcccgccagctgaggggtcccacggggcaggggagggaattgagagtcacagacactgagccacgcagccccgcctctggggccgcctacctttgctggtcccacttcagaggaggcagaaatggaagcattttcaccgccctggggttttaagggagcggtgtgggagtgggaaagtccagggactggttaagaaagttggataagattcccccttgcacctcgctgcccatcagaaagcctgaggcgtgcccagagcacaagactgggggcaactgtagatgtggtttctagtcctggctctgccactaacttgctgtgtaaccttgaactacacaattctccttcgggacctcaatttccactttgtaaaatgagggtggaggtgggaataggatctcgaggagactattggcatatgattccaaggactccagtgccttttgaatgggcagaggtgagagagagagagagaaagagagagaatgaatgcagttgcattgattcagtgccaaggtcacttccagaattcagagttgtgatgctctcttctgacagccaaagatgaaaaacaaacagaaaaaaaaaagtaaagagtctatttatggctgacatatttacggctgacaaactcctggaagaagctatgctgcttcccagcctggcttccccggatgtttggctacctccacccctccatctcaaagaaataacatcatccattggggtagaaaaggagagggtccgagggtggtgggagggatagaaatcacatccgccccaacttcccaaagagcagcatccctcccccgacccatagccatgttttaaagtcaccttccgaagagaagtgaaaggttcaaggacactggccttgcaggcccgagggagcagccatcacaaactcacagaccagcacatcccttttgagacaccgccttctgcccaccactcacggacacatttctgcctagaaaacagcttcttactgctcttacatgtgatggcatatcttacactaaaagaatattattgggggaaaaactacaagtgctgtacatatgctgagaaactgcagagcataatactgccacccaaaaatctttttgaaaatcatttccagacaacctcttactttctgtgtagtttttaattgttaaaaaaaaaaagttttaaacagaagcacatgacatatgaaagcctgcaggactggtcgtttttttggcaattcttccacgtgggacttgtccacaagaatgaaagtagtggtttttaaagagttaagttacatatttattttctcacttaagttatttatgcaaaagtttttcttgtagagaatgacaatgttaatattgctttatgaattaacagtctgttcttccagagtccagagacattgttaataaagacaatgaatcatgaccgaaag

SEQ ID NO: 7358 - DNA, 3487 bp, Homo sapiens
ggcacccccaccacctctgctcgagaggtccgtgggggaggccgtgggcaaaggtgtcccgagctgccatgtttaggaaacacactgtaccctgctcccagcatcacaaggcacttgtctacaagtgtgtcccaacacagtcctgggccactttccccaccctggggagcacataaagaagcttgccaaggggggcgtccttgctccccagttgtcctgtttctgtaacttatgatgtcttttccctgagatgggggctcagagggggaaggcctgtggcctgcatgcttcccgatggcccacggcaggaggtgtgtggaagtgtaaggcctaagatgctcacagaggtccctcatgacctcccttccccaactcccgaatcctctcttgagtgtggacctcaacaccttgagccctagtaaaggaactatgcaaatgcaggccactctccccaccacgtctgtgccctgcactgtccccacagccttccacaccctgtgcataggcagccctctcacgtcttgaggtccgaagctggggtgggggtgtccgtcagttattagtggatggagattcccacagcaaggctgcatttgaatgatttccttaggatgaatggtccctacacaaagaggccttgtgggcaaacctggagaaccctcctaaatccatagagttttcaaaatgtgaatctttggaagccttgagttcagaatctgctgctctggaatatttcccttcgatcttatctcagtcacttcgtttttgagaagagtgatgccttgggcatgcttttttttttttcttttttagaaaacagggagttgaagtccaacctatttaaaaaccccaccatttggagaattacaagggttttgtcctgaattgtagtgttggcaagcccaagccactcgtgctaactgctttttgtctcggttgctattccaagaacagaaggaggaagttggccaattacagcgtgtgtgcatggatgtgtgtggggggcgtgcctctcagaaacgcggccagaagacaagcagggaagtgaaaggtcccaggcacacaccctgcccattgcaggtggctcttacagctctctggtgccagcacgggatccctgaagtgactcagccaggcagacatgagacatggcggagtgtccaaatggatcctttattggtggtagagcaaaaaaacccaaacacgataaacctttcaaaagactttctaaggatgatattggaatgcaccagccctcacatgtgtatgcacatttgccagaatataagagttttgttttaaatacagtcttgttaggattttacgttattgttattatggaaagtgattgtgatgctatttatcttcagggtcactctgggcaaagagaaggtcctcagccatgcccccagcaccttgcacataggtgtctgataaaagtttaagaaagtaaacactttttgagcaccaaatatatatagggcattgttctggtgggtgtgtcacgctcccagaagactgaattcatggtaggatcactcgcaaggccttgtgaaggagtcttacctaaaacgaaagaaatatcagggacttttgttgactatttacaactcagttttacatttaaattcaggcagtgttaatatgccaaggtagggaatgtgcctttttcagagttggccaggagctcctggctgggacacggagaggcaggtgtggcgtaaggcctcactcccggctgggaaggtctctgatcacacagaagcagccctgcccagcctggtcatttgctgtccgcttttctctgtgaccacagcagccctgaacaaccagtatgtgtcttcttctccagatagtgaaaaaggtgtccagataaacccacctaagtgaaatggccatcctctaaactgggtacctcactgcacagcttctaggtagccttccaacttaatctaacttgagcctcacagtaaccctgtaaagttagtagagcttgttcttgtattgtgaccttttttaaaaaaaaggaactgaggttcagaatgattaagggcctggcccccagggttgtccagctccataaggtggagctgggcaagattttgggtttgctgctccctgaagctggattctttcatacgatactctttctcaagaagggggctccctgggatctccaggtgtactgcacttaccctcaatccagccccggagaagcaagtgaaaagggtgggtccctcataggctagaatgtgcagctctttctccaggtgggatgtagcaccccgaagtagagctttctgctctgctcctggaaaaggctagggagctggggctggggctcccctcccatgaccaggcagtggtcaccccatgggacaggcacagctacttacgcgaacacagcaggttggtgtggctggctaactaggacctctcgaaagtctctgtgggggcatgagggagaaaaggccattgggagaattactgcctttactttgggactacttttatgctgataacttgggatttcttgatagtccttcacccctgaaaccccgtatttacttaacaagatttagctcttagttcttcaagtaaaattaaagtctcttgtgtaagagccaacacatgcccagctgcggatgggagctgttcctggacagccttctactgcctgggaagtgatggaacaggaactcagggtgcccttaccccctccccagacctgttccctttctttgactgacagagcaccatccaggcaaaattagagcgccaaatggttttcttctcaatcttaaagcagtatacctttccacaggctcgtctgtgtccctgccactctgagttatccagaaaccaccacctacaaatgaggggactcatctagaagacctctaaggtccccttttggctctgaggggtctctaataatccccacttggaattcagcaccgcaaggaaattatgggtatgtgagccataatatgatgggcagcaggtggcgctgccttccacccatggtgatggatggtttggaaagggaatgttggtgccttttgtgccacaagttaagatgctactgttttaaaggaaaaaaaaaaaaaaaagtactgatcttcaatatgaagacatgagcttttctcgcaggaaattttctttttcacagaactggtgtcaggaatcactgaagggctaaccgtgatagtccttgcaagtaagtcaaggttttatcctgattggaaatagaagacatttccggttgagagaacagattcgttggaagcttaacttttgttgcctcttaacgccaccaaattttagggtaatttgattatgaaagagtgaatttttctggacagaaaagggagagctaccaaattgtttttttctttttaaaaggaagtttaatgtccgttgtatcacaaatcagtgttaaaacaccagaactttagccaaaataaatgtcttacattacaaaggt

SEQ ID NO: 7359 - DNA, 902 bp, Homo sapiens
ctttatcccagaacatccaagctggacgggaccttgaagatcatctagtccagactccctcattttaccatcaaggaatctcaagcgcagagagggagagaattctccacaaattccatcatcgagaagagtataagtgggaagtcttgtttgttgttggtttttgtctgttgtttttcactgcacctctttggatcatgatttgaaaggggcatatcagaaaacaacacatttcatttattaaagtatcacaggcaagctgaccctgattctttgtaccaaagttaagtagccactgtcttttgtgggtggtagtggttaatttatacagtactgattcgcagaatgtttaagctttttaaacatagtgacgcttagtagtttttttggaagctaacttgttttatccaaggggattttacatgtaactgaagttcccctgtcttcaagcactaaaacgttgatcttaaccttttttttgaagtgcttgcctggtaatagaaaacgggttctctgcctattttaaaatagtgaatatacgtaaattttctctggaaggctgaggcacacttcaccatcaacatgaattactgtactatcctgtactgcagtggtgccttcagggactcgaggaatgtaaggttgcctttcccctttctaaataccctcagattcctaacatcgagcccatgctttgtttgatttgttctattccatccattgtcccttttgttactgacagttgccttggtcctagccagtccctgccatgagatcataggggttcccattgtgctagatcttgggaaaccagatgactctccctgtcaaaactatggctacgtcactgtaaaccatttctgtcaagaataaaagtatgtagacccagagtgtgggcctaa

SEQ ID NO: 7360 - DNA, 2448 bp, Homo sapiens
gcctgttcacctggtctttggctcactctgtgttgaaacccagaacctgaatccatccccctcctgacctgtgaccccctgccacaatccttagcccccatatctggctgtccttgggtaacagctcccagcaggccctaagtctggcttcagcacagaggcgtgcactgccagggaggtgggcattcatggggtaccttgtgcccaggtgctgcccactcctgatgcccattggtcaccagatatctctgagggccaagctatgcccaggaatgtgtcagagtcacctccataatggtcagtacagagaagagaaaagctgctttgggaccacatggtcagtaggcacactgccccctgccacccctccccagtcaccagttctcctctggactggccacacccaccccattcctggactcctcccacctctcacccctgtgtcggaggaacaggccttgggctgtttccgtgtgaccaggggaatgtgtggcccgctggcagccaggcaggcccgggtggtggtgccagcctggtgccatcttgaaggctggaggagtcagagtgagagctagtggccacagctgcagagcactgcagctcccagctcctttggaaagggacagggtcgcagggcagatgctgctcggtccttccctcatccacagcttctcactgccgaagtttctccagatttctccaatgtgtcctgacaggtcagccctgctccccacagggccaggctggcaggggccagtgggctcagcccaggtaggggcaggatggagggctgagccctgtgacaacctgctgttaccaactgaagagccccaagctctccatggcccacagcaggcacaggtctgagctctatgtccttgaccttggtccatttggttttctgtctagccaggtccaggtagcccacttgcatcagggctgctgggttggaggggctaaggaggagtgcagaggggaccttgggagcctgggcttgaaggacagttgccctccaggaggttcctcacacacaactccagaggcgccatttacactgtagtctgtacaacctgtggttccacgtgcatgttcggcacctgtctgtgcctctggcaccaggttgtgtgtatgtgtgtgcgtgtgcacgtgcgtgtgtgtgtgtgtgtgtcaggtttaatttggggaggaagcaaagggttttgttttggaggtcactctttggggcccctttctgggggttccccatcagccctcatttcttataataccctgatcccagactccaaagccctggtcctttcctgatgtctcctcccttgtcttattgtccccctaccctaaatgcccccctgccataacttggggagggcagttttgtaaaataggagactccctttaagaaagaatgctgtcctagatgtacttgggcatctcatccttcattattctctgcattccttccggggggagcctgtcctcagaggggacaacctgtgacaccctgagtccaaacccttgtgcctcccagttcttccaagtgtctaactagtcttcgctgcagcgtcagccaaagctggcccctgaaccactgtgtgcccatttcctagggaaggggaaggagaataaacagaatatttattacaaatgttagaatatatttcttatactaggaatctcatttgcatttgcatagactatacacatggggtggaaaggccaggcctgcccccatctcgttggtgtggctctgcgtatactacacactcattctcctgctcctcttttcccttagtcagtgtcctttcatcctgattcagctctgccttgcatcaccctcagcctaagggagtgggaaggaaatggggtgttttcttgctgacctgaggctatagggtcacttgccatttcctaccttctctgggggatttgagggtagaggcaggggaagatctgttgttgcagctgcttctgcccccttgatccaaatgaccatcatctctgatggagatgggttgggtacctggccttcatggcaccttcactgctagggatgctcaaggggcaggcctggggcccttccctcctgtctcttctcggtctttcctctctgagcagcctcctacctcccctgcctgagccctcactccacagccctcccaggtacctagcagaggctgtcagtccttggctcacctggaacagggctggggctgggttggaacaggtgtgtgcccccaccacagctctatgactctgttctccctccctgccattgtggactcttgtatttgagggacctcaagagagtgaggaccctaccatccactgtccatattcagtcccagccccagtgcgcttcctctgttccctccctcagccatccaattcttgagttttctcactgattggttttctttctttttccttggattaaatgtgaaagcaaag

SEQ ID NO: 7361 - DNA, 124 bp, Homo sapiens
tgccaccttctgtctcctacgactccatgagcagcgccagcccagctctcccctctgcacccttggctctggccaaagcttgctccctgctcccacacaggctcaataaagcaagtcaaagcca

SEQ ID NO: 7362 - DNA, 217 bp, Homo sapiens
ggacccctgaggcctcctgggagatctgccaaccacgcccacgtcatttgcatacgcactcccgaccccagaaacccggattctgcctcccgacggcggcgtctgggcagggttcgggtgcggccctccgcccgcgtctcggtgcccccgccccctgggctggagggctgtgtgtggtccttccctggtcccaaaataaagagcaaattccacagaa

SEQ ID NO: 7363 - DNA, 739 bp, Homo sapiens
gttttatggcaagaggctgagatgggcacagggagccactgagggtcaccctgccttcctccttgctggcccagctgctgtttatttatgctttttggtctgtttgtttgatcttttgcttttttaaaattgttttttgcagttaagaggcagctcatttgtccaaatttctgggctcagcgcttgggagggcaggagccctggcactaatgctgtacaggtttttttcctgttaggagagctgaggccagctgcccactgagtctcctgtccctgagaagggagtatggcagggctgggatgcggctactgagagtgggagagtgggagacagaggaaggaagatggagattggaagtgagcaaatgtgaaaaattcctctttgaacctggcagatgcagctaggctctgcagtgctgtttggagactgtgagagggagtgcgtgtgttgacacatgtggatcaggcccaggaagggcacaggggctgagcactacagaagtcacatgggttctcagggtatgccaggggcagaaacagtaccggctctctgtcactcaccttgagagtagagcagaccctgttctgctctgggctgtgaaggggtggagcaggcagtggccagctttgcccttcctgctgtctctgtttctagctccatggttggcctggtgggggtggagttccctcccaaacaccagaccacacagtcctccaaaaataaacattttatatagac

SEQ ID NO: 7364 - DNA, 1572 bp, Homo sapiens
gtccgtacacatggaggactcttccagcatccagccaaggaggcgctggtggtggcttcagcggaggcaggccgggggagggaagggatcctatatgtcctgttggctcttaacaaagggtcagcatttccaaatcttagacttgaacaaacaaaacacccaacaaaaaagaacaagagaataatttaaaagttgaatcattacttgactaacagacttcggtccaccatgtccttttcacagccctcttctggaacagtcaccttgttaattttatttttgaaaattattttcccactctgccctttacttctgactttcctttcctagtttgttcctgccattctgtttttataagtggctacacttgccttctgaatgattgaaagaaacttttacatcttttcttccaaaataaaagtaacaagctgactgtgattcttaaattgagaccagagcagcaaacgtctcactttaaatttttgttttcttttcctttttttttcttttttctttttttttttttttttgcacagggcatggcttgaattagttttatttttcttaactttaaatatatatatgaaaatatatattaaaatgttctctaaatattttctgcttcttgcaggtctctttttactagatcatggctgttcttcccacctcatccctctgaaaataaaaatgtattgccctccccaccatccatcatagccaggccactaacttgacttggtgcaagagattcttgctgcgaactttgtagagccagtgtgcagatagaatttggctttgagggttcctgatggctttttagtctttaactgtgtgtgtaccagtctcacatttggcccaaacctcaggattctccctctgcctgtcttacttcatggtactagaagaccttcctcgccactctctccacatgagagagtcagctgccctttctcctgtgcctctgcaggaagaactctcttgcatggcacatctcagctcctcattgagggatagttttctttgataagaaacctggagtccatttactctgacctctctttaaatctatatccagagccactagcccaggaaaaacttgggtgacccgtaatttctcttctcctgctgtccttttgctcttacgccccaccccaactccccttaaattttacaggcttatgacagtttgtatgtgctcagccaatgagcagaaaacctggaaagaatttctggactttagcccaccagtttgtctggttgactaacctgctgagagctaaaattggcacccattgccccgtgccttcaggcagtctcctggggcagagtatgccaccatccgaatatcaggcactgagtgggatgtgggtgatgctcacatgactggctagagctttgggggtggggtgggggttaactactatttttttggccatgatctctttccccttccttttttttttaattaaataaatggatcaaattaaataattcaagccctgccttcaaaatgaaattttttttttagtattatttagcaaaaacaataaaacccaaatttttttaaccatc

SEQ ID NO: 7365 - DNA, 1623 bp, Homo sapiens
cgccccggcccccatccctctgggcttcaccattgtgattttgtttattttttctattaaaaacaaaaagtcacacattcaacaaggtgtgccgtgtgggtctctcagccttgcccctcctgctcctctacgctgcctcaggcccccagccctgtggcttccacctcagctctagaagcctgctccctctgcagggggtggtggtgtcttcccagccctgtcccatgtgtccctccccccattttcctgcattctgtctgtccttttcctccttggagcctgggccagctcaaggtgggcacgggggcccagacagtactctccagttctggggccccccgagtgaggagggaacgggaagtcggtgccttggtttcagctgatttggggggaaatgccttaatttcactctcctcccttctccagcctcaggggaggatctggaggatccactactgtctttaagatgcagagtggaggggaggtgggcacccaccctgcgattctccaccctttccccttctttcgtcctcaccatctctgcagacccctctcctcctccttcctcttggtctcagcactgatgggaggctggtgcccaagctgtggcctgcagtctgtgaggagggctgtcttgcctcacactcctcacagcctacttccccttccccggggctgagagggtgaaagtgtgtggggaaggagaggactggtttcctgggttctcaggggccaggaggagtaacagaaccaggtctgctccccaccttactcggatggcctccctgcccctctgctggcacagcctgggcaaggggagaaggtggtccctgcagaggggctccaggctggtgagagcccccctgctgtcaggaccagattttcccagccatccagcatgctgcggggagaaggggcagaggctcacctccctcctggggccttttgttttggatcctggggatggtgagaatggaggttctagaaggggtaaggccagaacccagggatccaggagtcggctctcagctggagcttccataccttctgggctccctttgctgaccaccagcccaagggagctaagaccaggagggggctgggcgctgtcccttctctttcccaggagccctgccaggggctgtgggcctacaaggcttccaggggatgccatccagcctgtaggaaaccaaagatgggaagtggctcctagggggctgactcttccttcctcctcctccccagtaccacatatactttctctccttctatctccagggccccaccaatctgtttacatatttattatcctatgggggcctgagcaggattgagggagccaggggaggggcaggagtcccagcaccatcggttcatagtgtgcttgtgtgtttgttttagatcctcctgggggatggggatggggccaggctcagtgtactaggcctctctgtgctgagccccaggctcccggccccttacccactctctccctgtggctggtctggttctcatgtaaacccactccttgctttgtctccctggatatggatttcagttaagtattttgtaacccgttacactgtgtgtccttgtgtaaataaacttgtttctggcagtgcc

SEQ ID NO: 7366 - DNA, 687 bp, Homo sapiens
cactcccttgcctttccacccctctcagcttgaggtcctacctggtgtcctccatgagaatcatacaagccccgctacagacaacagaattggaaggtcctgagagctaccagaagcatcttcagttttcatatgaaaaacttaagcccaggagtgatttgtgcagccaaggacacacagcaagttagtggctgcaccagaaatagtactcactgcctcagacagtccctcccacagtctactctgtctccaccccaaggtctggttctgaatcattcagttgtcagttgtctccttttttttttttttttttggagacagggtctctctctgtggcccaggctgaagtgcagtggtgtgattacagctcatgtagcctggacctcccaagctcaagcaatcctcctgcctctgcctcccaagtagctgggaccacaggtgggcagcaccacacctggctaattttttaaatttttttttatagagacagggtcttaccatttgccccagctggtctcaaacccctgggctcaagcaagcctcctgccttggcctcccaaagtgctgggattacaggtgtgagccaccacacccggccttatctcctaacattttgatagcacaaaattttgaaaacccacttctgtgtacgttatgaagcatagaaaattaaacagtatgcaccaa

SEQ ID NO: 7367 - DNA, 2208 bp, Homo sapiens
ggctcagccccaccccagggcagccagggagagcccaggagctcccctccccaactgaccacctttgtttctcccccatgttctgtcccttgcccccctggcctcccccactttctttctttctttaaaaaaaaaaaaaaatacggtgggggtagggggctggaggagcccaggccaggactctgcagcctcagagacatcagcccttgggggtcctcctccagggacagcaactatcagactaagccagcaccggaccagcctggcccaccccacccacttctgcacttgcggttccggcatggacaatggaccggagagtgggggtggggggtcccaaagagtttgatgaggccctccacacctgcggcccaatccaaggtggggtggaagcttggggaagacccattccttcccagaggggcctgccacctggacccctgcattggaactggaggcagggaacatggggaggaggagggtcggtgccttcaagaaaacaggcactgccctggtggccctctcccctgccccctgcaggaaggagctgcctggacccgttcatgggggagggggcagaagtgttttttatatatgtgtatatatttttttttaagctctgagctgtcaacgagacgtttcctaccgatctcggctgccgtctctgttgtcatttctgggagagggagggtttaggggtagatttggaaccttttaaaaatggtcttgatgtatgtggaagagagtatgtgtatgtgtgttcctgtacatagcatgggtgcagctgtggatgtgtgcaaaagagtgtgagtgtgtgtgtgtgtgtgtaaaggggtctgtcctagagcccacatcagtttgttgtgaatctggaaaaagggtcggtgagggccgggagatgttgaccctggtgggagcaggctgaggctgccccgttctccacatcctctgttttgcccagtctctgattccattagggggagtgtgctgaagccattctcggatgcttcccagaccaggctccctctgccagagtcacatgcatccgagctgctggtctccattgtccagcaggaaggcggaaaggcaggcaagatggtgtgaagcttaaagcttgtatttgatggaaaaggtctcccctgttcatctgagaggccaagcctggccaccccaggctcagaacctgggcttcaagaaatgtgctgggagctcctaacttacacatccctccagccttccttgaatcctcccaccaccccctatttcctttaatttctcaggtctgctccctcctcccccaaccccacagctgggcaagaagtctgcaaaagctgcatctgcagctgtctctaactcttcccagccatctcccgtattttttggtaccttgattccttgactcttaataagccaagccaccttatctctgtagttcttatttttttgttgactaaatttggggggttcttttttatggtcatgtcactgacctattaaattggggcttggtgcttttccaccttccccctctgaatgaaagccaaggaatgggggaagagcgggaactctgccgcggaggtggagcaagaacggtgaagggccctggtcccagagaggctggtgggtccctctcccaaaggaaggcagacagtctctgctttgccttggaccttggtgctgggggtggggaggcctgggggggacactccccactcccattccccttcctttgtcctaatcctggaattaagtacaggggtttataggttctatttcttcccaagagccctgcaaagaaccccagtttcctatttggatgcccctacactgttgtgtttcagtggaatgtattttcatttaaaaacaactttgaatggggcactttttctttcctgttttaaaaattgaaaaattcttacagtacaaacaggactgtcagggtgggggtgttggtgctgtaagaggtcactcttgagtgcattttggcactgggatgggatggctggggtgggaagacccccatccccacccccaacttcttttctaatatttaaggagtgttttgtaggattcaacaaccaccacaacttgaatttgtatcatgggaggtgggagggagtggcttagaggtgtctgcctatgcttaaagccaactgtggaagttttgttttcccttttttgtataataaagtgaaaaacaaaggtttg

SEQ ID NO: 7368 - DNA, 786 bp, Homo sapiens
ggggcgggcccaggccctagaccctcccccaccattccacatccccaccttccaaggaaaagcagaagttcatgggcacctcatggactccaggatcctcctggagcagcagctgaggccccagggctgtgggtggggaaggaaggcgtgtccaggagaccttccacaaagggtagcctggcttttctggctggggatggccgatggggcccacattagggggtttgttgcacagtccctcctgttgccacactttcactggggatcccgtgctggaagacttagatctgagccctccctcttcccagcacaggcaggggtagaagcaaaggcaggaggtgggtgagcgggtggggtgcttgctgtgtgaccttgggcaagtcccttgacctttccagcctatatttcctcttctgtaaaatgggtatattgatgataatacccacattacaggatggttactgaggaccaaagatacatgtaaaatagggctttgtaaactccacagggactgttctatagcagtcatcatttgtctttgaacgtacccaaggtcacatagctgggatttgaactgagccgtgcagctgggatttgaaccaggccttctgatttcaaggtccgagctctgtcctctgtcagtcatgcgtccactttcccttcccctgtgactcctcccttccccactctgctcccagcccctaccttgagaccctcttctctgggcccagagagaggcgtcctggtgaggacaaggtacaggcaaggatgatccagggattgggc

SEQ ID NO: 7369 - DNA, 373 bp, Homo sapiens
aaggggcaaggaggcaaggaccccgtctctcccacggatggggagagggcaggaggagacccagccaagtgccttttcctcagcactgagggagggggcttgtttcccttccctcccggcgacaagctccagggcagggctgtccctctgggcggcccagcacttcctcagacacaacttcttcctgctgctccagtcgtggggatcatcacttacccaccccccaagttcaagaccaaatcttccagctgcccccttcgtgtttccctgtgtttgctgtagctgggcatgtctccaggaaccaagaagccctcagcctggtgtagtctccctgacccttgttaattccttaagtctaaagatgatgaacttc

SEQ ID NO: 7370 - DNA, 182 bp, Homo sapiens
tggtgcagcctacactattctagcaggagggttgggcgtgctacctgcaccgccccttctccaacaagttgcctccaagctttgggttggagctgttccattgggtcctcttggtgtcgtttccctcccaacagagctgggctaccccccctcctgctgcctaataaagagactgagccctg

SEQ ID NO: 7371 - DNA, 2284 bp, Homo sapiens
gttgggggatgggatcctaggtagggccaggggaggagacccataaatgttcccttgggggtgttgagccattaataccagcaagtagaagctgggatgggcagtgtctgacagccaaagaattgagttttggcttgcaggggtgggtttagatttgaagtttgctttcagtttactatcagggatttctttttcctgtcctcctctcaatttgtccctccctcttctgtgtttctaagctagggaacaccagtaagtgctacccacccctctgcagcaacatctccaaactgtcaagtttagataatcccctcctccctctgcttttttcctctgctcttcccttctgtaaattttaaaacattttcctcccctctggccagtgggttgtcaccagagcacttgctgtgggcccatctggtcttgccttctcagcgccacagggaaggccaagctgttctagtggtggaagtgccaccattttggggtagtatctttgaccatctttggtgacgttacgttatcccaggtgaggtggaaagcgtctcacctggaacctgatataactcaggctgcaattccatccagttcccacatcaacggagccacacatttggcactgttatcttggtatccctcatcccagaagaggcatctccatatcccagaaaagaagatcctatcatgaataaaagctgtatggcccagagaggagctcatgtgtctaaagtgaagggtatattttcttctgttgtgttgatgtttccttcttaatttataggatttttttaatgtaaaaaattgcactgaactctataaacgtaaatgctgctttttgtagctcatataaaaaaggttccatatttgtagtatactgcaataatattttttacatccagctctttaagtgatcctcgttctggtggctttgtgtaaatatgtttgccctagttgaattaagaaactctaaaggttataaaatgaaaacaaaaaataaaatatttgttttctgctagatgcaaaactgactaagcatgtatattttaccaaacttatgtattttttgaagttatgaactataaaatgttaaaacattttttgctgggacaaaatgttaagtaatttgcagtatgtagtgcccccagtattgggatttttgagctaatgggcagcagtcagctgggggcttctgagggatgctcatctttaacagtctccctcatgtacttttgctgttttacacagagaaacaggtagaccccacagaggagaaggaggggattcaacagctttattgtctggaagcagtgagatttggtgattgtctggggggattcctgggtttccctgggtaccttgttccaggcagtcagtccatttgccttcctagtacttagccccctctgacaattttttttttaatgtgccttttgggttggtagaaacggaagtagaagtaggctggaggatgagttgggacagtcttccttttgttgggaggtgagcacatttacagatattttgcttcatagtttccatgccctctgcccagctcagtttagacagtaaacgttccttgtttcttttctcccatgacactgacaagaggaattaccacctcagcctcttttgcccctcttcttgcctttcacccaggctctcagccctaattaacacactgacccaaaggtgcttgtgttgcaggtcccatctcctttgatgaggttaacaattcccactttggcattttcctaactattcgtgtggctagaattggttggttggtcacttgacaagaaaaaccatacttacctgggccaaggctctgttcctgccttcgcaaattctcaaaagagtaaagtttatgaaaagaaagtggcaggcaaacacaactcttgactgccctcccaccctcctacctgttcagtactcatctgattcagaagcatcacttcttggataactagcactggaaaaatgaaatcatctgtgtaagtgaagggactcatttttctttgctttcagcccatgtaaataaataatacagtattaacattttcgtgctgcttcccattagcttgtagattgagccatactctggctgcctctttgccttcctaggggcattttctttaacttccagaatagtgattttaaaagtaaaaataaaaataaaccttacttacaagcataacagattgtatttaactttatcacatatgatagagatatatatgctgtaaaatgagggaaaggaactttctaataaaccaatgatttgtgg

SEQ ID NO: 7372 - DNA, 1419 bp, Homo sapiens
ccttggcctactctattctttccccccatgaacttatcaaagggagaactggttgtgtatttaagagaaatgagagtgcattgcaaagtagtttcccaaggcatttcccctattgtttacatggtcaaaaggaaaatcaaaatcacttctaattacaaaatgtgctgttttggtggggtgggcaatcagattattatagttgatgactgtaccaaagatctggaatgggggccacctttatattttaatactcaagtcctgtgctccttttggccactttaaaaagtcttccctcaccttggataaataggattcagaaagctaacagttttcattctgaaggagcagaaacataatcaatccctccctgagataaaatgtgggcatgcacattgctttggagtcagtattcagctgtaagtgtagtattgttttatggctgaaatagaaagctaatgaagaggcctacctggatccagattttatgttaacatggcagcaaaactaggaaaatgggaagaaattacttgcggggtgttctagatctgattttttttttttttttgaaagtttcagcctgtgggaggaaaagaggtatcttttaaaatagagatagttacatattttcctcatctaggctgtgtcactattgggtgcaaggatatcattgttggctagattcattttgtataatcatgtatcctcttgtgtgctggtagagattttaatcctgatttttccataaaacatgagtattaagaaataattcctggtttggagaaactggagaaatcacccttttaaggaagaaacactggaaatttctgctaacaccaagatatttaagagtgtacatagtaggtgctcaacaaatttattgaatgaatgagtgaatggaaaaactgggagagtcaaaagtgagcagaagctctccatttctacttctgtcacaaaccacattaaattgtaaataaggcccttctccacttgacttcaggcagcagattgtctagaagcctaaggacagcaatttctctgacaagacaaagtagatattttataccaggggttggcaaactactgcccacgggccgaatttggcccagtctgtttttgtatggtgcaaactaaaaatgatttttacatttttaaagagttataaaagaaaaaaatatgtggtctgtgaaatctaaaatatttactacctggcctgttggaggaaaggtttgccaatctctgttttataccattaactatgagattaacaaaaacttttacctttgtgcagaaggttaaaaaaaaaaaaacatggttaaggaaaaggagacatgttacctcttcatacactcctataactgtggcattgcaaaaaataaaaataaccacctttaaaaaaataaatcttatttaaattgctgt

SEQ ID NO: 7373 - DNA, 6179 bp, Homo sapiens
tcctggcgggcttaaaacctgtgcttttcatagtttatggtaagcagcagctcactgaataatgacttccattgagtaaacatttggctctggttatcttcagggatgctgttggctcatgatccaagctcaggggactctggaggcggggctgggctgagggagagaaagggaaacacagtgttcccaggcacatgttcttagcaataatacagttgcagaactttacatttgtgtcttccagatctggagaagaacagacatatttaaatcattcttgttgaacagtttttgtatgtacagtattatggtacttttttttttttagtatgagaactttttttgtatttgtacattgaactgctgtagttatacttttatattaaaggggaaaaagtccttataaataatgcctattaggctagtgctattactttgttcagcaaattctaccctggctttagagtttttaatagatgctacacctaataaaagtgcctctcatattgcaggaacgatttcagatgtgtaaggagactgaagaggagataccagtttttagtcttggaaagcaagttcacagtagaaggaggttgagatctttcttttatgtgagaaatctttgaatctcattcatgcgatcagagttgtagccaatttttgaaaaccttattttcaaaggaaataaatgattcactgtaggattcctttaaatatcaagcatcaccagtatatgctttgatggtatatgtatataacttaaagttctttcaaaagcctgatacagaaacgtgtccccagtttggtagcaatgtggaaaacctggctagagatgatatggagctgtccctcagaaagcaaagccatgcctggaatccctaataggctgcttagttgtgaacctgtttgatttgccttaagcctctatccagaaacctgcccgcttccgtctggttaagaagccagtggtggatattttctttgttaacattagaaatgcaaacattcccttgtcaaccaagaatactcaaagctacttgtattggaaatggcagaaggcctaaatccaaatttcttattttttataatttaccatagaagttttgtgattaaattcttacttctgccagtggaggtttatgcctgaaaggtcatggggtcctgtctgtaaatagacctaaagagaagtgcagtatttattctttgtaggcataatgtgtttgtcactgacaagcattcatgttcatcccactagtcttttattgcagtcttttattgtcattttcagccttatgttggagagctttgctttctcatcatgttcacattgtcttaagttttgtgagcttctgagaaagagcttggtaaaggtttaaaggggactttgttccaccagggagcattttatttgggcgtctcacccttttctaatgaaagctgttgtaagccacctctgacttggaaattctgaaagtatgaatattttttatatcttaattgtaaaatgccagttctccattatttagatgaatagtagaacactgcaccctttgtgcagtgtttttgtttctctactgcattcctacccccaccaaaaaaaagaaacttaaggaaatttttttttgagacagggtctccctctttcacccaggctggagtgcagcagcatgatctcagctcactgcagcctctgcctcccaggctcaagcaatcattccacctcagcctcttgattagctgggactacaggcatgtgccaccatactcggctaattctgttttaaaaattttttttgtagagatgaggtctcactatgttacccaggctggtctcgaacttttgggttcaagtgatcctcccgcctcagcctctcaaagtgttagtattataggtgtgagccaccatgcccagcctagaaaatttaaccttatcttttagccattcatttacttttatttgcttttttaaaaaaaaatctttaaattttagcctagagaagcacctcaggaactctaaacatcttaggcaaaaattaaactcaggtgagactgaaggagaaatttcagaaatacacatgtacctcatgggtaattaatagacatgcacagtttccttcaaatcaaatgtttaataaggaaattcatataattccaagaaaacaggcaaaatttggaatacataagcctagctaagataaagaactaccagttaattcttaacatcactggagcttccagcaggttttttaattgaaggacaaaaagtgtccatacatttgtgttatctcttcagagcctgagggagaagagagtggctttgcccagtggaaaggctggggatttgagaatgatacagggggaaggagtcaagcagaaatgccaggaagaaccaggcaaagacatttggcgccagaagcatccacttaatttctgtgaagagtgcccctggtgtttcatcttggcctgttttgatgagaatgttatcttttgtgtctggataacgcgtcagcttcttaaagtacatataaagatattctgtcacctccccacatgcacacacttttaaaatctatttttattctcttgctaaagttgtaattatgtcaagaattttccagctctaactgccttcttagtacatgtctttctgcctttgaagcatatgagtttgccaaagtcattctcccctaatgacatattgtggacttacattaagaaaatgggccaggcgcggtggctcacacctgtaatcccagcactttaggaggcccaggcgggtggattacctgaggtcaggagttcaagaccagactggtcaacatggtgaaactccatctctactaaaaatacagaaattagccaggagtgctgggtggacgcctgcaatcccagctacttgggaggttgaggcaggagaattgcttgaacccaggaggcagaggttgcagtgagctgagatcataccattgcactccagcctgcaagacagagtgaaactcttgtctcaaaaaaaaaaaaagaaaaaaagaaagtgagcctgttgatgtctagctaacccattggtggagtctgcattgaatctgtaagaatattgttctggatcatgcaggtgggatttgtataaaaagcctgtccaacatttagttctcactcgcatcagaatcatactgttttgaattgccatataagacatgctccatcatgacacttgcttctcctccaaatacaagttgagtgcttagtccttcacctgctagaatcaggatacaatcaacatgattatgttccttaacacacttggatttatgcagatgtggtgtgtcctttgctcttttttttcttaagacagagtcttgctcttgtcgctcaggctggagtgcagtggtgtgatttcggctcactgcaacctccgcctcctgggttcaagcgattctcctgcctcagcctcccgagtagctgggattacaggcaccaccaccataccaggctgattttttttgtatttttaatatagacagggcttcatcatgttggccaggctggcaggctggtctcgaactcctcacctcgtgatccgcccacctcagcttcccaaagtgctgtgattacaggcgtgagccaccgcgcctggcctgctcttaaaacccgttattcagaagatttgtaaaagaaataggctttttttttttttttggttaattcaaacgaggggaaaattagatagcattttcccctaaagaaatgttaatgttcattttgtggctttgttttcaagtttcaggagccatgtacatctcagaagtgttacgaagtgattagaaaaggcctctggtaaaagaccttcaaggaccaaccattattattggtcacttgtttgaacttggcgcttaaaaaaaaagttggactgtgatgctttggtgctctttatcacagacatcagtgatggtctgaaacactctctagcagtttatacgaagaatggacttacatgttatcagttacactcatgatttactcgttcagcttctacaagtccatactttatgctgtctcatttaagagacagtccacttctgaaaataaaatcgatagttgatgatacatttttggctagccagctttctgtaaaaggcaagtatgttagacatgcacagtttccttcaaatcaaatgtttaataaggtacttcaagaaacgcctttttaaaaatcaaaggttttggccaggcatggtggctcacgcctgtaatcccagcactttgggaggccaaggtgggcgaatcacaaggtcaggagtttgagaccagcctggccaacatggtgaaaccccgtctctactaaaaataccaaaaattagccgggcgtggtggtgggtacctgtaatcccagctactcaggaggctgagatgagaatcacttgatcccaggaggtagaggttgcagtgagccgagattgcgccattgcacttcagcctgggcaacgagtgaaactctcaaaaaaaaattcatagtaataataaagtccctgcatgcagtttggaaataaaatttaaactcatttatgtgtaataaatatgtaataattcacagtcaccatcaaatgttggaatcattgaattgcatacttgtactcattccggccacatcatgaagtgtttaaagatttgtatttgctgttgtccctatgtagttctattgatgtttggttttgttttttggggtttgttttgagcccaggctagagtgcaatggcacaatctcaactcactacagcctggacctccttggctcaagcagtcctcccacttcagcctcccaagtagctggtctgcaagtgctcaccaccacacctggctaatttttgtattttttgtagagacagagctctcactatgttgcctagactggtctcaaactcctgggcccaagcaatcctcccatcacagcctccgaaggtgctgggattacaggcataagccactgtgcccagcctgtttttaataatgatattaagtgggtttggttcatgtgttattaatcagtgttaataatcgtacttttttttttttttaaaagaaaccatggtattctaaaatcaggagtccaaataaaagaaagttctcggctgtgcatggtggctaacacctgtaatcccagcactttgggaggctgaggtgggtggatcactagaggtcaggagtttgaaacaagcctggccaacatggtaaaaccccctctctactaaaaatacaaaaattagccgggcatggtggtgcacacctgtaatcccagctactcgggatgttgaggcatgagatttccttgaacctggaaggcagaggttgctgtgagccgagatcgcgccactgcactccagcctgggtgacagagtaagactgtcgccaaaaaagaggaaaaaagttatccagtgcagtttctacagagataaaagaagtaatagttctggctgggtgtggtggcttatgcctgtaatcccaacactttgggaggccaaggcaggtggatcacatgaggtcaggagttcgagaccagcctggccaacatggcaaaactgtctctactaaaaatataaaaattaggtatggtggcacgtgcctgtacttacagctacttgggaggctgaggcatgagatgacaatctcttgaacccaggaggcggaggttgcagtgagctgagattgcaccactgcactccagcttgggtgatggagtgagactcaaataaaaaaggtactagttctgcatttcagagttggcttgttgaaccaggctatatgcttccaagatttaaatgtttttctgtattatactctcaattgtgttttaaaaaaatctcttacagaaatctctacctcaggcactaagtgttatgacatgggtagcatattgatattgaaaacttagctaggacttccagccttttaagataatttaaatgtaaaattaaatggttaaccagcaatctaatgtcatgtggtgtgcagtttggatattgcatgaacagctaaggaatcacctgttctagtgccaaagatcactcattgctaattttgttctgtacagcttatgtaatattttcatggtggagacggactctgtgtgctcagggccttgtctctaggaagattttgtcaattccaaatacagttttgaagattca

SEQ ID NO: 7374 - DNA, 363 bp, Homo sapiens
gtgcgtggactcctgggagctcctgctccctacagtgggctgcaactcctgtacttgaagctgagacctcatatgacgtggccttcgtgttgtcagagagtgtctggaagctgctgttgccatcttgaacaactcaccaacctccaacccagagccccagtgagagaggagcatttggcctcctgcttccttctgtggcctctgccgggctccattcccaaggaaaagagaggagcttgggctcacagaaagagaaggggatgaaaccccaaggggccctatctttgggatttacatggaattttattttctacaagtttgaccttagccatggtttgcaagtgaacagaacattctgacctc

SEQ ID NO: 7375 - DNA, 1722 bp, Homo sapiens
ggcaggacccacctggtggcctctgccccgtctcatgaggggcccgagcagaagcaggatagttgctccgcctctgctggcacatttccccagacctgagctccccaccaccccagctgctcccctccctcctctgtccctaggtcagcttgctgccctaggctccgtcagtatcaggcctgccagacggcacccacccagcacccagcaactccaactaacaagaaactcacccccaaggggcagtctggaggggcatggccagcagcttgcgttagaatgaggaggaaggagagaaggggaggagggcggggggcacctactacatcgccctccacatccctgattcctgttgttatggaaactgttgccagagatggaggttctctcggagtatctgggaactgtgcctttgagtttcctcaggctgctggaggaaaactgagactcagacaggaaagggaaggccccacagacaaggtagccctggccagaggcttgttttgtcttttggtttttatgaggtgggatatccctatgctgcctaggctgaccttgaactcctgggctcaagcagtctacccacctcagcctcctgtgtagctgggattatagattggagccaccatgcccagctcagagggttgttctcctagactgaccctgatcagtctaagatgggtggggacgtcctgccacctggggcagtcacctgcccagatcccagaaggacctcctgagcgatgactcaagtgtctcagtccacctgagctgccatccagggatgccatctgtgggcacgctgtgggcaggtgggagcttgattctcagcacttgggggatctgttgtgtacgtggagagggatgaggtgctgggagggatagaggggggctgcctggcccccagctgtgggtacagagaggtcaagcccaggaggactgccccgtgcagactggaggggacgctggtagagatggaggaggaggcaattgggatggcgctaggcatacaagtaggggttgtgggtgaccagttgcacttggcctctggattgtgggaattaaggaagtgactcatcctcttgaagatgctgaaacaggagagaaaggggatgtatccatgggggcagggcatgactttgtcccatttctaaaggcctcttccttgctgtgtcataccaggccgccccagcctctgagcccctgggactgctgcttcttaaccccagtaagccactgccacacgtctgaccctctccaccccatagtgaccggctgcttttccctaagccaagggcctcttgcggtcccttcttactcacacacaaaatgtacccagtattctaggtagtgccctattttacaattgtaaaactgaggcacgagcaaagtgaagacactggctcatattcctgcagcctggaggccgggtgctcagggctgacacgtccaccccagtgcacccactctgctttgactgagcagactggtgagcagactggtgggatctgtgcccagagatgggactgggagggcccacttcagggttctcctctcccctctaaggccgaagaagggtccttccctctccccaagacttggtgtcctttccctccactccttcctgccacctgctgctgctgctgctgctaatcttcagggcactgctgctgcctttagtcgctgaggaaaaataaagacaaatgctgcgcccttccccag

SEQ ID NO: 7376 - DNA, 494 bp, Homo sapiens
gctccccacgtctccctccacccacgtccctcacccgccggggtcccctccgggcggggcagacgatgactcgcccctcgcccacccgctcgctgcccggccctccccggctatgacgcccccggcccgtgctcaacaccgcctgggccacagctaggccctcccaccggctcgctgcagagccgggcccagcgcgccctgtccccgtgccagggaaccggggttgaccgcccccgcccagcccgcgctatatatttgtacaataggactgtttactgcccacctccgcctgccagcccaccccagcctggggagaggtcgcggcggcgggtttgcttcctgcgctctgagatgagctgccctccgctccctccggggtggcgcgcccgggggaggggggagttgggggctggatagcttcccagcaccctcagagcccccgcccggctgtgccccgtctgaccaaagttataataaaaacattttcaccccgc

SEQ ID NO: 7377 - DNA, 1087 bp, Homo sapiens
tggggcactcaaggcagggagccccaggcctccatctatctccttggaggctgaagccaggtaacacatcctgtttcctctcagccccctccccacacacacacacacacacacacacacacacacacacacacacacacacacacggactctccgaatcagggctgggcctctgtgccaggccatcccgtctttggagtgtatcctatttgagatcaagaaatagcctgctgtccttcccaccttccctgagcagcacctacagaacagcaaccgtgatggtgtgtgaaagcaacagtcagagactgctatacatttctgtgggtgggggtagggaatactggctctgtggccctcctcagagctgggaggccaagggttcactgggcttgaatcctctctaagcacctaccccattgtggcctaaacctcctcagtggaccacgggaaatcatgttggaccaagggtttccatgttcaaacagtcaacaaggccctcccctaggttgagatattttttatactgaaggcccaggccccccagtatggcttgctgccagcaagcagcaaggattctctcgtgggtaacgctgtagccaggcaggaccagcctcttctgggagacccctctccccacgtagggtttgtgtagtgctcccacatcctgcttattgcctgccacccctgcttctcgcctggacctcttggtattccgtgtacaccatccttgctgtttcttgcctctgtgccttcaacctgctgctcctggcctgggataccttttattttcttttatttcttcttcctttttttttttttttttttttttaacctacaactagctctcagttcaggcactgtctaaagccccaggctgggttaggtggtctaggataccaactccccctcaacattttaccttaatccaacagtacagtaattagccgaaacttgcctggtttttcctactagactgtaagccctctagggacagggacagtgtcttattcatctctgtgttcttagtgcagagcctggcccgctgttggtgtttaataaagtgtgttgatctgaaatgccccagacc

SEQ ID NO: 7378 - DNA, 975 bp, Homo sapiens
gggcccacctcactcgccttggggttctgcgagtgccagtccacatcccctgcagagccctctcctcctctggagtcaggtggtgggagtaccagccccccagcccacccacttggcccactcagcccattcaccaggcgctggtctcacctgggtgctgagggctgcctgggcccctcctgaagaacagaaaggtgttcatgtgacttcagtgagctccaaccctggggccctgagatggccccagctcctcttgtcctcagcccacccctcattgtgacttatgaggagcaagcctgttgctgccaggagacttggggagcaggacacttgtgggccctcagttcccctctgtcctcccgtgggccatcccagcctccttcccccagaggagcgcagtcactccacttggccccgaccccgagcttagcccctaagccctcctttaccccaggccttcctggactcctccctccagctccggaacctgagctccccttcccttctcaaagcaagaagggagcgctgaggcatgaagccctggggaaactggcagtaggttttggtttttattttttgagacagggtctcgctccgtcgcccaggctggagtgcaatgttgcaatcatggctcactgcagctttgaactcccaggctcaagcgatcctcccatctcagcctcctgagtagctgggactacaggcacaggccaccaaacctggctaatgtttaaattttatgtagagatggcggggggggcgggggtctccctatgttgcccaggctggtctcgagctcctgacctcaagtgatcctcctgccccagcattccaaagtgctgggattacaggtgtgagccactgcctggcctggccgtaggtttgtaactgtttcatagaagagccctggagaagacagtagaatgagcctatctagtttaaaaaataaagaagcacgttgatttcaccaccgcc

SEQ ID NO: 7379 - DNA, 33 bp, Homo sapiens
ctagacagaaccaataaagcctccagtgctggc

SEQ ID NO: 7380 - DNA, 1515 bp, Homo sapiens
ccctgccctccaccgccggctccacactgccggaagcagccttcctgctcggtgcacgatgctgccctgaaacacaggctcagccgttcccagggatctgccagcccccggctcagcagtgggaccagggcctcgcagcagcaaggtgggggcaagcagaatgcctcccaggatttcacacctgagccctgccccaccctgctgagaaaacactccgccacgtgaagagacagaggaggatggcaggagttacctcgggaaacaaacaggatcttctctgccctgctccagtcgagttggcctgacccgcttggatcagtgaccatttgctggcagacaggggagagcagcttccagcctgggtcagaaggggtgggcgagcccctcggcccctcaccctccaggctgctgtgagagtgtcaagtgtgtaagggcccaaactcaggttcagtgcagaaccaggtcagcaggtatgcccgcccgtaggttaagggggccctctaaaccccttgcctggcctcacctggccagctcaccccttttgggtgtaggggaaaagaatgcctgaccctgggaaggctccctggtagaatacaccacacttttcaggttgttgcaacacaggtcctgagttgacctctggttcagccaaggaccaaagaaggtgtgtaagtgaagtggttctcagtccccagacatgtgcccctttgctgctggctaccactcttccccagagcagcaggccccgagccccttcaggcccagcactgccccagactcgctggcactcagttccctcatctgtaaaggtgaagggtgatgcaggatatgcctgacaggaacagtctgtggatggacatgatcagtgctaaggaaagcagcagagagagacgctccggcgccccagccccactatcagtgtccagcgtgctggttccccagagcacagctcagcatcacactgacactcaccctgccctgcccctggccagagggtactgccgacggcactttgcactctgatgacctcaaagcactttcatggctgccctctggcagggcagggcagggcagtgacactgtaggagcatagcaagccaggagatggggtgaagggacacagtcttgagctgtccacatgcatgtgactcctcaaacctcttccagatttctctaagaatagcacccccttccccattgccccagcttagcctcttctcccaggggagctactcaggactcacgtagcattaaatcagctgtgaatcgtcagggggtgtctgctagcctcaacctcctggggcaggggacgccgagactccgtgggagaagctcattcccacatcttgccaagacagcctttgtccagctgtccacattgagtcagactgctcccggggagagagccccggcccccagcacataaagaactgcagccttggtactgcagagtctgggttgtagagaactctttgtaagcaataaagtttggggtgatgacaaatgtttccaggc

SEQ ID NO: 7381 - DNA, 1547 bp, Homo sapiens
ctgctggcctgtgactggggcggcggccgcggtcctgccacacaagctgggcggcggaggccacgcagccgggccttcttctctctgggaccctccgccagcgcatagccgcaggccggtgtgacttctgcaccctcggttctgagggtacggtgacccctagtgggcagtttgcaaaatgtgattccttcttcccaactccccatccccccttcccttcccgtcacgtcctgtttgggggttaattcggttttttctctgttgcatcgcgcctactgtgcgtgtgcgatagcgtgtgtgggggtgagagtttgttttctggaatggtaggtgctgggaggaggagtttgatggagggcttcctggctgcttctggccctcacctcgtggaggccttcacagagaccctgtgggccctggccctgtgctggcactgtgccagtcatgaggcagctctgatcacttccccactgtggaaacaggactgacccagccttcagtgtgggctgctgaagctatcctcctcaggcctcagggatgacctcctgcctgagcctctcacaggctggctgtgggccagtttcatctgctttcctgttgggggtcccgggcctctgctgtccttgacccactggtgttctgtgcaaggcttcttcccattcaccaagtgcacaccttgcatctgccgctcggcatgcaccagttccacacaccatcccattttacagacaaggacgctgaggcctgcagcagcagtgtgacttgctcaaggtccagtgagtgacctcattccccagaaaaggctcctcccacaccagagtacagcctgggtagggggaaaatcagttctttcagctaccacccatccaacctttgggcctatgtgaaaagaaaggaactaagctgggtgtgttctgtctggacctggggaggcccctgaaggcaaagagggaaactgtcccagctgttctgtcctaggggagggggacatagccctagcaggagctcccagcccctcttggcactctgacacacaagtacacccatctggggcccgctttgccacgaagagctgggcaggcctgcagggtgtggggaaggaggacacaacctcaagaaaggaagcgtgaaccccagggaacagcgggtcccttccctcctcagacacaagccacctcagcttgtggctcttggcccccagccccaccaacccacctgttcatttattcaacagacaatgacagctgatatttattggacatttgcaccatgccaagcattcggcttggattatcccatttgtttctcacagccggtatttattgtctgctcctctgtgccaggtgctgtgctctgggcaggggcactgcatgggctgcctgccctggtggagcttgtggtctgatgggtgaggctgacccaagcccaccccattgccaacagggccagggcaagagtacacacaggggcctcataccatatgtctaaatatttaaaagttatcaatcaagctaacaactgttaaataaaatatgttctattctcct

SEQ ID NO: 7382 - DNA, 135 bp, Homo sapiens
gctccctctccccaaccgcgaaacgtgaggggtgcacgcccgcagtccctcatcagcaattcccaagctccaaagctccctggaagcccagaggcttttcgtaatccaattggtggcaaaattgcgcttgaactg

SEQ ID NO: 7383 - DNA, 1958 bp, Homo sapiens
tgcccatctgctgaccccgctctgaaagccgggggtgagtgtggctcagccatcccggctgggtttgccatcagcccaggatactcaccgtgtcacagctgtgtccccttgtcaggaagaccctcagatgtggccagagcaccggcctcccagagaaagcccaggaagtccccgtggtgtcccctggccctccccccacccctctgctgcaggaggcgtggccaccaccagatgctccctgtctggggcaggcagggccgtttactcaccaggccctggctcaccagcgtcccggcgcctccgttagggctgcccaaacactgtggaaaggggacttggggagcattttcaattccacattcctgattaaaaggtctagttttttaaggtgggtttttcccattcatatttcaacagaaagtatttttttattcttgaccctacgtgagtcacccatgaaatccagacattctcacccccagcggatgcacaggagccactcaggcctggcttagaggtagcgggtggctggtgggcaggccactgctgggacagggtctatgggcccacccagtgcctttccttggccctcactgccagtgccaaaccgcccctcagcagggcagggccagtcctggcgaccccggttcctctgtgtcctctttactccccaccccagtgcgtctcgcctgctgagcccaccgctttctcagcgtcagagcccctagctcttctctagcctggggccttggccccattaggagaaggagaaatgactggaaaccagcactgtcagcactttgagccctcctcggtttatggagggtcgccgtcttgcccacccccgatccccgtgcgctcctcacccctctacagacaggggcgctgctgcagatgctccaggcccaccttggtgggtgcccggggtcacactctctgcctgactgacccctgccagggcacagataggcaggaccccagagagggcaggcagccacgccctgcactgtggagaagtgacctggtcctaagctgtgcagggcgtgcgggggaactgccctgtggatgcagccaccacctcacaaagccatgaattcccaaagcatcactgaacttgcccagccgggacactggagactgaagaagttccccggagcaggactgcctttgaaggggccttggggctggggtgggagtctggaattgttttcaaagtgatggtcagaccctccaggcttcggggaaatgtgggtttgctggtctctctgtcgccttcccccacctctcctggacctagcaggccctcagtcctagctgtcttacctgcgctcagcttggagtcaggcctcaggtggagagccgcatgtcactgtcagagatgagcccacccccacccttccctgggggcgattagctgctgagtcacccacccagccttggagctggatgcctgtgcagcagaacagaggcaacggtggcaggcaggtggaggctgcgcacagcttctcccggtcatggcacacacctgtgcccagacgccaatgcctcctaagccaggagctgggttatgcaccgccatggcccacattaacgctccaccacaagcccagcctagtcagagccctcattgccccatccctgagtgggcaggagcctggcctggggagggcttgggcctgtgaggattctccccgaaggtgccctcggaggcagcaggtttgaggccctggggggcccgttccccagaagctgccagtgctttcagatgcattgactcttcccgcctcccctccctcagaaaggtagtgcccacactatttttaaaatgttattttatgcaatacactgttcctagtgagcagggctctggccctgaggagtctttgcaatgtattgaaggaattgctgccgtgtgagttttgaatgattttgcagtaaagacctgatctttctcatca

SEQ ID NO: 7384 - DNA, 1558 bp, Homo sapiens
gcgggagacagccatctaaacagactcactaactattggcattaaagcttcagaaatctctgcgtttgatattcaaacatcatatgccggaaattttcacagtttttagtgaacttaaggaatttagatcctactttggtatttttttttcttgttttaatttttgttttgtttttgtttccatgttttcttgtcacacacctgagcacttcctcccgttggcaaacagaagttcaggatgagaccctgctggcctggtcctggcacatcctctgcactgttgaatcactggacttactgatcttagatgaccaccccctccctcacacctgtgggcagggcagaacagcctggcgggctacagtttagcatggccttcttgagctagggtggaatggggcagggtgctctggactcttaccccctcccctcccatctgtggcttggctctgctgtggccctcctggctgggtccccttggtttttcgtgctggaacatccccaccagagcctctctgccataactgccagctgctctccccgagtgctcagctggcagaacacctttcctttctcacccagaacttaagagactgattttttgtttcatctgcatttggtcttctctgttttgactctttcactgcagtaacctggctgtggctgctcaggttcccctcctcatgccccttggtacccttccctgtctgctctcccatgccatgtacacacccacaacccgtccttccacttggaatatttttaccacctatcctgatctttgaaggtagggttaggactacttaacctctattcccactcccctgcaaactgggggttgtgggaagtgagcagccatctccctgtgtgattttttttttttttccctctgattcactttgccatgtttccttcacatccagatccctgtcggtgttagttccactcttggtctttcacgctccccttgcctgtggaacattgtctggtcctagctgtggttcccattgttcccccttcacccttctctgttaaccttgtgcctgtctcctgtatgatcacatcaccaaaaagggggaggggggagaagactctttttttttggccattttgtaatcgtataaaaatagtagacaactgcttaatggttggggttttttcacaattttcaacattagtgatttttttttctgtttgcaagttaaagggtttgtcattgtttctttaaaaaaaaatacaataatgcaccatatccctatgcataaagtgcttcttctatttataaggttgaaaattctgaataacccttttagcattgaaaaaaaaaacaaaaacaaaaaatggaaaaaaaaaaccttgtattttgtaaatattttcttttcctgctttggagctgtgtaatggcagcgaaacatgtagctgtctttgttctatagaaatgcttttcttcagagaagctgatctttgttaatgtcttgattctgttcgcaaagcacagactagtgcttaaaaaaaaaaaagaaggaaaaattgaaaaaaataaaaaaaaaagttacag

SEQ ID NO: 7385 - DNA, 298 bp, Homo sapiens
ggcgctgggaaggggtgaagtgtgtggctgggcggattcagcgaagtctcatgggaagcaggacctagagccgggcacagccctcagcgtcagacagcaaggaactgtcaccagccgcacgcgtggtaaatgacccagacccaactcgcctgtggacggggaggctctccctctctctcatcttacatttctcaccctactctggatggtgtgtggtttttaaagaagggggctttctttttagttctctagggtctgataggaacagacctgaggcttatctttgcacatgttaaag

SEQ ID NO: 7386 - DNA, 489 bp, Homo sapiens
gcgccatctgggtccgccctcgccagcgctgctgcaagaaggaccccggagacccggaccctcgccccgctctctgcgctctgccgccgcctccgggcgggcagctacgtgcctggggcgcccgggcggggacgcggcgagactgtcggcgggggcgcgggaagggacttggacgcccggctctgtcctgtgtgcgctgcagcgttgcggggtgggagaatgtggggtgagggttcttaccagttttttttgtttgtttgttttttaagacgttcggggcagggtgggagtgggtatggagatgcaatttgggactgcggtcgctcgcgtgggagttttgtgtgtacgttggtgcgggtgggttcggaacacggtgcgagtgggtgaagatgtgaagcgtcagagtcgctgagcttgttggcctgatcttgcgtttggaaagaaatcttgtaataaaactgcagccgtagggcttcaggcagcttccca

SEQ ID NO: 7387 - DNA, 675 bp, Homo sapiens
cttctggaaatcagacttttacaactggatgtgtgactagtgctgacgtgtttcttgtccctctgtatactgagtctttactcttgagctggcggtgtcatcgtccgtcacttataccatgagtgtgccactttcattggaccctgactgtatacagaatgaaaggcagtgcaatatttagctgctaacaagactggctcttttaccagtatgaatgacaatttatggggggtagggtggggaactttcttttctgtttttctttaatctccctttgttggaaagtatcatgaaaggaagagttatgctttatcttgaaggaaccattagatatggaaaatagtgatgaaccagagtttcttggttgctttttcaaaaatttgtttttatttggttctgttcctgataaacagagtaactgaccttcatttctaggttcttcaagaatggtgtttgcaagtgccagatggaacaataaaagacgttgcctataacagtgacttgattgccaaggaatgtaaattaccttaaacttgcagtatctcccataaacaaatgtaatgggcatattgggactcgtatgtaggaatcaaatatccctccatacagtgtactcttattcttggcaagaatgctttaatgtctaaccaagaattttaatttattcatcttgct

SEQ ID NO: 7388 - DNA, 924 bp, Homo sapiens
ccctggccccgggggcaggaggctctggttcctcactcctcctgcctccaccccctaccatggacacatgggtgaggccgggctccccgcctcactgcccttgagaccaaaggggcagccctggccctccctcccctctgctggccagagggtctgcatctcagcccacccccaaccccaccgtttggggtgagaagcagaatctgtgcttccccagtctccttgccccagacaaccagcatgtaagacccttcccgcttcaccattccgattcctgtcccctttggggtacttgggggagactctggctcccaggatctgttccctatttcagtgccttcctaggacacaggggactccttgacgctccccaggctttctgtgcccaggcctctgtccccagcggtgaggttgcagtgagtgaaggagaggaggtgatctgttctccctccccttctgcccatctccagcatcttcttccccttccctggccctgcagggccttctccagctccctttggttagtccctggccatccctcctgtcctggatcccttctccctaactgcaaaatgcctgcagcttccagctccttcgtccctgatcctcaagcggttccctcccgtctcagctcagcggatcccccagagtggaggaggcctctccatgaggaggggagcagcccaaggcacctgtcctctgacccaccggcagcgagtgcgcaggtgtgagtgtaagttcatgtaggagagtgtatgcgtgtgcgcctgtgccctgcttgcaggcaagcagggctccctcatgtagccccgccttccccctgctgggggtccaccacatcgctgctctttctcacagtctgcctctgatgagggcgaattgctatgacattccaagctccaataaagactgtcccagactttg

SEQ ID NO: 7389 - DNA, 932 bp, Homo sapiens
ccagcctgtttagccagccctgcgcataaatacactctgcgttattggctgtgctctcctcaatgggacatgtggaagaacttggggtcggggagtgtgtttgtcacttggttttcactagtaatgatattgtcaggtatagggccacttggagatgcagaggattccatttcagatgtcagtcaccggcttcgtccttagttttcccaacttgggacgtgataggagcaaagtctctccattctccaggtccaaggcagagatcctgaaaagatagggctattgtcccctgcctccttggtcactgcctcttgctgcacgggctcctgagcccacccccttggggcacaacctgccactgccacagtagctcaaccaagcagttgtgctgagaatggcacctggtgagagcctgctgtgtgccaggctttgtgctgagtgctgtacatgtattagttcctttactgctgaccacattgtacccatttcacagagaaggagcagagaaattaagtggcttgctcaaggtcatgcagttagtaagtggcagaacagggacttgaaccaagccctctgctctgaagaccgcgtcctgaatttcttcactagagcttcctcatcaggttacccagaagtgggtcccatccaccatccaggtgtgcttggatgttagttctccaccctcgaggtgtacgctgtgaaaagtttgggagcactgctttataataaaatgaaatatattctacttcctttattttgtggtttacacggttgtcctccctctaaacttactctcaggggcttctctgtcatctgactttcctcactcttgcttcccttcctaggaaaatcctcttcccctatacctgttcccacaaatggcatcccgcgcatgcttgccctattaaaggcagctgacagctgtacccact

SEQ ID NO: 7390 - DNA, 152 bp, Homo sapiens
gcttcatagcttctgctggcctggggtggacccaggacccctggggcctgggtgccctgagtggtggtaaagtggagcaatcccttcacgctccttggccatgttctgagcggccagcttggcctttgccttaataaatgtgctttattttc

SEQ ID NO: 7391 - DNA, 2385 bp, Homo sapiens
gctcctcagtgccgcctccctgcgggtatcccggggggcactggatgcgagcccccaggtctgacgtccttgggggtggcttgaggaagaggggaaggtgcgtatttattcagggaggaggaaaagtggtgcagggacagggagatggggcgctaggggttcttagtctctggggctactaggcaggatgaatttgactgggtcggtaggagctgcgcaatgcccctctgttctcccctgcctcacagtttccctcgcccctgggctggggggttggggtgggacacccgtaccgcggctggctggcggggacaggctagaggagacagcaagtcccagtccccggagcagagagaagtggggccggcccggggcgctggtggtggctgtctggacacgtccttagcgcctgggaaccaggacataaaagcgcctccggagccgccctgcggcggggtccctttcatcccacttaaagtgcttctgcccctagggtttccggagggagagccgagatgggatgggggagcctgggggtcccccttggcaggggtgtctctttctggtttggagggttgttgctgtaaaaataactcctttgatgagcttccttattaaccctttcagacccagtctgttggagccatgaaggaagagggaaagagggctgccattcctgacagcctcccagccagggctggcgataaaggaccgagatagatggagggggcgagtagggaagtcctcttctaaaatgagagatagggatttggtggggtatggaaggaactaaccccttccctctccacctctgattcagcccttaattcttggtctatgataaataaagttcagtagtctcacattccccatctattaccctaggtgtgttttcaaggcagccagcggtagaatccatgtagttcccaccagttgccttcccctcagggatggaaggaagagggtttcttgggctggttgagggcagattgggggtgtctcatcagagggacctccactggttcccactcagagtggaggcctgcagcctacctgaccatctctttagctgtcaccaagaaaataaaccccactgtctctctagcttggcccttgtctttcccttgcccctgccatagcatgttcattaggggattccttcctccccctcatctcacaggggaagggagaggaaagagttgttctcccactggaaggggttctgccttctgaggtgacatccaggaagctgtccccattcccttctcctttagatgctagaaacacattttgattctgatcatggggtgggggagagaggaaaggagggaggggagaagcccagcagaagctgagccaggcagaggggaaagaagctgatatgaggaagggtctgacaggccacagcccttgcagccggagggctttcccacactcaagagaggggccttacagtccctctgacacccctcccccttcccctcgctccctttcttcacccggagccctctgcagagattagctgtgtattgatttttaagttataagcaaagggtattttatttaatattaggttatgtgtgtgcatgttgtgtgtacctgtgtgcatgtatgtgtgtttctctactgagcctggggtctctagccagggagaccccatcttattcaccatgtccaagatcctgggatctgggcccagcatctcttcctcctttgtagatgctggagcccagccaaggtctgggagctatatgggaagtgggggctgggatctgggtgggaatatgtgtttgtatacaaaggggccctccttaaaagggacaggatgaccttcccgaggaactcattggcctggggtagtttaagaagtaatgttctttctttctttctcttttccctacctcctgctaacccaaccagagatccccttccttgctgagagggttgggggcaggaggagatttggcagtgcctgcaggttgcctggccaggtggagagggggaaagaggaagggcaccgtgggtgtaagatgcctttctcctccacccatcgaaaccagccaccccttccctgtgccaccaagacagccttttccagtggccatcctaaggggaactcccaaatgggtgttgctggtggacacagatgctccccccaatggaagccccaagctctgaggtatgcgggtagaggctttggataggttttcttctgctcccctcttttatagatctaggctgcttggctgcctgtctttctaggcagtccccctagaggaaaaatgtaggaatttattttttctttaactgctgtgaactcactttgagggggtaggaggagggagaaacagcctgtgttttttatgcaataaagtcatcaactac

SEQ ID NO: 7392 - DNA, 953 bp, Homo sapiens
agggctgaggagggtgctagcacctcttggctccctgccatcagccagatctgagacaggaccttgccacgctggcctctttggccatagctgaagctgtggggccagttgatacctgctggcaggaaatggctgttttttaggtttgtatttatgtgccgccacttttgtaaggcctgggagatcccagggtcctccaccctccccctgaccacatacaaaggcactctagttcaagagtgaaaagtctcacccaggaggaacagccctccttgaagcaatggcagggccagcagggaggtgggcatggcagggaatggagagagtgagccagacagacttcacctccttactggacacagggtcaagggcgagtttcaattgctgctccctttactttctctacctgtgactactccctggaccaatcctgaggagggcacattttccagaagccacgtgataggggctggtttctgtggagccagaggcagagacactgaacttgagctcacctcctaacaccggcagtaaacttcctggaactttgccctcaggtgcggaggggacagaggaccctggcactctgttagggtgctgtagaagactagattgatggtagtttggcctgttagttcctgttttggccatgacttttgcagatggcaagtcacacaccctcaaagggaagctacacgggccaaatcgggggagtgggtggggaattttctcctctccctttcctactataatagtatttaagacatatcagctccagagatgagtcctggagccttgaattttgtttaacaaaataattgtaggtttctctctgtaataacaacgctggaaaggcagagaacctcttttatgctcatgtcttgcatttattgagatgactgtttctcatgcctttatgttccttcatgtaagtaaagtggacctttgtgctc

SEQ ID NO: 7393 - DNA, 259 bp, Homo sapiens
aggctgtggattcaaggctccctgccccccagatcatttccccaatcctggcaaaagcccaaagatcccagggtcaggagagacccctctgtatccccaggtccctcccagaactgactcctaaggtctccagccagggcttctgagatgcaaaggtttggcctcaggagagtcaccttttctcacggccctggccttaactcatatcttaggcattcctggccccagggccctaataaacctgcttttgtcttctgcc

SEQ ID NO: 7394 - DNA, 1374 bp, Homo sapiens
cgctcctgagtaccagcccctgtcacatctgactgtgggtttcaagtgggaagggaaggagttctacttgtcttgacaccatagaggtggcttgagaagatgtcctttgaagagccagtatagtttctgtgccctgcagcagcccaagtgctttaaagccgtttcaagctgtatagtttgcacacccatcccagtggaggggaaaggggataagtgtttcaaggcaaccttttctgcactttgctgcgaaaagcaaagggccttctatgaaggacaaaacttgcagaattgggtgtgtgggagagcaaaaaaatactgtagatcttcaaagagcatctccacaacccacagccttcttcccaatagtgttaactctgcatttttacagcgtagcatgtgtgtagtttttggctattactggtgtattatttgggggagggagggatggggaggggagaaagggagatgggtagcatcattttgattaacatttggggcctgataggggaaatggtgaagcaatggaaaagaacagacaactaatgatttgcttctatgtccagaatattttacctttaaaaaaatgtcattggcaccataaataaggactgtgagagactgtttaaaagctgtgaaagtctgaaacctataagccaaggtgttccctgcctaaacttattgctgttcccacaaaggactaagcctgttcataagttaccaaagttgccattttggagatggaaattgacgaggagggaaggtcttttattggagagtatacagtacaagcagatcattctgccttagaggtgctaattcccgaaattagaagaccctttcttttccagtaacgaagttataaatatcagcttgttcatccaagccactggctgaggtgttaggaagaggaagagggtggtagaggaggtaagacagtagggaaagacaagggcccatgctcttagtggggaaaactcttggagccgtttactttgagctttgaacactgaaaccattgttggcagggttcagtcactgacagcacaagtttcactgaattgatccaagagtttagtgatttcaaaagccttggtctcaggagaagattaaactttcatattgggcagtggttcactttaaaacacacacatacacacacaaaacaattttttaagaaatcctaataagtaacatacccaaaatgctctgtcttgagtcatgagaaccatcagttcttgatattgtctagacttgcatctagagctacgttgtaaaattcttttaggcatgtgttagatttctgtgtaaactttgtttaaatgtaaacttcatactacattgtcagtttttgtcttaataaaactatagatttat

SEQ ID NO: 7395 - DNA, 377 bp, Homo sapiens
gaaatatattcttccctctctcctgcctttatgaggaaactgatcatcaaaagttcccactccctacttctgccaccccaccaacgccttggactcctctctttgctgaagagacccaagtctcttgacacctcagagtgactgtaagctaccagtaagacaagtgggaagaggcacgttcatcaaacctgttactaaaccagcctagtcatagctcatccccatctctaaatgtgtccacacaaccacatctgccttttccacaagcttttcacaaagaaggtgagagagaaggaaaccttgggaggaggacattactggttgttctggctggtttgaaaagcacaaataaacttgggatgtggttccttgccatg

SEQ ID NO: 7396 - DNA, 102 bp, Homo sapiens
actgaacctagccaccaatggggcttccaggcactggagcgccccagtccagccctatcccaggctctccccaaccccaggcctgggcttcactggcctggg

SEQ ID NO: 7397 - DNA, 409 bp, Homo sapiens
cctgtttcctcctcccggtcctttcgacccccgcgctccttggccgtctactggaaaaatcgagcctctcccaccctcagtcgcatagacttatgtgttttgctaaaattcaggtattactgaattagcgtttaatccactccctttcttcttcttctaaaatattgggcactcggttatcttttaaaattcacacagaaaaattccgtttggtagactccttccaatgaaatctcaggaataattaaactctagggggactttcttaaaaataactagagggacctattttcctcttttttatgttttagactgtagattatttattaaaattctttaataataggaaaaggggaaagtatttattgtacattattttcatagattaaataaatgtctttataatacc

SEQ ID NO: 7398 - DNA, 1463 bp, Homo sapiens
tgggaaagggcgaacgaggattaggggatggggaggaagagagagactgtggagctctggggggcaacctggaggtctgaaaagaggagccagagaaggtggtacccaggcttcctggtcagaaccggcctggagctccttcccttccccctggcctgagaggttgcttttaagtcttccaccccttgttccatctgcctgccaacccatcggaaaggaatccacatcatattggagatgaccccatcaaccccagggctccagcactaccaagttggaattccacgcccgggagtggggtagaggaagacgagacaggacgaggcagaaaagcacattttaaaaaccagacaagatggctaggccatcaccaaccaacggacttaccttacatctttgtaggtaattccccccaaatcttgatttttttttttcctcaattatcctttaaaaaataagaaaacacatttcaaacccaaaaggcacaaaacacgttcccttccaactttcccaaaacctcaaatttgttcccatttgaggtttattgaggtacacttctagcccccggtttttctgctctagaacattcatatctatacatcccacccccatcaattacagtttttagagggctcagggatggtgagagatcctgaaagagctgcctatattataaattatatacatttttttttaaggaaaagtgtggaggctagggcaggcaggttgttaggactgaaggtttgcccattctgctgcctccatctcagctccagctccatccccctctccacagaaagcagttggtgacacgaggttctatacttttcttctgttgctctcttgacttaacgtgaaaacagggtatatttgaacaaactgtcccaggcaggggctgggcagggcctgtgtgccttgctcagcctcctgacaggacacttttgttgcacttagaatttacattttaatggatgtaaaaacaactgtgagagatgtctgggcctgcagaagtccagcattgctcaaaaaagcgtgtgttctagtgaacattttcatatatatttattggttatagcctgttaaaatattttcttttttgtattatttatccccctacattatgtatttatatgagggaaaaaaaggaaaaaattgtacttttttagtatttacctgttacaaaggacattgtgtttcctgtcatgtaaaaccagctattttagttactattgtactctagaaaagagctgtagatttatgttaaactcgtacttacgaacaattgtaattagttctaaaaggcatgaactcagctcctaatcgtcactgtatagtcctgaatttgtagaactagagttaattccctcttggaactttctttgttcttcagtagttacttttttccttacctaaaagggttgtctgtcaaacaattcttgaataaactttctgttatcaatttt

SEQ ID NO: 7399 - DNA, 1214 bp, Homo sapiens
tgcccccgcacgcgggagccacgaacctcggggtgggggtgggcagtgagtgcaggggatggggtggggggacaggagggggccctggggcctgggccccggaaaaatctatctgccctcccccacactttatatacgaataaacgcagaagagggggaggggaagctttatttatagaaatgacaatagagggccacggggaggcccccccagaagcaagattcaaatctcttgctttctttcttaaaaaaaagaaaaagaaaaagcaagaagaaggaagaaagaaaaagacagaaagagaaataggaggaggctgcagctcctcgttttcagctttggcgaagatggatccacgtttcatctttaatcacgccaggtccaggcccatctgtcttgtttcctctgccgaggagaagacgggcctcggtggcgaccattacctcgacacccgctaacaaatgaggcccggctcggccgcctccgcctctgctactgccgctgctggaagacagcctggatttcctttctttgtcccccactcccgatacccagcgaaagcaccctctgactgccagatagtgcagtgttttggtcacggtaacacacacacactctccctcatctttcgtgcccattcactgagggccagaatgactgctcacccacttccaccgtggggttgggggtgggcaacagaggaggggagcaagtagggaagggggtggccttgacaactcaggagtgagcaggaaaattgagtccaaggaaaaagagagactcagagacccgggagggccttcctctgaaaggccaagccaagccatgcttggcagggtgaggggccagttgagttctgggagctgggcactactctgccagtccagagttgtacagcagaagcctctctcctagactgaaaatgaatgtgaaactaggaaataaaatgtgcccctcccagtctgggaggaggatgttgcagagccctctcccatagtttattatgttgcatcgtttattattattattgataatattattattactatttttttgtgtcatgtgagtcctctctccttttctctttctgacattccaaaaccaggccccttcctacctctggggctgcttgagtctagaacccttcgtatgtgtgaatatctgtgtgctgtacagagtgacaatagaaataaatgtttggtttcttgtgaccagc

SEQ ID NO: 7400 - DNA, 952 bp, Homo sapiens
gcccgcccagaggagcccagcggcccaagagcccgtgccacccccagccctggcccctccaatcctccccgctctgccgccgcccgctggggaccggttcccacaagcctgcctcgccttgtgttacgatatttcgtttggtcttaggtcttcctgtggctccctctctcctggactggttatcttgttattattgttaataataattattattattattttccttccatgctcccaactcccttctgcttgtcccaaatccgccagtgtttctgaatgtttgtgtctgtggttgcagtctttcccccaggaaaaaaaaaaaaagaaattcgcatgtttaatgtgaactctcccctccccatctgtgttctaacttatttataaaaagatgatcgctgtattttgagtttcagctggaaacttctgtaaggggcagcagttgaggtggggtagtgccgcagtggggtcaagctgagctggcttcggagatggagtcccttttcattctcctcctcctccctcctcactccctaggcccaagtctcctaggggcttggtcctagggtgggaaggggctagggaggaccaaagggatggtattgagaagagagaaagaagatagtgagatttaagttcctgctgcctgggtaggccccacaaggcctggtctgggagtatacggaaacaaaaatgatcctcagtgcaaaatgtcttgtgtatttctctgtgaatccatgggtctggctagagggcccaaagcttgtaaatatggggatagtctgggtcagacccatctctcccttacccatcttgcttccaagaccatttgtagtgagcgagtggatgctgtgctacgtgtgaaatctgtctttgcggggcctgtctcagtgattcgcttttggtatttgtttgtagctttcctggaagtcaaataaatgtttcccccactcca

SEQ ID NO: 7401 - DNA, 676 bp, Homo sapiens
aggtgctggaaagggagggaggacgcgaggggaaaggcctgtggggagccgagggcgtcagagagacccgggaaggaaggctctcgggtgggggagccaggagacctgctctccggcgcagacaggcggggcccagcgctctcctggacgcccccgcccgcacagctcccggcgggtgctctgaggcctcactactcgagcccacccagcatcccgcgcgcccttccttcccgaggaactcgcctcagcctgatcaggcttcctggtgagaactgaggagcggactcacttgatgtttcctggaagcagagcaaaatgctcttgtccctgtcgcgtctcattttgtccatgtcccccgtgcacggttcaatggtagattcgctgtcccctcagcgggggccttgaagactccctgatcccagacctgtcgtctctcccaccccctccccaaagccactggaaggagcacatactacctagaagtaagaagaggagcctcagaagaaaacaaagttctattttattaattttctatgtgttgtgtttgtagtcttgtcttagctctggacgtgaaatacttcgatgatgatgatgatgatgatgatgataataataataataataacaacaacaacaacaataataaagatgtgaaaactcgacgctcggtcacctc

SEQ ID NO: 7402 - DNA, 602 bp, Homo sapiens
gggatggagaaagggcagaggaagagacatgagaaagggagaggaagagaagcccagctctgggaactgaatcaggaaactcaaatcgaatagggaagtaaaaaaacaaaacaaaaaacaaaaaaaacaaaaaaaaaaccctatttaaatgaaaggagtttaaaaacattttttaaggagggagaaaggagaaattttggtttttcaacactgaaaaaatactacctataggaaagtctgtcaggtttggtttttttgtacaatatgaaaaggatattatctacctgttctgtagctttctggaatttacctccccttttctatgttgctattgtaaggtctttgtaaaatcttgcagttttgtaagccctctttaatgctgtctttgtggactgtgggtctggactaaccctgtggttgcctgccctcctgagcctccgccttcccagcagcggcaccaaggggccttagggagccccaaaacctaccactcgcgtgttccccaagcgcctggctgctgcttcttgcttcccgtcccccagccccatgctcccttttacattctgtgtgtatctaaaggatggaaaaataaaacgcaatta

SEQ ID NO: 7403 - DNA, 855 bp, Homo sapiens
gcttcagctgggactgccagggccgcggccgcccgcacgtccgcgggtcccggccgcgccgccgccgcgcgcccctgcccgagagagctctggccccgctagcggggccaggagccgggcctcccaccgcagcgtcccccgccgcgccagtccccgctagtggtagtatctcgtaatagcttctgtgtgtgagctaccgtggatctccttcccttctcttgggggccggggggaaagaaaaggatttaagcaaaggctccctcgccctgtgagggcgagcggcaaaggcccggctgagccccccatgcccctcccctccccgtgtaaaaagcctccttgtgcaattgtcttttttttcctttgaacgtgcttctttgtaatgaccaaggtaccgatttctgctaagttctcccaacaacatgaaactgcctattcacgccgtaattctttctgtctcccttctctctctctctctcgctcgctcgctctcgctctcgctctctctcgctgcgtcctcatttcccctcccaatcctctctcccctctgcaaccccccagctcgctggctttctctctggcttctctcttttcctcctccacccaccccctttggtttgacaattttgtcttaagtgtttctcaaaagaggttactttagttagcatgcgcgctgtgggcaattgttacaagtgttcttaggtttactgtgaagagaatgtattctgtatccgtgaattgctttatgggggggagggagggctaattatatattttgttgttcctctatactttgttctgttgtctgcgcctgaaaagggcggaagagttacaataaagtttacaagcgagaacccg

SEQ ID NO: 7404 - DNA, 1736 bp, Homo sapiens
agattaaagattacccccagtcctccctagctcttccccatctcactcttagttatgtgacgactgcaaagccagtgctgtctgggatgtattcaagtgaatggggaagggagtctctcttccaagtcctttatctgcacctagaacctccctcctttcctttgcccttacctgtctctctcttctctctaggtgtcaggagaaagttttgttgatttagaagatagaaatagttggttcctaagaatgtgatgggccacaaggaaagagagaccccagtcaagctcctagtatgccctgtaatttttctgggaagtcctagcccctcacttccagcttgcctgtttcttctctacacccacccaaaagtcacccagggacactccaactctacacagctcagcagacatccacacacagtaatggggtgagctcacaaccaccattcagtcaagtgaggtgacactccagttgcagaccatcgcacaccaaatttggcaaaacagccctcagactgtcaggcaagcccgggttctacccctaatgcaaatacccaccagggagatgtctagaggcagactcctgagtgaggtgttgcagcccaaaggctgcagcattgccataccattcccatggagttgccaactattctcaggccaagggccatggggaagatggagcaaacctagcccccaagccggtgggctagaaagtacaagaaaaggcagcacgtggttttatgaagctatcttaggtggagctactccccacctcccaccaacatatacattttgttgcaggaaatgtttaattccgcatgatgtttccctctccttccaacaaaagaaggtcaaactgtgggtcgtagagccttgacaatgttgtcctcctgttcatctgtgcaccacttgacagactgtagcttctcttgctctcgaccggccctgcattcttccgcaccctccctagctctgaaatcaactctcttcggtcgtatccaccttgcacccgcaagtcaagccgccccttgtagaaaaatccctccaccttccgttccccgctaggtcaaccccactgtagacaggaaagccaggccaggagagtccgaatgagaatttattgtgaatcgattcccaagctcccttccgggacaagtggtctgggacagggaggagcaacggccccagcgcgcaacgctctgcgcgttcctccgaatcccgtcggcttctcgacccacgcagagaagccccgggcttggcggctctagccccagcgccaaaggagacccgccccagggccgggcttggcctcctgcttcatgggcctggatgcagatctgcgtggctggtgcgtgcgcgcgcttctgggaaacagtcccgcgtgcaaaggaaaggggcaaaatggcacctaagcatcagatggaagcttactctctgcttccgttcctccccctgctcccctacttctcagtccccttcaatttgtagactcttgctcctgcttctcctgatcctgcaaggggacattccagtagaagttttttgctttgtcggtggctgtcgtgaaattgtgcttgtgtttcgtgatttctttgggggtgattgtctcgcttgttttcagttgtcgattatatgggagggttctgggtgggagtggggagggcgaggggcctagagctctaattgtttgttttggaagaaaaaaagaaaaagaacaaaaaatatatatcactctag

SEQ ID NO: 7405 - DNA, 71 bp, Homo sapiens
gcacaggagttccagaccagcctgggcaatgtagcaagacgctgtctctatttatacaataaaattttttt

SEQ ID NO: 7406 - DNA, 2026 bp, Homo sapiens
gagatctccttgcctgggtgggaggagcgaaagtgggggtgtcctggggagaccaggaacctgccaagcccaggctggggccaaggactctgctgagaggcccctagagacaacacccttcccaggccactggctgctggactgttcctcaggagcggcctgggtacccagtatgtgcagggagacggaaccccatgtgacagcccactccaccagggttcccaaagaacctggcccagtcataatcattcatcctgacagtggcaataatcacgataaccagtactagctgccatgatcgttagcctcatattttctatctagagctctgtagagcactttagaaaccgctttcatgaattgagctaattatgaataaatttggaaggcgatccctttgcagggaagctttctctcagacccccttccattacacctctcaccctggtaacagcaggaagactgaggagaggggaacgggcagattcgttgtgtggctgtgatgtccgtttagcatttttctcagctgacagctgggtaggtggacaattgtagaggctgtctcttcctccctccttgtccaccccatagggtgtacccactggtcttggaagcacccatccttaatacgatgatttttctgtcgtgtgaaaatgaagccagcaggctgcccctagtcagtccttccttccagagaaaaagagatttgagaaagtgcctgggtaattcaccattaatttcctcccccaaactctctgagtcttcccttaatatttctggtggttctgaccaaagcaggtcatggtttgttgagcatttgggatcccagtgaagtagatgtttgtagccttgcatacttagcccttcccaggcacaaacggagtggcagagtggtgccaaccctgttttcccagtccacgtagacagattcacagtgcggaattctggaagctggagacagacgggctctttgcagagccgggactctgagagggacatgagggcctctgcctctgtgttcattctctgatgtcctgtacctgggctcagtgcccggtgggactcatctcctggccgcgcagcaaagccagcgggttcgtgctggtccttcctgcaccttaggctgggggtggggggcctgccggcgcattctccacgattgagcgcacaggcctgaagtctggacaacccgcagaaccgaagctccgagcagcgggtcggtggcgagtagtggggtcggtggcgagcagttggtggtgggccgcggccgccactacctcgaggacatttccctcccggagccagctctcctagaaaccccgcggcggccgccgcagccaagtgtttatggcccgcggtcgggtgggatcctagccctgtctcctctcctgggaaggagtgagggtgggacgtgacttagacacctacaaatctatttaccaaagaggagcccgggactgagggaaaaggccaaagagtgtgagtgcatgcggactgggggttcaggggaagaggacgaggaggaggaagatgaggtcgatttcctgatttaaaaaatcgtccaagccccgtggtccagcttaaggtcctcggttacatgcgccgctcagagcaggtcactttctgccttccacgtcctccttcaaggaagccccatgtgggtagctttcaatatcgcaggttcttactcctctgcctctataagctcaaacccaccaacgatcgggcaagtaaaccccctccctcgccgacttcggaactggcgagagttcagcgcagatgggcctgtggggagggggcaagatagatgagggggagcggcatggtgcggggtgaccccttggagagaggaaaaaggccacaagaggggctgccaccgccactaacggagatggccctggtagagacctttgggggtctggaacctctggactccccatgctctaactcccacactctgctatcagaaacttaaacttgaggattttctctgtttttcactcgcaataaattcagagcaaacaaa

SEQ ID NO: 7407 - DNA, 734 bp, Homo sapiens
aatcagactggatctctgccacttttcccttcctacctcttaacttgcaggaaacaatgtgtctcttccgacagtgtctccagtgttcacagaatcaactgaagttttgtttgctcatctagatatactggtcttccattagttcctagtagcagcaatggggccaacagccctgcctctgttccctcccagttagcttacagtgctacaggaccatgatttctggggttggattggtgctgccccaggacacactccagttgccgtaccagtggcacttctctgggttcttcacatggcaccatcatccagaatactcccccagataaagcaacttcgggagtagtgtttcagagaaggactcatgatttccaggagtcaaaagccctcagtccaccaacagaactatgccagttggtcttcgtctccaagataaaagatgaggtcagggatgggcatggtgcataactctgagccctgagtgagagaactgaggcagctgcaacttcacaaggtcaaggcccgacctccgcccatccccaccagcccaaagacttgccacctcagtgcccgagcatcctctggtgacctccctcaccagcccaacttaatctcaccagtgaaaacagaggtgaggcgagagtacccagcctgaagatgcttcttctatcagcctgcagaaatgttacactttcccttcaggcatccattaataaaagaaattgccatgctta

SEQ ID NO: 7408 - DNA, 376 bp, Homo sapiens
ctgcatgtggaagggcacacagcagcaggcagggaggaggcggaggtggcaaataaacctgggcaattttgtttatacaaaaaatagaaaaaaagttccaagtttttctttcttccctcattcttttatttttgaaaagtgccttcacgttgcatttttattggaggaaaacctcgctcgttcagtaagcataatctgattaacacagagaacggcaagcacatataaaatgatttttgtaggtcatctgcaagttcatggaagagctgggcctagaatgtgggttgtttcctggcctgtctagtctttgtagctgtgagacatagattacagcctatgctaattcaaaccttttaaataaaatgttccttatctc

SEQ ID NO: 7409 - DNA, 151 bp, Homo sapiens
ctctgaccacacccagctcaggactggattctgcccttcacttagcacctgcctcagccccactccagaatagccaagagaacccaaaccaataaagtttatgctaagtcgagcccattgtgaaaatttattaaaatgactactgagcact

SEQ ID NO: 7410 - DNA, 522 bp, Homo sapiens
tggcatggagccctgccctgagtgtctgtccctcttcagccaagcccaagtctcctagacccccagggagccagtgaactgtcaccttctcttcatcacagaatgagtaaagatccctgaacaaatgcattgtgaacccattccccactcccaccttcaactcttttctcccattatttcctccacctgctgggtctctgctgaccttgctgggaacactctgaggacagtgtggctggccgagcggttggccccatgggtggtggggtgtgagaagcctgcaataccccaagaccccagagggcagtccttaggaagcacttacaccacctgggaacccctccgtcttttccctctactctcatcctaggaataaagcatttccacgccagagtagtttgggctgggggccagggttgggtggtcctgtccctccatatcatgtcctaccctatggtcctgttcctagtcatttagatcaccccagatggcctgatgacaacaagagtttgtgaagttatg

SEQ ID NO: 7411 - DNA, 876 bp, Homo sapiens
gtctggccgcctgcaggggggtacccgggccaacggcggagggggcggggaagggagattcggcaaagacagctttactactcccttttccctttggctttgttatgtccctctgggaatttctggaatctcgtatttgggggcttggggaagggggctcagagccgtccctatctattcagttaacccacctcggctgcctcccccactccactgtgcacggttgagttctggagtctgacccatcgcggggtggcgcgcaaaccttggaaggcagcagtatttcctggtcctcccaactgggaggaaggggcccccccggcaggtgagagaaggaacatctcccgccgctgtaacttgttgcctcgggctgcgtgaccgcccctcctccagtctactgtggagggaacccaggatcctgaaattctcctggccgcaagaactccccacagaggcagaagagggtctccacctatggccccaggcctttgcgatcttgcttcacccaccgcgaccccacactatttctgtgctgtccacactctcttgcctcccgacccccgcactcccttctagcacccccaaaggaaaagccagaggaacaatcgcctcctggtggtggtacgaggtagcgcaccgtccggctcgggtccggacagccagtaacctcgcagagagtgacggtgtctccttgcatcccagcctcgtctatgcagcaagagaccagggacttcaccaaagtcaccctcgcgggctgggccttccacgcatcccccccaccccccatggaacagaaagccatgtttttaagcagaaccagcgaaacccaagcccctccttcctctggtgttttacaactataaaggaggtgaaggg

SEQ ID NO: 7412 - DNA, 3289 bp, Homo sapiens
catccgtctccttagtgtgttctccaggagacacgtccccatgtgtgagcgtgcacagagggagtcggtgagcatttccttagttctcagactctcctccgcctctaccaagagcttcgccagtgtcactgaatcaacagatccaagggaatgaacaagaagactaccttgagctcacagagggactgtcatctaaaccaggggaaccactgaactaaagcccaatttgcttgcattttctgatgacttttataagtttcaaatactcagacttgtggaattttataatttcatatcagctgatgaggtatgcttgcttttatatcccagacttctcctcaaagaggggataggcctggtttcctttgtactaatcgggaaggctgtgagattaatccagagcattaattgtatcactgtgtatggtaaggaattcttttcagcttttggtgccagctacagagttgagctggccatgtttcacagtatatcaagcattatagagaaagacagaaattttcttctttgtgtagctctcctaacgcactctttattttactacagaaattattttagagtttttgtatagacttctttggtagtctgtttctaaaatgaaatgtatttcaataagcagtgtaattttttcagtgtagctgaacctatgttgtaaaatagaaaaaaatttttataatcatcaaaatgtgattcttaaagatgcatataacttctataattcaaagctattcttacatccgtacaactcaaaaggtgcttcagagactagatgtatctgagagggtctccagaccaggttactgcaaaaatgaggttttgctttcaggatttggcgtaaatacttggtagttttgacatctctgcttaacactcaagagaggctccctaatgtgctcctgtcctccatgttctgcttggcttcgttagtgcattacatgaaatgatttgcaggggatggggccttttccagggaagtcacctaaagcttgcatgttttgaaaatttgaataaggctgtttgctgacaggaggaggaagtagtggagatcatttcatctcagtcacgtctgtttctcacttcccttaggaattgtgttgatgtttaacttttatgggatgacaaattgaaatcgctcattttgaggttgctttatttttctagaattgttataagaagctaaaatagtaaacttaaaatcacaaacatgacattgctgatagtggctgagaaattcagatgagaagacaaattggttatgaattttgaaatatctattatatgtaaaatgtggatatgttcacaaccttgagctattttaacacagtttaaatatagtgagggaaaactcctaagttttactgccctgtcctctgcaaattatgtaataccagcattcttaggcgataaagagagcagcacctctagtacctttaggcagattactttttcaagtttggggaacttcaaaagaccataatcaaccaggagcttattataggaaaggctgaacagaagggctagtgtattgattacacttaacagatcatatttatccagactcagtatagcttaaaattttgtatttctttatctgagagaactgagttcccaggctaaatcacttacctcccaccccctctccaattttttttttaagagacaaggtcttgctatgttgcccaggctagagtgcagtggctattcacaggtgcagttatagcacactacagcctccaactcttgggttcaagcaaccctgcctcagctaaccaagtagctgggactacaggtgcatgctaccatgcccagtccattttttaatcttgaaatttcttcatttttctttcttcggtttcttaaaatctttgcctgaatcagaacgctggcttttatttatttttttatttttaatattaaatgtgcagatatgcttcgagcacttttctaactaatgagctctgtggtaagaaaaaatgaactctttcaattgagattaagtccatatttttcaaacatcacgttctctattggctttttggtttagtgtttctaaattttctccttctgattttgcctgtcttatataatgagcataggaaaattttggaatgaggcagaaaagtatatcaagacatacttcctggttttggatgtaagttttaaagaatggtatttttaatatttgtacacattctttgagcacccaggtacccaagccaataaggaaagttaattccttgcatatgactgttatatctttagtggttgtctccctctccctccacagtctccttggcattccatgacaagtttgtcaacctacacttttatatagacatatcattatttcatggtcaagcctgtagtattaaaatgatttttttaaaagatgtaaactgtgcttagttaattggttatattttgttctgttttttttttttttttttttttttttttgaggcagagtcttgttctgttgcctgggctggagtgcagtggcgtgatcttggctcactgcaacccccgccccccgggttcaagtgattctcctgcctcagcctcccgagtagctggaattacaggcatgcgccagcacgcccggctaagttttgtatttttggcagagatggggtttcaccatattggccaggctggtctcaaactcctgaccttgtgatccgcccacctcagcctccgaaagtgctgggattacaggcgtgagccaccacgtccaactgccttattttgttctgaataaatttacagtattgggcagcaattctggattctagacttgagaccacagaatcaaccatttcatgaggttgtactgtaattatacactggaatattcaggtagtcatctttgatttttcattcaagtaaatatagccataagaaaatatctgctatacaggaaaaccagtattaagcaaataccaccatccttaacagaaacaaaaatatatatatatattatttttaaaaattagcattgtcatacagtacaattcttagtgaagtgtattgtggaacaatttagaaacttcctttttttcccctagattaaggatactttccttgacttgagacttgtggtcttcaggaaaactactcagaatataatgactcctcatcagtatcatattgtatataaataatgaaatgcattaagaatattcacaacattgaacccaggaggcggagcttgcagtgagccgagattgcgccactgcgctccagcctgggcaacagagcgagactccatctc

SEQ ID NO: 7413 - DNA, 934 bp, Homo sapiens
gggcccaccctgcctgcacctccgcgggctgactgggccacagccccgatgattcttaacacagccttccttctgctcccaccccagaaatcactgtgaaatttcatgattggcttaaagtgaaggaaataaaggtaaaatcacttcagatctctaattagtctatcaaatgaaactctttcattcttctcacatccatctacttttttatccacctccctaccaaaaattgccaagtgcctatgcaaaccagctttaggtcccaattcggggcctgctggagttccggcctgggcaccagcatttggcagcacgcaggcggggcagtatgtgatggactggggagcacaggtgtctgcctagatccacgtgtggcctccgtcctgtcactgatggaaggtttgcggatgagggcatgtgcggctgaactgagaaggcaggcctccgtcttcccagcggttcctgtgcagatgctgctgaagagaggtgccggggaggggcagagaggaagtggtctgtctgttaccataagtctgattctctttaactgtgtgaccagcggaaacaggtgtgtgtgaactgggcacagattgaagaatctgcccctgttgaggtgggtgggcctgactgttgccccccagggtcctaaaacttggatggacttgtatagtgagagaggaggcctggaccgagatgtgagtcctgttgaagacttcctctctaccccccaccttggtccctctcagatacccagtggaattccaacttgaaggattgcatcctgctggggctgaacatgcctgccaaagacgtgtccgacctacgttcctggccccctcattcagagactgcccttctcacgggctctatgcctgcactgggaaggaaacaaatgtgtataaactgctgtcaataaatgacacccagaccttcc

SEQ ID NO: 7414 - DNA, 1492 bp, Homo sapiens
gatcctgcttgttgtaagactccgtttaatttccagaagcagcagccactgttgctgccactgaccaccaggtagacagcgcaatctgtggagcttttactctgttgtgaggggaagagactgcattgtggccccagacttttaaaacagcactaaataacttgggggaaacggggggagggaaaatgaaatgaaaaccctgttgctgcgtcactgtgttccctttggcctggctgagtttgatactgtggggattcagtttaggcgctggcccgaggatatcccagcggtggtacttcggagacacctgtctgcatctgactgagcagaacaaatcgtcaggtgcctggagcaaaaaggaaaaaaaaaaaagaaaggacattgagttttaacagaagggaaaaggaaagaagaaaagatttttgcagaatttctcaaaaatcagtttgtggattccagtagtatttatattgagagaaacaaattttagtccttctaactgtgctaaaacttggatatttgtgaaaactccttaccaccatacaagcatcagaagagctctcttgttgttagcacttattgtttgcaagaacagaatacatccttttatccttttatgaaaaatgacaagtgaaggcaaaaggggaaggttatttgatctggaagatgagtgttctgatgtggtggcttttgcaaaaatctttattggtgttgaaaactggaaaaaataactcatccagaattcatattgtcttgacaagaactatggttctctgtttttagatattgtggaaaatgtttttgggcatttttctctgattttatttcttctcccccacccctttttctaaaaaacaaacaaaaaaaaaaacacacaaaacaaaaacagaacaaaagaagagagaaggaaattttatcaattaaaaatgctgtgtgataaaatcccagcccagattgctcagctgtttgtacctgacttgccgcctgcataggagccagttctgttccttctgactagcccctcttcctccaggggagaacttccaaatgttaatttttttttttttgaaaatataaataattactattttgtactgtgtggtatctctggtcttttgtttcactcacctgccttgtctcttgggtctgagtcccttgcttaagggattttgaagtcctagttttcagcttgcagagattatgtctgaaatgcctaatgagtcgcagggatttgttgagactccgtaatctcaagttctctttgtgagctatcagcatctgccagtctcttgtcctccctgagtatctcacagtccatatcctgatgagggatcaggcccctacctctgccaaggcaagtaatggtagtgggcttttaaactgccccccgtatgttttaagacctaatccccacctcccttcttctaactaaatataaaaagatccaggggacataaatgtggagattaaataaagggaaattattgtctct

SEQ ID NO: 7415 - DNA, 130 bp, Homo sapiens
gaagagagagactacctccacatcaagaatatttaagttattatctcaaacagtgacatctcttgggaaaatggacttaataggaatatgggactgagttccagtcttttttaataaaataaaatcaagc

SEQ ID NO: 7416 - DNA, 928 bp, Homo sapiens
gggtcccacccctgccccactttaccatagagaccagtgccttggtggcaggtccctccccaggtcccctgagatggggtatggaggggcccttccctctcggccttcgagcactttctttcacttactgtgtcaaagccctgggtcctctttttgatgggcaccggcccctctgaacgtgatgggacctgccttctccactagtagctgggcagctcacaattcacacctgtgtacctgccacatccctcacttggtggaaaacacccagaaggtcttgagtcccccacccctgggtgtcagtccaaatgactgtataggaggcccttatttttgtcacagagcaagctggccatgaacgaaggagagaagacgccacagatttccttccctctcctccaggagaccataagatagatcccccatcctctcagccctattcccatgcctccctctcattggaggagctgaccaaagcagccctaacgggccataacacttgaccaattcagctgctggcagagggaggaaacaagtgttttcccaagtggcattttcatctcgctttcaccctgactaaagattgtcttaagtagcagcccagcccgcccagccccaggtgggtagtggggaggagagctggcattcctccaggtggcaaatggcgactctatactctccgcccgccccagggctggatggattagaaaaatgcctatttttcttgtatcgatgtagagactctattttctcccaaagacactatttttgcagctgtttgaagtttgtatattttccgtactgcagagcttacacaaaattgaagaatgttaatgttcgagttttcttatcttgtgtttagaggttgttttttgcagatcttggtgttaatagaccaaataaataaataaatattcccagcagcttg

SEQ ID NO: 7417 - DNA, 333 bp, Homo sapiens
aagcccccaccacagacttcccagaggacacggtgccgcttcttcctacctggatgtcacagctgacaagccggcaggccaactctcttctctgtgtctcctgtcctcatcgctggcacttcacacaaggcccacactgaacccactgggcttcttcctggactctcagtgtcaagcagcagtcctgcataaatgcacagcttcgccgtagcaagctgcactgactctgccctccctcacactcagagttggcatctcactgcacagcagtgaggagactcgcacactctgtatcctgtgcctagcacacagtaggcactcaataaatgagtg

SEQ ID NO: 7418 - DNA, 1505 bp, Homo sapiens
gcacccatctggcctgcacccttgacaaaggaccccaggaccaggcagaaggcgcctccgtcctagccactcaggaatcatcgaggagcacagggaaaaggaactccctttccccctcccttgccccttcctccagggacccaagcgcttccagatgacaattgcatggaccaaggatgccccctgaacctccctccctctgcctagacactggggtacccctccagatgtggggacattccaccccagtggggacagccattcccctacctgctccaggagcctggattggctttaaatggctcatcatcttccagcttcttaaacttagtgcctgttcccagactggagaccttgggatgggggagagtgtggagggtttgcgggtcctgcctgtgctggggcacctggcaccgtggatcttaaaacttgccaggcctagttcctcctgagcctctggtggtctccccctgctcgagcggcccctcggccaataagacagtggacatcatgacgaggactccgggtggggacctgaactggtcaccgccctgcacttctagccctcatttaagatttgagggtgaaaccaaagaaaaccccctaagtgagggaatcttttaatatttgtggctttagaggaaagaactaaaggagccatctctctcccctctcctccgttccgagaggaggggtgggtctcagacgtttttcctatggacttatttcttccatgtccaggactttgcacaactttggttttaaaagctgttgaaaaataggaaaacaaagggcattgttcacagatagggccaagtctccccttgcaagggtgcctctgttctgtccctgcccccacctcaccttctctactcctccagtaagttggcagttttggtgccaaaccccaaatctccaaagagacataccaggcaagacaaacccccaaacacctcctttccggtggccttggaaacagattgctccgagctggagaatgtcgggtgaggtgtatgggagaggaggggagagttagaacttgtgcctttgggagtaaggggtaactgcctggagggctggtggcactgcccctccctgacccagacatcccaccaaagctaactttcccccacccctgatgcagtaaaacattgaaaaaaaaaaaaaaggagaggtagaagactgtagctatatatataaatatatagtaagttttttttttttaagagcaacagagagaagcagcctcctccctgctgcggtttcctatttatgtggccatgttcctcctggacggatctccctgtgtgtttcaagctgagagatgtgggctccggctggatttgggttttgtgggaggtgcaggggccaagagagacgtggtaggtctccaagagtcccacccgggggggaagaagcaaagccatctcccaccccctcccagccttctcatttctgctttcttactggactcatctttatatataatgttaataaaaaagacg

SEQ ID NO: 7419 - DNA, 221 bp, Homo sapiens
gggagggtgcacaggcgctggcacccggcaggggcagccactggctccgcgggcacaggcctcaccagggaggctggacctgggcgctgcacttgggctagcctggtcccacgctctcaggggggacatgctctctcttaccctgtcacttggtctagacccagagaccccagaaagggagaccccagggagagggcctagtaataaatcctattttgagg

SEQ ID NO: 7420 - DNA, 1595 bp, Homo sapiens
caggaatcattccatgactggacaataattaacccccctcccattgttcctccctcccctgtcctcaacaccccacccctcccccttccagcctggggacaggtgccccgactccccccacccctccaccccacctcccccagcttcagggaccagagggctcatatcacaggcccccttaagatggcctgggcagacagaggtggctagaagggcagcctctttcttgccccatggggctgaggcacagaggccgagggctgccgagggctggcctggtggtcgacggacacaagcacctgcagatcaaactgccagactttacacactccagcttttgtctctggactggaacggggctggggctctcccagcatctgccaactgggggctgctccctgcccatggggcacctgggtggcccctgggcctcttgacttgagattctaccttctcggcccttccctctccccccatcattgtgccgtctctgttgcattctgaccctcccgcctggggggtgggggcgttgcctcaacacctcccccatccctgttccctgtcctgggagggatagagtccaccccagagcccggaggctgggcctggccctggccctgcactgatttctcatgtgtccttcgggaaaagggggagtgagagtgggaaaaagggagagttcaggacacctggtccccagctccccattgcctggggcagcagccctcaatttctccttgtgcctcccctcttccaggtgccaaatagccataacctcgtcttggaactgttatgtggcctctctggggtccaggtttcctggtcaagcctgggaatgccagggaggaaagggggtctggctacagcgaccctggtcttaggcaaggggaacatttctccctggagagtcaggtcctatcctgtgctgccctgtctgcccagcccagggcgatgcctggaagcctactgacattgcagggagtcagcctcgcccccaccccctactggttttccaatgttttgactggagggcaaaattttactactactcatctttttggagaccagggctgccctgctggcagcctgccttctaagtgaaatcgactctgtttccccactttaaccccaaattggggcttggaccaagggaggtgagaccacctcccccaggtcccctcccctttcaaaatccatctcattttgccacttcatgcccctgccctaactgggtttttgttcattttttaaaaacagaccacccatcccatccgttttggcttcttgtcccctgtaaatagaccatgacttcgatcagtatttcttgtccccaccccttcctatccccagatgtgcccccatcccctgaaggagctggctgtctcagtcctgggctcgcgcacttcaccccggcagatggagggggcggaaccgggtgggcggggccgcttcgggctgcttgggccagcggccacccctgcccagccgtcgggagggccgcatctctgtatataatatatatatgtatgtattgttcccggttttgtacggaccatgccctctgtcaggtcgtccccataaaagcagcccccaga

SEQ ID NO: 7421 - DNA, 1404 bp, Homo sapiens
actccctccatcccaacctggctccctcccacccaaccaactttccccccaacccggaaacagacaagcaacccaaactgaaccccctcaaaagccaaaaaatgggagacaatttcacatggactttggaaaatatttttttcctttgcattcatctctcaaacttagtttttatctttgaccaaccgaacatgaccaaaaaccaaaagtgcattcaaccttaccaaaaaaaaaaaaaaaaaaagaataaataaataactttttaaaaaaggaagcttggtccacttgcttgaagacccatgcgggggtaagtccctttctgcccgttgggcttatgaaaccccaatgctgccctttctgctcctttctccacaccccccttggggcctcccctccactccttcccaaatctgtctccccagaagacacaggaaacaatgtattgtctgcccagcaatcaaaggcaatgctcaaacacccaagtggcccccaccctcagcccgctcctgcccgcccagcacccccaggccctgggggacctggggttctcagactgccaaagaagccttgccatctggcgctcccatggctcttgcaacatctccccttcgtttttgagggggtcatgccgggggagccaccagcccctcactgggttcggaggagagtcaggaagggccacgacaaagcagaaacatcggatttggggaacgcgtgtcaatcccttgtgccgcagggctgggcgggagagactgttctgttccttgtgtaactgtgttgctgaaagactacctcgttcttgtcttgatgtgtcaccggggcaactgcctgggggcggggatgggggcagggtggaagcggctccccattttataccaaaggtgctacatctatgtgatgggtggggtggggagggaatcactggtgctatagaaattgagatgcccccccaggccagcaaatgttcctttttgttcaaagtctatttttattccttgatatttttctttttttttttttttttttgtggatggggacttgtgaatttttctaaaggtgctatttaacatgggaggagagcgtgtgcggctccagcccagcccgctgctcactttccaccctctctccacctgcctctggcttctcaggcctctgctctccgacctctctcctctgaaaccctcctccacagctgcagcccatcctcccggctccctcctagtctgtcctgcgtcctctgtccccgggtttcagagacaacttcccaaagcacaaagcagtttttccccctaggggtgggaggaagcaaaagactctgtacctattttgtatgtgtataataatttgagatgtttttaattattttgattgctggaataaagcatgtggaaatgacccaaacat

SEQ ID NO: 7422 - DNA, 2119 bp, Homo sapiens
cctctccttgcccctaagcatggtaataacagttgcatgtattgagtgcttaccaaatggcaagcattgtgctgattcccatgcctacacgatctcatttcttccttaccacatccctgtaagtaaggtgaaatgccagagacctagacggggtggaaggagcaagtgactgctgggatttgcaccaggtctgcctaactcccagatcactatgatttgccctggtgttgcattggcctggtattcttggttctcctttctaaccctcagttcttggaggacaagatacctggtgatttaaaatattattttagtcttgggaaactaatttcaatttattagtttttcattattctaagacttcttcctttgtataaacttacttgcagatggttgaaagatagcttgaatttaatgaaatagaattcagtgtgccaggagttaggttcataccaggtggggatttcagtttcagcaagttggcatcatttttatagggtaggacagttctttgttacagagacataacgatactgtactctccacattattttaaatattagttgcctttgtaaacagtttcccctcccccacccctttttcgataattttagtaggtacaaaaaggttgatagtaacctgtatttatttcaaagatgctaatttgtatgtgaattgattatgtatgtagtagctttttaccttttagaacttaagacattagatgtgtggctatgtcaacaataataatcaaagctaacacattttgagctagacagtattctaggccctttatgattgttgagcattaatcctcaaaatgaccctgtaaaatagttaatattatccccatttgacagacgaaaaaatagaggcacagtgaagtaacttgcctaagaccacacaggagtaagtagcagtgctggtatttgaaccaggcatcctggctccagagcccattcttttaatcagagagacagagaataatgctggactacctgggtaaaatttgccacacacccagcctgaagttctaaaagaaaaagctaaaaaatatggttaaaaactgtatatacaacacagtttaatctctctgcttcatatttcacatctgaaaagtggcgttggaaataatacctctttcactaggtgagaattaaatgacttaatgtgtattaaagggcttacatgggtattagctaatgcagtagtatgattgttttattagcatatgcattatccatatagctttggtttatattttccatagagcctaaactttatagatcactatctaaatgaaaatttacatcaaactagtgttttaatatgacagttctagtgttgtttaagtctaagtgaagatttagggcatcttcctgggttttgggatttgtgcagtgtggcttctgaccagctgcatagacatggctccaggtaacagtccctgggactgagcagtggcccatgttggctgttggagctttcttttccctcatttgttatgagtcaataaagaagcagaaggtttggacgtgctagccagtgggaaagggaacctgagatggagctctctgatcaccctttcagccccagggcccggctctgtgtgagaagtctgtcccaaaattctgggacggaccacctcgctgaccagctgaccagctgaccaggtctgtgtgttgcaggtgggtgttgggaagaataaatgtctgtatgccctggaagaggggatagtccgctacactaaggaggtctacgtgcctcatcccagaaacacggaggctgtggatctgatcaccaggctgcccaagggtgctgtgctctacaagacttttgtccacgtggttcctgccaagcctgagggcaccttcaaactggtagctatgctttgatgtcctgttgaggccatcggacagagactggagcccaggtgacaggagatggtgataccagaagtcaagggttggggtggcgacacggcctcccgaggaagaggtctgcttgatggtgactctgcaggagactctgaagtgactgctgggaaaccctttgggagacctgacctggggccaaaaataaagtgagccagcgtcatgaacgcatgctatttagggac

SEQ ID NO: 7423 - DNA, 1749 bp, Homo sapiens
gcttgtccccagcacctgctgcctcccagccttggagtttggattcctatggaattgggttctgctggacacaacctctttttagcatcagacctacctgccatcatcaaatggctgcagattggtacatgagacctcctctttgtaggacttcttcattccttagtcagggttccctgaaggaatgaggagaaatgggaggtggcgggggggcgtggggggcagttacctgcatgcctaaaggagtaggcttgggggtggggagagagaaaacatagccttttctagttgttatataaagctgtgtaaaggcaaggctcgtttctactaaatggtcagctgtcactacatttatacttttgtatgccacaaaccctttcattcctccctgggaatcagggtagatcaggaggaactgggggggactagaacaccacgctcagtaaatccagtctaaactgggaggtaggggtattcctgttttctttaggacctcagagatgtaagcattttagcagccacacaaaatctctggctatgaaagggacttcatgaccatccagtccaatataacacttgcagacagagaaactgaggtcttccatgacttgcctagtctcccagctagtttgaggcaaaactggattcccactctggtattctttcttccctttacatcattttccctcctttataatgtcctgagagaccagaactcacaccagaatcgattattcctcaggtgaagcatagactctttcatggtagacagatttcacgactcagagatagaaatctcttgctatcatcaggtcacgggcagctcctgtggagtcctgcccaacttatgtggcttccataaaatggcaacagtccaggctccttgcctaattttagagcattaactccctaattgccagtaagcaaggaggtggatctctgcaaacctacactgtctatgacagctctagttgtacttggtgtgactaaatacctcaaaggcaacctgcttctgcaggttttgaagtgtcagcttcataagacactgaggtttagaattgtttgattctagaccataactgaagggcataaatggaaacaggatatgaagggaaacaagtagcatcatggagctgaaaagtggtgcatcacccaatggctagcacaaacaaggatcacactgtccattctcttgtctgctaaattaagcattttcttgcctcctttgcttcatcttttcacaacagctggatagagggatcagaaatgactgtgtcatggtgctcattcactgcaaactcccagttgcaagctccttggctcccccggagggagcaagaatctcatagttcagagacacagagggccttttagccctaatgaccttttggatgggactgcaactcatgactatcctgatattggaagaaaggactttgttaatcttctcccccatagctctgctgcgtaggtctacatcttactcagaatcactacacattcctttagtcttcctccaagctccagagccattggtacaaatgctttattgaaactaaatacataatacacacaatgagatgaagacaatatagaagtccgcatagtcatcataatcccgttccttggccggttgaggcagctcagtggctgagcccagtcaagccaacccgcagcttcactcacgacttcaagatttgatgctaattcttttggatttctacagttattaaataagtgtctgagtgg

SEQ ID NO: 7424 - DNA, 558 bp, Homo sapiens
gttctgacccagccagtcctggtgactggcctctgccttccaccggagagactactgaccttctcacctccacccataccttctccccacagcctctgctgatgcacagagctgcctacacctagacacgtcctggcagggggcctcgggcactccactaccaacccagctccacccagcagtgtcctggggagaaggaaggctgagcctctccccagccttcatgccttccccaccctccagctcctcttggagaagctgttgctgagaccccccccccaagtcaatcagaaccacaacaggttggtcatcaggatggccaccctcccaggatcatccttcctctgttcctctttccctgccacgtggaaacaatcatcagatccttgccccaccccttgcttccagaaagggttttaaagcccatgccccaactctgccagcccccacctgccaggacgttctagcaggacatcggtgctttgctgtccatcttcccatgctgcaatttcttcctgagatttctataaatataaatgtatgtatgtattatattta

SEQ ID NO: 7425 - DNA, 675 bp, Homo sapiens
tgcagcagggacttttatcactgagtattatgacagtgtgcatcacctctgggccaaggacaagccattgatctaaatgcctcagatgcccgggagggcctctggtgccactgcatagtatatactaacatcattctgccaaggtaggaagcccctgacccccaagcagtggtgccactcttccaagcctcttggtgcacagtaaacctattgcttgaagctttgaacagctgagaagtggtctggagaggcagaagctgaaggttctatatccagtgtgttttatgtccagaatgtaagagagttgtctaagcagcagctgagagagagcggagcctatttctagccactcctgttgacagtgcacctgaagggctgggatgcgtttttcttggtgttgcatgctcacaactctgctgacattgggaacttatgagagaggaagactcgggaaagcacagatactggacagatggattctggtgtggggaaagcacagatactggacagatggattctagtgtgacttgtgactgtgaggtttcctataacatatttataaatgttactcaggttaaaagtatttaagaatacagttaactaattgtaaatatgctgttaaccaaaagagctttccctccctcactttttcctttgtaaacactcatgactgct

SEQ ID NO: 7426 - DNA, 752 bp, Homo sapiens
aaaaaagaaaatgtatcgtacaagttaaaatgcacgggcccaagggggattttttttttcacctccttgagaatttttttttttaagcttatagtaaggatacattcaagcttggttaaaaaaataataataaaacatgcatcatttttcatttgccaaccaagcacaaagttattttatactgactgtatattttaaagtatactctcagatatggcctcttacagtatttaagatatagcaaggacatggctgatttttttttataaaaattggcactaataagtgggtttattggtcttttctaattgtataatttaatttagtacaaagtttgtaaaatatcagaggatatatatatattgtttctacgacatggtattgcatttatatctttttactacagtgatctgtgacagcagcagcttcatgttgtattttttttactgaaattgtaaaatatccatcttaaagacatcaactattctaaaaattgtgtacaggatattcctttagtggtggaattaaaatgtacgaatacttgctttttcaaaaaaatgtattttctgttaaaagtttaaagatttttgctatatattatggaagaaaaatgtaatcgtaaatattaattttgtacctatattgtgcaatacttgaaaaaaacggtataaaagtattttgagtcagtgtcttacatgttaagagggactgaaatagtttatattaagtttgtattaaaattctttaaaatt

SEQ ID NO: 7427 - DNA, 644 bp, Homo sapiens
gcccatgggaaacaggtggagatggggaagccgtctcttctgcatggtttattttccctctatccttttatttaatgctcttttgtgagataagtttcaccacataatgtgtgagcattttttcctgttaactttatattacaaaatccgttctaccataacaatacagaggaactagctgtgttactgcaccagtgttataggtaacttcagtatattatgaacaaatcaaagaatgtttacttcctgcaaactggtgaattatagaaagcaatccagatgtggtttactctgccacagtctaatgtcattcacttcatttgatggggtcacttgttagctgtcactaataatggaattaatgggaaacacttgataaatgaaactgtaccgttaaatacaatagctgagttttccccagtgtattgtaaaattgacacacactaatacaagatggattatcaggatgtatctaaatgtcccgagagggttaaaagctaactgtaaattactttaactttcactttcaaatctgacaaatcttgtttatatggtatataaaactttgttttcatcagatttgggggggttttatattaaagaaattaagactacactatttaaataaacgtttcctgtttctg

SEQ ID NO: 7428 - DNA, 1146 bp, Homo sapiens
aaatcagcaattctccagaggactatctcacataagtcatcttatgagctcacaggacaagaatatacctatgtctgattggttgccaggtaagacattaagactcaacaacaatatcacagaatcagaccatgtgtcccatggcaatgtgaatccaatagtcaattacataatgactatagaaacacaacagtcaccaaattaaactagacttactattttagtgagttaaaaattacatactaaaagtttattggtaggtaataaatgcttttgagtaaatagtggaaaatgtctcatgttgaggctatggttttgtaggaacaagtacccttattttcagagcatcatgtacttaagtataatggtcttggtaaagatagttcatataagttgtatctagacaactgtatcgtctaaattgtaaacaattatctagtaccaattttccctttttatttttcagcatcaagagaaaaccaatcagcttcatcaaaacagaagaaaaaggctaagtcccagcaatacaaaggacataagaaaagtgggtcaccacgtggtgttcacatacattttctaattgttaactaattggagtcacagtattcttggacagaaaatgatatatcttgtgagaactgatgattgtgcattatgtattatgcttaaaggtgcagtatgccataaaaggcaaacccttgcaataatgagaaacactgatattttactaacaggagaaattattaccacagtatttaaagtatacgtggtaaagaatagagtctgtgaatgattcttgaaataatatgtaaaacctactgaaagttaatcctttttaaaaactttatttaaaaagaaaaattagcagccaggtgcagtggctcacgcctgtaatcccagcactttaggaggccgaggctggcagatcacaaggtcaggagatcgagaccatcctggctaacacggtgaaaccctgtctccaccaaaaatacaaaaaatctgccgggcgtggtggcacacgcctgaagtcccagctactcaggaggctgaggcaagagaatcacttgaacccaggaggcagaggttgcagtgagccaagatcacgccactacattccagctgggcaacacagcaagactctgtctc

SEQ ID NO: 7429 - DNA, 1271 bp, Homo sapiens
ggaacaaagccaagaagaatcccacctcagtgaaatgctacaactgtgaattgacgtaacctagaatgtcccccttcttgcttctctctccttctttcccccaagcctcattcattcttgggattggccctttcttcatgaaaagtgtctgcaaaaccatggcagaggaatacatctctcacacatactcacaaacacacacacaagcacttgcacatacatacaaacacatgcaaacatacctacacacacacacactcttacaacctccatcatgggaagtcaagtttcagaaacaaaagtctcattcataagaggtcttagaagaaaataaccagttaacctgatttcaattttgataccgttttcctgaactaataaatctacccaatgagacttttcagcctttgtacatacaaaattcttccaaaagagagaggagaaaatacagctctgatggcatcaaacggactttgcatcaagtaatttcagatagtgtcctaggatcctttgagggtgctggtagcaggtgagcaggacaaagttgaccaaggacacttatttctagattatgattcttctgtttactcaacaatttacaaagaaaaaaaggacagacattgaagagctacacattgtatatatatcaccacagactataaggaaatggaattatttccctctttgtcacatatctgtagtaggatttgccaagatcagaaatgatccatttgctgtttcttgttttccaaaggtcatacattgtgtttggttattgttaccagctcaataaatgtgtttaacgagttaatttcatttttctggctttggtctgttctccttccttacaggctaagccctggctccatgcaactgcattctttgatttcacttgttccttcatctacatgttttgttcatttgcagccagtttttactgagtttgtggcaatcaggaatgcatttgctaagcaagtatgactttaattccactccatggctcaatcattcacatgaggtgagcttcagcctgagatagcaggcgacagacttcttgcgtttcaaaactgccatgcccccctgtgatgctcccgtgaaggaatgcactttgccttgtaagttcctgggaaaggggtatgttttctctccaggtgcagccagatctcacaaagtacaaaacgaatgcctttcttttcttgtttataatggtcactcactgtgtttggttactgtcaagaaatcaataaatgtgtttaacaagttacccagta

SEQ ID NO: 7430 - DNA, 207 bp, Homo sapiens
attagaaaaatttcaactgtaggtgcctttgcaacctatcctgggagaccctaaaacatatttagttttagtgcctagagattttcactcctctaacatctctggatacagtgtccctggtcaacatgaagaagttacagaagaacgctttctgatcctggcccctaaagaatttacttgtgctaagtaataaaattcctattgatc

SEQ ID NO: 7431 - DNA, 1721 bp, Homo sapiens
ccaatctgtactaattctccaaaccagtattatttcaattatggcacttgggagtggggtgagagctaaacattgcacagggaaagaaaaaaaataactgcactgactttatatcttttgaatataattactgtgaaagtataaaggctgtgttctggaattttctgcctcacagcaaataaataaggtagtgaattaattattcattccattccactatcatgaaggactctgaatagacttggccaactgatgtttacaaaccagacttttatattttaattttacagattttactacatgatttttctaaattactatgtcaggttgtaaaagtcagtgcaataacaaaccttcctttttaagaagaaaattgtttctattactttcccattcactaggtaaagaatcatggacagaacttacactactttttaccatgtttcatcttggcataacatggttcttttttaaatagaaactttagttttttgtaaatttttaaaaaaatatttcattgatatgcatctctgcaggtcctcattcatgttgtaaatttttgcagcaagcagtcaacattccacaaacgaacaaacattatacctcttctgatagttttattaagcatggagaaattgccaatttttaaaaactgcagttttccaaacttttctgccaacctcttactctgaattcagtgctgctttgggacatatacttgacctagcttggtttaccagtgatggaaaagtattttgatatcattaactttttcaaaagatccaactttttctctatgcctttgccacattctcttcagggtctctttccacagtggataaatgttttttctgtattatgacagtattgttgtgatggccatctgctggaaactcctgaagagcattatgtattacagtgagcagttgtattgcctgtttggtgcccaatggttaagtcattgtcacttagctttatattgtcagtttgatatttattttaaattgtggaactagatgcataaattcacatttctgcctttcctttgcatcttctcatatattgtgtttttttttttttttcctagaaaaaatatttaaagcattgtttgacaggtagaaactcatgtatctgtagtccatgagttatatcctggctcagtggagtgatatttatgtattatttttacttttctctcagtgtcttatattaagattaacatgttgttaatagttgctttgttgattaatctctcttgttggtgttttaataaatgaaataggcttgcctttagatcgggtgctgatattgcctgtttcctagtaatgggctgatcaaatgatcagtggaattcttggtttgatgataaccttattaattgaaattttttactgatgtggctttaaaagaggtttattttgtatatgtttagaactctctgattttgatgaattatatgggaatgagaaacagaagaagtggtatttgctggcgagttaaataggcaaggtacccagtgataacaccaaccaaaccactcctatctgcatgattctgaacatctggatgcctgttgttttactgtgtatattttatttttaatatattaactttgtggattcatttaaggtctactcaaaagtaacactgtcaaaaccactaatatgtatgtaaaaattgtgctgtatactacaataaagttgttacttggatttgttcca

SEQ ID NO: 7432 - DNA, 1039 bp, Homo sapiens
gactgaatacgaccaaatgggccattgggcctggaaaacgtgctctgactttgtcacccaattcacccagaaccatggtgggagagaacagacttggcgttggagcagactggaagaatgggggtgggagggtggaggggcttctcctttgtgaggaatgactcatgtcttctttaacgacaaacttaaccctaagggctacttctgagactgaaaaatcagctttctatttacatgaaacactttgggggtcatgggagtgcacagcattagacagtatttggttcaccctgtaaagtagccaagaaaagatgagaaaaatcaagataggcctggcacactagacatttgcctccaaaagaaataacctacagtcttaagatgtatcataaaaatgttctgccaaggatctaaattaccttgggtttcgcatatgtctatgaaattctgtgataatttttttcaatacattgattcactggcgtctgttttcattttatacttttaataactcatcactggtggtactttatcttgaaaagtaatattttttatattttaacattggacagtgttagccagttgtaatgatgtatcagaagtaaagaaaaacccattaaagttatagctaatagatgctgttgggggttaaattaatagtaaaataatccaatatagcacttttgatgatttttatataaaagtcaactgtacatttcattcagaataataaatacttattgctgctaaaacttcttaaatggttgtttctgctatagttatttctattgcagttccaaattgccatcttcccttgtctcatttgcaagttctcaattgtatttctctcaaatggacaggttccttctttactggaggatttttgtttttatcatattggtttttcattacttctgaatagtcttaattacgtttactaaattctaaaggatttctgtgctattataattaggaaatcaacgtctttggtcaggaactttataatgtgctattaaatgtatattacatttttgtggaa

SEQ ID NO: 7433 - DNA, 3791 bp, Homo sapiens
gcaggctgtaggcacttgggctgactgcctgcagaagtcccaagaccctagtgaaaatacagcaggcagaactctccttggataattccccaagaggtcccaaggattgggagcatgggaggggagctggcgggagggtgggaggtgggatttagccaggaaaggggtgagagtgattgtgttgtgggcgaggaggcgtttccaccccctggtgcctatcagggcagggtgacctactccccattgttctggaaatctccaggctgctgggcagctgggcagagctctgggaagtgaagtcatgagtgcccgattcctcttagagaaaatccatagctactgtaggttctgtcttgggccacttggatctgaaggctgcccctttgctctctggggtagccttcagatcttggtgttttgaattcttactatagatgtttttaaagttccaaagtcattgagtttcaatgttacataaactccattacccgcatgttggggcttgatctcctggttattatctgtgcttgaggaaacacccacagcagtctctacccagaacagtttcctaaagaggcataccctcttcctccactggaaaatagtgcgttcccttcctaccctgcacacccatcgcccccacattgatggttttcaaacagcaaacttttcagctaaagcttcaaaccatgattggaatcagcctgtgttggatttgtgattcagggtcatggtgaccctgatccagtttgggtggaaatccttcctaagtatcataagaagcatcttggcagagatgctttggtggcagccatgagctttgctggaggccttgcttcccatagccttggctgtggggcaaggaactctgccaggcgagggggatgctgccctggatcaacagaagcctggtgggtttgctcgtgttagagtgtcctgccttcttactgacaactcttctcggtgatagcctctcttccctggattgtgacatatggaatgacagtgcaggtaccaccgaggctagcacagtcaagcctccagctaagctggatccctgaagcctgctatcatgcagacaggctatgcggctgcctcggaccatgctaggccacttgctggggtgtcaacctaccaccaaaggggtcttttagcaaacctcatggggaacaggaacattcctgttcatccctggccacaggctgcagacccagcactggcccttgcgtgagtcagagcctggggctggccctagccccttctactgacttcctcatttaagccaattatataagctcacattgatcagggagggagggaaagagctaaagagggtcacacaagtggctattttccctgcagtgtttctgtgtggtgaaaataacccagtccactaaggggcgggagtgaatggatggctggattttccccaagctccttatagcctaatgttgtcaggatgtgagtatgaggaatttagcctcttatagtgaaatgagtccaactctgggctttgcttagaggagagctcctgtcaggcttcctataatatgaaaagaagtcaccattggggaactagagaccccagaccttttcatatggatatttgagaatgtaatgcatctcaggcctcgtgctggaactctagggcactctaggcaggctcagaacacttgatattcctgacagctacacacctgacatgcaggtacatacctgatcggtgtcatctcctaacaaggattttcagttcctcgggagagcaataatctttgtaggaaagacatccctgcaataggtgatatgtggtccttagaagttttattcctttactacttggaagaaaagttctttggtgattcttctctgcttttgaagatgatcaaaagcatcttcattgattttctgaaacgaaagccttgtctgaaaccaattaatacttgggaaacagctgggcttggaggagtagaatgccagagataaatccatggctcctgctctggctctcttctgcagaaatgagggcaacagtgaggccacttccctggcaaatgtgcagctcaggatagggaagcataagaccctctgtttaaaagagagtcaagtaggtaaccaaagccaagctctgtgcaaggtgctttggagttgtaaattgaggagtgcatccttgctgtcttgaaccattctgtttgcaatggtgagaccttacataacctagccttgcagggccgccacacaaccctggagtcctagagttggaggaacctttgtatccatctgacttctcattttgcagaatatgatgagaaagtagaggatcgctctgttcaccactcttgctattccattagtggggagatgcctgctagcatgtgtgaggggaacactctgatacactgggaagtatcggaaattcccagaaacacaaacataaaataactctcctagacccaggtactggggactgtctcagtccgtgtggcatgataaataaaaggttaggatcaagtctttgtatttttcaagatgtggtagctgattattcctgttttaagtactctgaaattgatctgtgatcaataatactaatatgttatcttttaccgtattctgcctctcactattgattttaattagttaggagtatttgagctgttatttcttgagcttaatatttttttagagttaactctttaaggagataatcatggctgtagacaaggccagggctggctgacgtgccttagaaggtttgaatgcaataaagcggtgtttggcgttctcctgcattgtagtgcgggtacaaaatgctatttgttcgtcatactgttgtcagcagatgagccgcccactacagacggctactgcccagggacctgcccaggccccacccaagggctcccaagggttgagatttctgcagacctatagccagcacacttagtcctgccctatatagagttcctcttcgggaagcttttgataaggaattctcagaccgataggatgtctgtctgggctttgctgcgggacagtctaactgtgggggctaggggaaagcaggagagtatcgatcaaagagtaagccacacacggataatcagttactagggatggaggtgtgagggttcattatattattcattttactgttgtatatgtttgaaaatgtctataataaaaagctttaaaaaaaaaaaagaaacaaaaatagttcaggccagcaatgggccctccatgttcagtggattttatccttgtttcaattggggtaggagttccaggaggtgtggattggaggttgtctaaagaattgaactggcctttgtccctgcttcctgggagggagactttcagtccttgacatttccagggtaataggagtgtctttgttatttgtgaggccatgggatcacacctgagcttatgctaaaaggtgggatgactcagagctggggctggtcaccagacagactgaccatgtgattagaggtttgaggctttgagtcagcctgacctatggggcgggggactggaggctgagtttaatcatctggccagtgctttaatcagtacatcatgaaaccctaataaaaactctggacactaaagctcagcatagcttcctgggtggtgaagctgtggctatgccggcagggcagtgtgccctaattccacgaagagggggcatgggagcactgtgctcaagacccttccagacctttccctgtgtcttccttggcttgtggagctgatttgtatcctttataataaaactaatcataagtata

SEQ ID NO: 7434 - DNA, 870 bp, Homo sapiens
gtatgacctctccaccttatagtttatgaatgtcttgtttgtgaaagtgactataacccaaacttttttttttttttaaagaggatttggaagttgtatggatttttttgttatcttcactttactgcataggaaacaatctacctcatcatttaaaatgacatgggtgtcggttttgtagatctttggtttttttgtcaggtttaatttcagttaacaaaatgtaaaacatgacattccctgcagatattgttgtataccagtatggtttcttctctttctttaaatgtttttggccatcaagtagcagtcgtcagtaggagtttataataccaagaatgtgctgcgtatcttgtctcaataagttttaagtaacatttaaaaatattaaagcatgttatttgacctaattttttagcatttgagttgttccattaaatggagcatcttgtaaatttcaagtattttatacttgcaattgttaagagttaacaggtagttggatttgtcgcagacaatgagttaaggaatcctttcacgtttttcccaactttaaaattaaggattctcaggtccctgtgtagagcagtgaaaataagatgtgcgtatgtgtgtgtatgcctggagaattggtgtttcacttcagtgagaggattggctgtgagcttcagaccaggaaatgtgtcatcttgccaggcacctggctgagtgtgctggagtgaggatcttgaacagaaacttccttttctgttattattcactacgaagctaaaatggccaaatatataccgtgaaaattggtttcatttaacaaaagatcagatccctccttcagctgtacacatttttaaataaaatcatattgaacta

SEQ ID NO: 7435 - DNA, 300 bp, Homo sapiens
aggacctgtatactgtgtatgctggcattcacactctactcactggctgaatgttgagctatttttaaacagttgaactgtgtaaatgtttcttgatctctaaggtattatgtttgccttctcttagttatttctgggttgtcacaaagctcagtatcatggtttgacagaagcagttatgtgaacttttatgttaggacattactaaataaagaattccctagctgcttataaagtaaatttactttgaattgtaaataacatgaagaaacctttataaagattgttcaaatgggactc

SEQ ID NO: 7436 - DNA, 310 bp, Homo sapiens
atgccagcagctcttccttgccagagatgatctgacccggtgggggcagctggaaagcaacactggcccccagctgaagggcccagctgcagccagacagatggtgcttgagaaccgaggcccggtgatcctccagccacagtccagcccaaccactgccactttccatgggacttagaacttcggagttgctgccttgcaattggaggaaggacctggggcccctataggcagcagccaattacagccccttttgtagccaggcgttcctatggtcaaagagtggaaatgcaggaaccaacctcccttt

SEQ ID NO: 7437 - DNA, 2924 bp, Homo sapiens
acagtattataaaatcaaaatatgggtaaaagtaaatatttaccagcaacttaacttttagttgattaaagcaaaaagtaaaccatgaaattgggagattttattacattagttaataagagtgtggtagcatttttctccaatttggctgggattattcaaagtagggtgtgtatgtaacttatcactggaccactttagtttaatcagaaattccttttagctgacaacattgcttaaacaggatagtagttggcaagatgaaatgccagaattaaaaccaatcataagtagaacccacttcaaaataaaaaaacagcattactatttctaatcccaaggaatcactttattgtaaacactagcagaactcttctccctatacaaggtggatggctgattttaacctgaaattttaaatccacagattgagagctagtgtagaattgtctgtgtttattgtttttatgagtaaatacatgcattgtcataataaaatgcatttcagagaatatgcattttacctttgggaatatgttaatttcaggcagcattccctatgggaaaggtgataccagctctgatatgcaaagcatatgataatttatcattctaacttcaacgtataatagggattgtgacctgatatttggagatgtaaatattgctcagcatattaatcccgatggaatatagcattgtagttgactttttaaaaaaaaaaaaaatttaaaaaaaatctacaaattgtgttttgctaagaaaagcctcaactgacagaggagaagtcaagtgtgtggacaggcaagctcctaataaacagagtccagtgggattcctatttaggagccaaggagtactttggaacagtacaaatatattgctttaaattggaagacgctggaggcactgggatgtgatatgcccctctctctcccaatcagagcctgttgatattacaacagggacagatgtgttagttgctcactagagtttatgtcttatattaaattgtatacagtttttattctaaccactaactaggtagtgtatgccccttcagaacatgcagagtgtatctttttttaaatttctccttccgtttcttaagtattgcgcagatttgttcaactttgtaaatatggacatcactttttttttctttgagaaaacacttgtatcagctttgtggtgttttcagggagacagctgtctgcattccctgtagaaacccagcaatgattatgcacgttgagacatgtgctttttatttcttagcaagatattttatctctgtacataaagtagaaaccaaaagctagggaaacagatactctttacaccatcatgccacgcattgtttttaaagcattgcgttaaaaaaaaaattaactaaaccaagatgctgtgattttttaagttgcaatatgtttttggtttttttcattttttaatcattgcagttaagagaaatggaaattagttgtgttaatcttgcagaatgtttgcaggactgactatcaaactggatgatttccatttataccctactgtgtcagttcaagcatcaaaataccttgcatctgagacagacttcctacatcagggacaggtatctgtgtgtcattatacaaaacagttctagggggttgaactacatagtaaaaaaataaaataaatagtacttagtgtaaaataattttataaatgatcttttgtactttaggacattaaattgtacaacttttgtatatataaaagcttaggaactttctgtttagcaggaaggcaacacattcctacacttttaatgtatatgtttgttataatgtccatgtaaacatgccctatgtttgtgccttttaattagtttgtctcaataaacaaaatgtagagaaaaatatgtagctatgactttgttacaactgttcttatccacagtacaaaaatggtttgtttttaatatgtagagcattatgtgtggactactggaaggactcgtgtagggaaagcccaagaatgaccttgctgaggcctggattgggaggcacagtggccacatttggaggaagttcacatttcctggcatgcagacccaaaactgggttctggctctgcctgctgggatctgttatctctggtgggctggcagtcataattcacaattcagacagcccaggcttcctccacagtggtccaaggagcagtcctcagtgggggcaggtgtgggccctacccctaagctagaatgtggttgtcagaaccctgaaagtattagttctaaaaaaaaaaagatatatactagaagtaattgttttatcaattcattgtataataaacaggagtgagacttcattgtatgacttcagttaaaatactattttgtatgcattctttattcacttaagaagcttgtctgcaataataaagccacgtcatgtcttcttttgggagggagagagtcgatggcaggagggggttttgggtgggccactgaaaaggggtaccgaataggttgtgtgatgaaattctgtgtcttggaactggaattgagtttcgatgttgatgaactgattcaaccaggtgttgaaggcacgacagccactgctctacgaaaaggcagagtacgtttttcccttctggttgtaacctggttgagagcttcccctttatcagattggcagctaaacagttgtattagataatccttaaatctgacatccagcctgttacgctctagggctcgctgcttggcctgcgtttgctttttattgtgtatccgttcccctcctacggtgtgctcctgaatgaaggtttctatgtaagcagatgatgattttacctgtcaataccagcactgtattactaacatgcaaaatactgcagatttattttgaaaattaaagttaactggtcacaaatgt

SEQ ID NO: 7438 - DNA, 4485 bp, Homo sapiens
gatgattggtgacactttttgtagaacccatgttgtatacagttttcctttattcagtacaatcttttcattttttaattcaaactgttttgttcagaatgggctaaagtgttgaattgcattcttgtaatatccccttgctcctaacatctacattcccttcgtgtctttgataaattgtattttaagtgatgtcatagacaggattgtttaaatttagttaactccatactcttcagactgtgatattgtgtaaatgtctatctgccctggtttgtgtgaactgggatgttgggggtgtttgtggttatcttacctggggaagttcttatgtttatcttgcttttcatgtgtctttctgtagacatatctgaagagatggattaagaatgctttggattaaggattgtggagcacatttcaatcattttaggattgtcaaaaggaggattgaggaggatcagatcaataatggaggcaatggtatgactccaagtgctattgtcacagatgaaattggcagtattgaccttatactaaaaggcaggggttaaaaatgattatatacattttccttaaaacacttgcaaacattttattcagttgtctttagctacaattgctttgctttttaaaccttggcaattgtggcaaaattatattgcccattttgtagcaacttattttgctcccttccccccatttttgttttaatagggactaatgtgggaagaactggctaatttgtcacagtgcttagttacaactgttaatgtgtgacctgctgttggtgtacatgtgggtacagggtgtttttaaatccaacaagatagagtataatatcaatactgctaaatctgcatgtcctctgtgtgactgatagagcgttgctatttcatttttttaagacaaaatgaaagcaaaatatagagttccaatgtattggtgtagataatctagttgggaatacttttaagtctcaccttcccctttaaactaatattcataattggttcatatgtttaaaagactttaatttacaaattaaattgcaaatgggagcattagatttagttttagacttaggtgggtagcaatgccagtaaacttaaattacgtaacttcttgcaaccacgaaacctgtaatacgctgtacagtaacaagtgttggcattatcagttgaactgtaaatacaaaatgcttcttccaattagtctctatgatgattaagtttctaaaatttatctgaacaccattcagaaacttgttttggggaatttgatagttattgatgtgcatctgttaaactgatgacagacataactcatcattccccagaaaccttttttgattacagtatctaacattttgcctcctcttttttggttttgctggttataaaggtttggattggagagggctcactggatcccaatccttggagctggatcattggattcaaatcataatgtggataggatagggaggatgaattaccaggattcatggagcgggatcagattaccaggaacataggagtggattcctgccccaaccaaaccgcattcgtgtggatttttttattcaacttaattggctattccaaagattttttttttcctatttttgacgattggagcccttaagatgcacgatggaattgtgttttgcgttttttggtaaaaggagcaaagcgaggacctggagataaacgctggagcaatctccttggaaggattcagcacgagtagatggtaaacatttaaaggggaaagggggggtttgtttaaaatagtaaatcagtaagtcacttctaaatttaaagaaaacaaaattggagttgaagaataagtaggtttccaattggctattgccgttttctttgaaaaaataaacattttttaaaaaactatgcatggttgtcctttttcctcttcatgtaagattctaactgggtctatcagttaatctttaaattgttaagtaagataagattttgactcttgtgttaatgtgttagcaaattaaaagttcttaaaaggcaatctaatggtattagccatcttttattgttaattgtaaaagtcttcaggggaaagcaaaaggggagaataaggcatttgtgtatgtaacttggtaaatgacggtgggggatggatctagcatctgaaagataagcttctctactttgttataaagtggttaaaaaactatagatgctgcttattttctggtggtcatagacaacataggcttttgtgcaaaattggttgatggctactaatgttcacttggagatagcttttgatattctcaatgaaactcatctcaaaaaaaggtaagtattaaatgttaacatcagcacagatgtattagaactgttttttgtttttgagacagagtctcgctctgttctccagactggagggcagtggtgtgatctaggctcactgcaacctccacccctggatttgagtgattctcgtgcctcagtctcccaagtagctgagactacaagtgtgtgccacccttgcccggctaattttgtatttttagtagagatgtggtttctctgtgttacccaggctggtcccaaaactcctggcctcaagtgatctgcctgccttggcctcccaaagtgttaggattacaggtgtgagccaccatgctcagcctgtagaacttttaacccaagtctcatttcttttttgaaagggaagagtgcacaagattaactgcttctttggatgaatcattgttaataaaaagctgggcatttagaattttgccttataagcccttctccaaccataagattattttgtaccaaaaactttggtgttctctaccaaagcagttaaaaacttttagcctgctacttcttgtatttgtctactgacagccccttggtactatttaggttgggggaggggacctaaaataaatagactttaacatttcccttgggtgctaatcatagttggaagttgaatttaaggtgattatttgggtgacaattaaaaacctaaggaaaaccagaaatcttggtagtggaagaaatgtgtaaggtcaccccaatcggtagattttaatgaacgttgtggaatgttgggaagaggggatgttaagttgaatgcagaatttcactaagtacttagtgtaagtttaaggatgtagctctttttatctaagaattcaatgtaatggccaaaaggcagatttactgtttaaaaatttgaataattttacatgacattcttgaaattctaagaagttttatgtgtagaacattttaaaaattcatcagattattaaagggaaaataaatgattaatgataattttggaaggttaatgtgagctagacttaagtaaactttggttcatttgtgttcattgaatgttttggaaatgaccaaaaaatgtaaatggccttcactcaagtttgagtgtttaaagttgaaagatgtgctctactaaaagttatagtaattctaacctcacattgaaatgagacagtattccttgttatacaggctgaatttgaagattagagaggatctaatgtttacttaggtaaaggggcataggttttgtagttaagatgaccagacagctaaaagctgtgatgggaagtatggactgctcctatttatagtctcagaaaatggacctttaggtctctatccgtattggcaattattagaagaaagttacacccttttgaaactacaaaagctgtcttggaatttccccctcttctccctatttatgtccccttagaatattttagggagcctataattattttctaaccaaggaaaaacttaagtctctttaagaagcaattacttttcataacatcagattgaataacccaccttgctgttcagcccacatcctactggaaacaaaaggtaagaaacccattttctggttcttgattgtttgggtctgaattttgtttttaaaactaagctaagtttaatgttttttaaaatgctgtttggaatatgaatagattccccgtaaaatgatttttcctaagttttatgctttagtaaatattcagtgctcacgtctgtgcatcatagtgcttgcgtttaatatgatttattgtagaatctcaacttttcttggtgtttgttgtctttgaaacattgtcttggtcattagggctggtgttttcacatttctgtggtcaaggtggatttcttatgtgtgcctttttgcttactttgtatatgaattttgtaatttaaattgcaagtaagttatatatatgtatttaccataaatagtattaaaagatgagaaactgttagactgaagttctgttgtaacataaccattatttccatcacagtatgaagactgcaaacgcagaaaacagattacagtctcttatccattttttgaaatccaaaaactacgaaaacaaaagattttctgttgttgagctaattaaatgtgaaccctgaccag

SEQ ID NO: 7439 - DNA, 641 bp, Homo sapiens
ctcacagcagccctggcccacagtgcaagaggacaagatgggggatatctgaggccagtgctctcctgcctcttcgtctttctgattagagaccacgttggtctgctgagaaccagaaaagctgggaaattcccggctggcccctctgcctagccttctgcagggtcttctccctaccctgtggaaataaagccagagaccctgtggccccccctttatatttgcagccactgtcaatgggcatcacagcaaggcaggctttttgatctgaagctgtttggggtgaccccatagtgagtctggccttgactcacttttctggcttgtctcacagtagcaggggatctgctgttctccaccctttaaaaatggagcctttcatcttccaagaccaaagaaggaaggaaggtggacggtgagagggtcttaaatccccagcctgtgagtctcagcctctttccagggaagcctcattctactgcttggggcttgctgaggttgagatatgagttatttctgagtaagtgaaggctgaaggcagtgctgagtcctttctgctagctgggtggtatcttttactgtgtttttttgtttgtttgtttttttgttttttgttacataaaccccttttattttgactg

SEQ ID NO: 7440 - DNA, 800 bp, Homo sapiens
aggccaggtaagggggtgcagcagtgaggggtatatctgggctggccagttggaaccacggagatctccttgccctagatgagcccagccctgttctgggtgcagctgagaaaatgagtgactagacgttcatttgtgtgctcatgtatgtgcgaagtatataaattggcttttcatgcgtgtgtgttgtctgaacatggggagtgtttcatgggttatgtgtatgtgccatttatgtgagtgtgtgtttgtgctgatgagaatactgagtatgtggaaggcagcagagcggactggtgaggagcacagctcaggaactagactgcctgggttccaatcctggctctgtggcttgctagctatgtgaccttgagcaaattaccctccttaaacaagagttttcttccttgtaaattacatctgtcatggtttcttggagggcccacttgtatcctctggttcttcatttattgagcacctactacatgcaaggcactgtactaggcgtgagaagcatatagaggcaagaaagagataccaagatgccatctgtgtcctggttagcagagctggaccagtggtgccttggagggataagccagctgcagctgggctgtgtggttgacttatgggcccagccagccaggctcaggccatggctcccctttttcttcctcaccctgatttcttgcttattcactgaagttctcctgaagaggaactgggcctgttgccctttctgtaccatttatttgctcccaatgtttatgataataaaggcaccgctgatggggacctcc

SEQ ID NO: 7441 - DNA, 1215 bp, Homo sapiens
gactggggctgcaccacacaagggtccccagggcccccaggtgggccttgtacccccagctctggcagcgcccccaggattgaacgtggggagccccagggcagaagcgagaaggtgtggggtttcttctccaaggggaagcagctcctcaggaggctgggctctgggaagaaggagtgaagctgtggcccatcctgcaggcagaagaggccctgagaggcccccagatcactgtctctgctgagcagggaaggctcagactgggcccagagcccccgttcttctgcgttaacactgtggcattcagagggaatcaaagagccttggtgaaggtcagagctaaatggctccttaaggatgaactctctagagaagcaccttcctcctacaggaggggaaactgagcccacagtgagtatgtaacttgaccaaggtcactgagccaggactggacccaggaccctcgcgtcctggtccacccacctcgtctactagtgtcccacagtgctgcgctagtcccttctgccacccttcccagtcccaggacgggccctggagggagaaaggagcctgtgccccctgatggctctggctgtcctgatcctgtcttccctcccctgaaggaaagtttgcactggattttattggagccccatctccccagcgggcaggcgggcggagcctgtatatatgtatatactcagtgcctcagttcagcttcctccacctcgcttccactgcacaggcccaggaaggagaaaggccaagccaaagtgggccccaccctgcccccgtcgtgctccatccttccctgccggggcctgctggcccctgtaaggtcccgcccccaaagaccctggggccagcggggccgaaagcggagttgggtttgccttattttgctcattggattcaagttcttttgcatagttttcttctaacccctgttggagtccaggggctggagaaaaggacagatttatgcagctattttcatacattccctgttcagagtggggtaggggttctccgccgttacccgatccactccatcccccaccctctgaggggtgagtgtgtctttgcatgtttcctttgctgtggtgggagatagtttgactgaacccccaccttgaccttggtctccaggggtgtggaatggtgggggaatttgtttaaaaagacattttattataataaagtctattttcacaa

SEQ ID NO: 7442 - DNA, 1068 bp, Homo sapiens
caagatgcaaggctgccagcatctttgctctccacctcctgcctctgcttatttcttgttctggaactaaatgaacagaacttcaaatacttcctaccctccaattcagactcagctgactgttgagagagcagcacatcattttatcattttatcttctttggactacaggtggggtgggagggatttgggttggtggattaacagatggaattgaggagagagtaggatgctgattttcctacccgtggcccaggtctgtgccttccccatgccaaggactctaggtcaaatgtcaataaatatgaacctcgagaaagttctgaaggccatgacacctgccttgcctccctcttccattctcttaggcacagtaatagcttatttgccctataagaaccttcccagagcagcagaggcccttctactccctcttgactgtctcagcctctgggattgcagcctttgtagtgtgcttccttgcttcctatcggagggtgctgatccagaggctcagtaaccccatcaacttggtggccctggtgtctcacacttgtatccttctgccctcgagacctggcacagcagtatcccttgaagaaatcctgaggctttgtagagtgctccttgaccatgtttaataattcttccctcccctgcttgtctattttcttctcttcacggctcttcctataccttaggccagtctcaagcactcactggagacccttgggccttgggcgaccattgagtcctagtctcccttgtttgtgcccctgtaggaggtaggtccttttctcctccggcctagtaggggaccttgggtaacatcccatttttcggccaaggtgagttgttttaggataaaaaaatttaccacaaattctcatttaaatttccacagaaatcctgttcgtatccccattttgatttccctaagttccttgttctccctctaaaaagagaatgattgcaccctgcctgtttacctcaggattgttgtgattgtagaaacgaagctatgtgaaaattatataagtattataaaggtgaaatacttttgctctc

SEQ ID NO: 7443 - DNA, 1264 bp, Homo sapiens
gatgttcaggcctagctccaaccaagagtgtgctccagatgtgtttgggccctacctggcacagagtcctgctcctgggaaaggaaaggaccacagcaaacaccattctttttgccgtacttcctagaagcactggaagaggactggtgatggtggagggtgagagggtgccgtttcctgctccagctccagaccttgtctgcagaaaacatctgcagtgcagcaaatccatgtccagccaggcaaccagctgctgcctgtggcgtgtgtgggctggatcccttgaaggctgagtttttgagggcagaaagctagctatgggtagccaggtgttacaaaggtgctgctccttctccaacccctacttggtttccctcaccccaagcctcatgttcataccagccagtgggttcagcagaacgcatgacaccttatcacctccctccttgggtgagctctgaacaccagctttggcccctccacagtaaggctgctacatcaggggcaaccctggctctatcattttccttttttgccaaaaggaccagtagcataggtgagccctgagcactaaaaggaggggtccctgaagctttcccactatagtgtggagttctgtccctgaggtgggtacagcagccttggttcctctgggggttgagaataagaatagtggggagggaaaaactcctccttgaagatttcctgtctcagagtcccagagaggtagaaaggaggaatttctgctggactttatctgggcagaggaaggatggaatgaaggtagaaaaggcagaattacagctgagcggggacaacaaagagttcttctctgggaaaagttttgtcttagagcaaggatggaaaatggggacaacaaaggaaaagcaaagtgtgacccttgggtttggacagcccagaggcccagctccccagtataagccatacaggccagggacccacaggagagtggattagagcacaagtctggcctcactgagtggacaagagctgatgggcctcatcagggtgacattcaccccagggcagcctgaccactcttggcccctcaggcattatcccatttggaatgtgaatgtggtggcaaagtgggcagaggaccccacctgggaacctttttccctcagttagtggggagactagcacctaggtacccacatgggtatttatatctgaaccagacagacgcttgaatcaggcactatgttaagaaatatatttatttgctaatatatttatccac

SEQ ID NO: 7444 - DNA, 2126 bp, Homo sapiens
atgccggggagaaacctgtccaattttagcaggtttgaagggaggatcttcttcagttgtagtttggaaggttccttggtgtggctcatgaaatcacagagctcagagataccatcttgagaaatcctccttggtatcatgaaactggagcagaggaattgcaatttagcaggaggtcctctactggtgataccctcaccttggggtaatggtcctaacccagacccagggtctggaagcttaatgttgagttggtgactccagcctctttctcctggaggtcacaagatgatgattgcgtagatgttgcctggtgcaaagtgccccaaacagcaatagaaaggcatatgtataaccaaactccaagtgataaccagacccatctctcctccaccttgacaaaagcagattatagtatacaaggtaggaattcctgtcctatttgagatgaactatatcctgtacctctgtgctctgtgtctgcatgaaggctcagcctttagaggcactccttctagttgcattagtactgtctttctgtggagtttggtttgaagactggctcagcaagtggaggtttcaatgtatttttcagttggctcatcagccagcattggtgaatattcagtttaggggaacagttctagggagtgagacatttttgggagcagaggaaaactctgctgatgttcggtcctggcaaacattgagttattttgagctgtgaaggcagtcgtctctgttacacagtggcagctcttgagttatgcactgtgaagaatgagaagggaaaagcaaaaattatccttgtgaaatatctgctgattgtgccctactctttgcacctgacttttcctagttgtcctggtgctaacacaggagctacaccttgatcctctcctggcatgaaaataaaacaaaggttttcgttgttgttgttccattgcccatttcccccatgttgtctttcccttggctgatgcctcctctgggtcacattgcttcttatcctgaacacttgacaccttgagggtagaatttagcgtttggtttttacctcctagcatatgctgtttggtatgtgagggtttcagtacaaatgctgctgtctatttctgtgcacttaacaatggaacccaaacagaagagaataaagccttgataccaaaattgggaaagaacatgtgtccatttggaccaaacgttgttggtttttaaaaaattttattttgtttttttgtttttgtttttgttttttttcatcttaatatgtaccagtggcacttaaccaaaagatacagtgatatagccatgtactgtgggtgggacagatacagtctccttggcctataatgaaaccactaggactttatacagttttccttaatttgttgacatataaatggtaaattatatttaggcttatcctgttttgaaatgatggtagtcatctttcttactgctactttcatgttgctttctagaaaacagcatttcattccaaaataactaggatctgcatttagaacaagaatcattatttgtcctgaccttttcagtcctacagagacgcatctgtggttcttttgtacttgccatagatgtaacctaaaaagttttggcatatttaggtcagcctagcggaactttttttttcatttaaatggagctgaataatggagattttgtgtctgcaaaattcctgagatcattgaaaaagtaacaagctgttccttgtttctgatacataaaattattttaagcattttatcaatcattaaaatttactgccagttgtgagtggctttttaattaacttgtctttcattgcacttcactctgcctgttttcaaggggagtaagattggtaacatttggggagactgtatctgtctacttagcgtggctgttttgagggactgtcccatcagtgaacaaactgcatggccttggagagagactctgggctcttggctcagatgtgttcatcaaatactcctttcagagctgttgtgggtgtaagtgacatgatgtggccaaaaatccaaactgtgcagttgcgttgtgacaaacatgcaatgtgctgtaaaaattcaatacagtttaaataaaatctctatattagt

SEQ ID NO: 7445 - DNA, 231 bp, Homo sapiens
ctgcggcggatgcaggagatgctacacaaaatacaaaaacagatgaaggagaactattaactggctttcagccctggatatttaaatctcctcctcttcttcctgtccatgccggcccctcccagcaccagctctgctcaggccccttcagctactgccacttcgccttacatccctgctgactgcccagagactcagaggaaataaagtttaataaatctgtaggtggct

SEQ ID NO: 7446 - DNA, 332 bp, Homo sapiens
ttggaattggatcatagacggactcctggcctgagtttgagtgtcctggttgtaagctcctttcttctctttctgcttcagttgctgtcagggcagcagttccagttctgtaagtctcactttgttcagctgccacaatagacatcatcgtttggccctctctgttagcagcacattcaaccatttgttttcagtcagatttctgaaaagtgagaggtagttttgatagtaaaaatttttggttgtgcctagaatggctttggttttgttgatgttaattttcaaaaactttaactcttgttatataataaaatgtttaattttaataacag

SEQ ID NO: 7447 - DNA, 1171 bp, Homo sapiens
ttgccaaatcaagagaactgacttgcaagctaccttgaccctgaattttgctgtagttggtgctcaaatttgtcatcagtcagataatcagatttggtcttatttcttcattatctcgacctgaaatagtaatttggaaactgttggaaggtggcacagtttagtctaagacagcagtagtacatgggaaaaacagtatgggaagagttctttgtaatgtaaggaaataacaatgtagttctctattaatttagcaaatttgtacattcacaaaaggcagtttgtctactacagcagaaggctggttaactgccagaaaatgtacctccaggccctgcatgccgtcagtaacccgcccggcattggtgctctactgtctttggctagagcttagttgtgtttaaataatcatctttatatttggggttttaattacagttccattagtgcctgtagattagtgaacagaaaattgctttggaagagattctgccctgtagacactatgtgaataactgaagtaacactagactgaatctcctttttggagtatgtatcttctctcacttgttcaagtacaggcacactgttcaaccgcatggtatctttctgttgtgtgacttctacaaatgtaattttaaatgaaattaagttaacatggattcattacgttcctggccctgtagacacgtgtaagattatttaaaattctttcatttttttctgcctcttactatacgactgtagtgcaacaaatattttaaagcccccttttcttctttattttcattagttgtacattgatttcagtgtcaacacatttaaagattcattcatgttgcacagtggcttacatgaacgtgaaactgtgatataaggttttctttcatactcataattagcccaaaacagttgccaaactttgccattgtgctcctgcatttgtgtttgagctgctatatatttgtggaaattacactgaaagttgactaagagactattgaaaaagcatgaataattaaatatacatgtgagagacatctcatctgctgtattttacttagtgaatattgttcactcttccgtgtctgatgtcttgctgaatgctgtgactcatagtttacttttgttcaaaatagtttgcactttttgttaataaaatcaacttgag

SEQ ID NO: 7448 - DNA, 268 bp, Homo sapiens
tttgatttgaaactgacactgcacctgatgggttaacaagatctaggcttcagaaggtgacagatatgagtgaggaccatgtgtggggcaaagcctcagaatgatgaaaaggttccggcactatagttggggccatgttgactccttttcaaccatttgtcacagacgtgagaagaagaaatgacttcaaaatcaagagaaaacaaatactgaaagtctctacttacatccaaattttaaaaaataaaatctgtagattaacaatctg

SEQ ID NO: 7449 - DNA, 2330 bp, Homo sapiens
agaaatggacttggaaaggaaattctaacagagaagagcttaattccggagaaatttaggaagatgtcttgttaacccttgatgtctagagattgggggctggtgaagggggtttggcttcaatgactggataatgatatctttcatgagagagattataagaagaagggcagataatatatgaataaagttcagccaaaaggatcaaatgagaataaaacgatttaaatatatgtacacacgcatgcacacacacacttagtcttgtaatttcaggccagaaattctcaacactattttgcatctgttttctttttctaagtcatgataatatagatgttctggtctatcataaaagaatgtttatgtacatttcagtcattcggtatgtggctttgtaaattaaagtataggcaaaacatttgtgttatacatgatatataatttcattttgtaaatgttgattgcacatgtggtcacattattgttgagactgcttttatgtgacctgtagtctcccacagaacctaaagtaataagctggcttttctgtgatagccacgtttgcgtatttctttccctatttcccttgcctgctaatgttgaacagcatgaacttgctttctgatgctgttttagactgtccctgttgtatctcaataatatctttgttttccttcagcctttattactataattgttcattctacatgaaagctaggaaactgaaattagaagagcacttatctgctacttgccagttttgcgtgagtgtgttatatgtatgtgtcaatttccctttaaaataactatttattttaaaataactattggcaataaggaaactgttcaaagtagaggcagatcttgatagaaagatgttaatcacagggttgtttataatagcaatatacatacacatttggctagtactaggtgaataggaaaataaatcatgctgtatgtatacaataagaggtcaagttgccaataaattattactgttaatgttctgggaaatgctgaaactatgctaagtgggggagagggaaagcaggtattgcagttttgtagtgaagattgggctttggagtcatatctgagatgtaagtagcagcttttaaattctagctatgaccctgtgcagatcacttaacttttgagtgtcaggatgtttggaaggacaagacaggaaagtgttttaatacagggttcagtatttagtaagccttcaataagtgatattacatacatgtaataaaaactaagcattgaaaggactaggaaaaatgcatcaaatgttagttctgcaggttatagaattatacttttatgtaattttaaaatttcagttatgaacatgtttgtccattaacaaacttataatagctgaaaaacagggttgtgagaacagcttcagttaaaattgtcctgtctagtttgaatatttcaagaacagaaagcctttttttttttttttttttttttgagacggagtctcactctgttgcccaggctggaatgcagtggtacgctctcagctcactgcaacctccacctcccaggttcaagcagttctctgccccaccctcccgagtagctgggattacaggcgcccgccaccacgcccggctatttttttgtatttttagtagagatggggcttcaccatcttgaccaggctggtctttaactcctgatggtgatccacccacctcggcctcccaaagtgctgggattacaggcatgagctaccgtgcctggcccccttttttttaattacagagaaataagttacaccttagtatcagatattaattttcttcagtgttcaggcaattagtatttagaaagctcttgtcatgagatggctctgggatgtgatgatgattgttgggattgaaaaaacggtagtatcatggagagatcataataaattcttagtattaaaagtggttttgctttcagttagggagaaaaattagattgtactatttttcctctatgatttccttcagttatcttccaaatgttgttttttccccacagcccccttaacattgttctctatgcacttctcaatacattttcatttgtttctcaagcctctttgtggatgactcctaaatataacttcttccactagctctagatccgtatttccaataaaatcccctacctgaatattcaagttaaacatgtccagaatacttactgattttattgttaatagccactattctgttgtctggaattaaaacctgtataactaatttgcatccctttatcttcttagtcaataaaacctacaatcctctttctaaaatggt

SEQ ID NO: 7450 - DNA, 133 bp, Homo sapiens
gtggactttgatatgacaacaacccctccatcacaagtgtttgaagcctgtcagattctaacaacaaaagctgaatttcttcacccaacttaaatgttcttgagatgaaaataaaacctattcccatgttcta

SEQ ID NO: 7451 - DNA, 832 bp, Homo sapiens
tcttgaacaatgggaaaagtataccttaaggcatttctggactaaaatattttcaatactattttctctgtaaagttttcaaagttctccatcctggctaacacggtgaaacaccgtctctaccagaaaatacaaaaaattagccaggcgcggtggcgggtgcctgtagtcccagctactcgggaggctgaggcaggagaatgacgtgaacccaggaggcggagcttgcagtgagccgagatcgcgccactgcactccagcctgggcgacagagcgagactccgtctcaaaaaaaaaaaaaaaaaaaaatgttttcaaagttccattctgttaaagtaaccacgtagaatgctgagtctattctgcatactatgcccacagaaaaggaagaaaactttttaaaatggagaatcgcatgttttcaatgaaaacattcacttggtatttcatttgtaagaaaaaaaaatggtgcttttataaagaactttggggaaacactttgctgaaatgttgggactctggaactagccaagaaaagagaatattctctttgtctacatgttcctaaatctttactccaaaacaactccaaaaacaactcacaaagcatgaaccaaactttcacagcataatttcaagctaaggaattgtaattctgtacttaatatattcatgtttgaaatgaatgctttgaaccacaggagggagatgttgtcaaatgctacagtgtgaacatgtattttgaatattctgtaacagggcaagtttccactctaagcagctatttaaaaataaatatgaggattttggtaataaatgcttatgcttaagt

SEQ ID NO: 7452 - DNA, 614 bp, Homo sapiens
gttgtataaactatcaaggccacaaaatactaatgtcatttggtcataatgactactgataaggcatcagaatggattttcagggctaccagaaaaatgtttccagatggttttagaatgtaggacttatgatccaattcaccaaaagattaaatgaaaccaccctgtgttttaaaatatatataatgttcaacctaatgtatatgcaacatttattctattctaattatttgacaggtaactgcagtgttaaattgtaaatgtgttttctttatgttaccaaaacagcaatttgaaattagaactagtggttttagagaactcaggtattctttcctgacattgttttcagaataaagaatatttttcataatattttaagatacatactatctaaaagtagaattttgttcagcattgacttttataattcccatcctaaaaattcttaatattttcataaaatttgtatttttaaatgaaaattctaaatgttgtattttatcagtaacattttctaagtgaagattaatttactgaggatgatacattatagtattgtattattctctgtagtaagattagtaataagtgaaaataaatgatttaaattc

SEQ ID NO: 7453 - DNA, 372 bp, Homo sapiens
agatcccaccatactttctagatgtcgaaggcggcagtaggaagacctgagcttgagcataagatctgtgggatttcatcttaggggcagaaacaatccgttcactatttatttagaatgacttagcagccatttaaattttcacagagggctcaaccacctttggagtgactccatagcactggccatggtcagggttgttggaacatctgacctgtgcatccaggagccgaggagtcaggttgtaatacaggccaagcagacgggctttgagggcatttagtctcagaaaaaaaaaatgtagaaggatttcggaattagaattttgtgtattgtatctgtagttttgtaataaactaacgaaaaatagtg

SEQ ID NO: 7454 - DNA, 1925 bp, Homo sapiens
agctaccactctggctgctagacagcttggcggtgagggagatgactccttgtagctgacatttggcaaaagcgtcactgaaaggcaagctaaatgtagttattttatcctgtggccctgaagcacaaaataaaaattctaattaaaatagttaactttaagagtagtaatcattttattttgaagtctcatacaagctctccgatagagaactttcaggcagatcccaccattagcctgtaaacaaaaggtttggcaccagccacctgggaccaaataagaattcaattgtgcttgtccagatatgaacaaatatgtagtgagtatagagtttaccataatcataacaaatattaaagatttccttggagtcagagtaaaaaacaaacaattataatgttgtctagggacgacatgatatgctacctcctttttcctgaagttttattccattatattgacaagatggagaaagcaagatcacgaaggtgtgcaaatgattcttaaggcatggacgaggatttttcaatttattttttaaactgtttccataccctttctttgtctttcttgctttttgtttttgccgttgtatttatgtttgagacacaaccagtcattggtggcaggggcatatagtggtcagtctgaaagggaggctctcttaagagctgtgtgccttccacccagagccttgtgggagacccagtagaaagaaacagcatcctgggaaatccagctaccatggccctcccagtggaggcatcttacatttaggatacttcaagtatcctcagaaatgtattctgcacccccggccccacccatgctgagggaaggggagcagttgccaatatttgcaccatcttcacatgcacctgttgcaacaagagcttctgggaaggtaagtggcattggagctagatcacgtttcacaattagtggttgttcttttctgtgtttgtcttgcactttaaaaaagagagaacacatgcaaatgaacttgcttgtgtgtatttgatggctctaagggctataaattacaaacaaaacacatcccagacattaggagttcataagtgtatttaatgaaattggtggttttaggaagtcaactttagttttgctttgtttgcatgtccactaatttttttattttgatatttgtcttttttttaaattttacagtagtcatcgaaagttatgtttctttgcttacttcatttttttctctaatcaagactggaacaaaagtataaatattatttatttcaggtagcatttttttcgtgtagttttttaatatatacttgaaggaaatgtttcaccttatttttggtctttgtttattcatttagaccctgcaagttgattctcattaattgtcagattccactaccctttcttcctcatagatagtaattaccaatgtaactaagtatttgtgttctgatatctgaggccagtaactattaatatctagttctcagagcatttggaaaggttatcttaaatggctacctaaattgaaatccttttcagaaaaaatataattgcaagtaggtaggactggcctaaattgtctaatgtaataaagtcagacaaaatgcatactttatagtttcaagattttcagtatataaaatctgtccattcccattaaaaagtggaagattttaaataatttctttacagatgttttatttaagcaggtagctcaatctactaatgttgtttgatctgtgtttgttatactggttgtaattaatttttttaattcatgaactagcagaaaatttattaaattaactattaactacattcaccttgtaaattactgtataaaacttgttgacaatgcactgactttagaaagatgttaatgtacataaatagagtgtaaataaaatagtgttgatgtaccg

SEQ ID NO: 7455 - DNA, 4422 bp, Homo sapiens
gggaggacctcagttaaccaattaccttttcccggattccagggaattcatactgtgaaatcaaaaccatgttgttttggggggctggaatttgcattgaaacactggtccagtccattgaagaccctattttgggtgatccctatcttgcagaatgtctgtaggaataagcatatattcagttatattcagcatgtaccgcatgtgtaagtagtctggcccacattttcaacctagtagaacaaacaacaggaaatcttttttttgttgtttttaaaaaattcattttgcagaaagcctgaaagaaaaaaaatacccctaaataaaactatttaagagtttaaaagagttgcattcttattatgtaaggatgattttaacaactttttaatatgtaattcttccatgtggaggtattcaatactgtagtgtaaagaaattttatgcggaaaatctttatatgcagtatagaaaagttaacacaagtactaataaaagagggacatcccgacttacgtttttctaccttgcccagataagtggatacaaccactctatattacaaggaaaggactgtcagattcatctgaactggaccagtgttgatctgtaatgtaatagaaaatctgatagaccagcacttctgacttttttttttttggtacaacaatgcaagatgctctgatagcatttgctaacaggaccaggaggatctaaaaaggaccagcctaatgtagaaggtggttacttggaccagaggctttagattattattttagatcctacatatacttttatcagtagaatgatttcatttagatgtataatgaaaaaggataatgcaaaaattatgtaatagataccaaattagggaagtttggcaatttcaatggcatatttttagtcaaggtacacagatggcagtgccataagcaagtctataaatatcggctgcagccatccccctcattttaaatgttgccctaataatcaatgcagttaacaagtatattggctgtgtgtcatgaaatagttcatgttcagatggaaatgttaggttactgtatggtttatggagattaatgaaaatgaatgcccaaaaataagtcttagaaaatcctccatttttatggtaaatagtaatacaactaggtcatttcatttgaaatctaggagtcaaatggaaagatcccctaataatacacctatttcactaacttgtctttctgtttattgggttttgatttgattttttgtaagccagtcaggttatttaatgatgaggtaataatcaaatttaagaatttgtgacatgtagcaattcaagaaacaaaaaggtattttgctgttacctcaattcttactgtagtagcccatctgatgcttctatagttaagaatctgggttccccccctattttcaggggttcatgacttggctgttaaagatgttgctcctagctaatgcttggagtagtctgtgggtgaatggatgtgtgttgaattttagttttcttttaacatgcatgttgggtgagaggggaaaaaaatctaagctgtctgccacattgagtacagaaaagttgtagatttcaaattttattaatattttaagcacttttttgaacttcccaaccttgtttgaagctgttatttgcagtcctattagttttgagccattgcatttaagttccctaggagggggttggttgggggatgtactgaaagagatgaagcaaacccacaccctaagatggtaactgtgtgatttagaaacctgagtttactcctcaaatcgaattattttctttttaaattttggaaagagtaaattgacgtacttgcagtttatgaagctgccccccacccctcagttaattgcagtctaatgtcaagaggcacttctttattaattaccaaatagtctttgtgaccaaggactaacatttttaagttactcagctctatcctcatgggcctatatatttaatacctccaaagatattttcaggataggctttgtatacttttattggttatttagaatccagtggtatgtttgtggtataggaatgtcatggtaaattgtttttcaataaatattttgaaacatgtttccatatgaagtttttttttcaatctgtattttttggttttgtgcacatacagcatttcctaggataaaaataaacaaatgacttacagcctcatcctccctaactccatttgaactcaacttagctcacactcagtgataaaacaacatggtatgtagaagcctaggatcacagggtgataatgtcaattggcagccagttgtgtttttttgaaacatcattattggcagtttctccttatcaccactgctttaatgtagtttttttgtaaatccatatactttaatgcatacactctagcttaagaaaacattgccattttggttagggatatgacttaatgtgctattatttctggttctaatgaagaataataccctatgactttaagtgtaagattcatcctttaagtagggatgtttaggataagttagatgtgtgccactatgatttattgggtttcttaaaaatcttgaagaaaataataaaatttatctcacaataagttaacttgcgcaaactttttacatatggtgaggtgcgtaaggaagccctggccaacttaaagatttttctggaggttcagcaaagttatgttaaattaggggcctttggtctcatccttctctgactcttctacccagtcttttcctaaagttcggtgctactccagttgggtgcatcagggagctccgtcagcactcgcatgtgtcgctcaggtggccactcatgcctgcattccatttaatagagtcaattggaatttttagagcataatctttatggatcctcaaagctgactttgccaaagggattgagacccttactaccatcaaatctctgtctctgcttggttaaaaattggctcactattgctttgtagtaacccctgcccaggtattttttcacttgtgaaaataatttgagaaagacctttgttcctagcctgttgggaaaagtttataattttatgaaaattaagtacagaggctgcgatcttagaaataatgaaggtgccatttggctgctccttaatagtgcagacagaaaactgcagtgaacacatgccaaaacatgattgaagcctttggctgaaactttatacatagaaataatgatttgctcataacaggtatcattaactgccactttttatgttttccctagaatttgtagccttgctgcttgcttttcttctgggtggcaaagttactactggaaaaacactataagtacaaagtttttggggttttatctttgctttagaagtggatgtgtacttcacctcttggctgtggaggaacttagttgccaggaaattttttttttttttttcagacggagtttcgctcttgttgcccaggctgggagggcaatggcaccgtcttggctcactgcaacctccgcctcccgggttccagcgattctcctgcctcagccttccgagtagctgggattacaggctcctgccaccacgcctggctaggaaattttttgttgttaatatgacatttggattaatctccagcttcaacagtacttcttttgtccataaatctcaggaatgttttaggcagaaaactggttttaccctgttgataatcagaaggagtgtgctttaggatttattgcataatactattctttaattgcaatcctaggtatctatagcatgagtggccttagtgagtttgttgaagtgcacatgtttttcaagagtaaaatttaagattaaaaatatatcctatatatagatatctagaaaacttggtttgtggtgcacagttaagtgttggatcactaaataaccattgcaggtaccgtttgtgtaacattactcatttctgtatattccttttatgggaagatattttgccatggtaactaaaacttttcagttctacttttatgatgtgaatgaatgctacgttttattaaatattaccaggtcagtactatttttatactttattaagcaacaggggattttagtttaataggctcaaaataaaaagttcttaatggaacagttaaaaacaaaacactaacaatctttacgtgaaaatccccactaatagtgccacaataatttctatagaaatatctaaggtcattaaatagatttttgaagacggttcttcattgtgtcaggatgacctttcatatcattctcaccaacttgtagtgcccaccgttatttgtaactattaaaccatactaagtatgtttgtaaccagcattgtgatatattctgtacttgtattgctaaaaatgaattattgacctaataaatatagtgttcctgc

SEQ ID NO: 7456 - DNA, 100 bp, Homo sapiens
ccatctgaaagcaactttttttggtgtctcaaaggagtaactgcagcttggtttgaaatttgtactgtttctatcataaataaagttatgacttcttgct

SEQ ID NO: 7457 - DNA, 672 bp, Homo sapiens
taatacttaactctcaagctaagtaaaaatatgtcatcatgcttatgttaaactctgttgtaagtaataatttgtaaattgaataagtggcatactttttaaaaaactattttatgttcagaaatgtaaatgttattattcttgagtttttgggtttttttttttgagacagagtcttggtctgttgcccaggctggaatgcagtggtgtgctctgggctcactgcaaccttcacctccaggttcaagtgattctcctgcctcagccttctgagtagctgggactacaggtgtgcaccaccatgcccagctagtttttgtatttttagtagagatggggtttcaccatgttggccaggctggtctcgaactcctggcctcgtgatctgcccttctctgcctccctaagttgctgggattacaggtgtgagccacagtgcctggcccattcttgagttttgataaagtaattcatacaaagtactgtcctcaaataagtcttccttagctaaatgcaatttaaaattattcaaagatcctagggcacttctagtttcacgtaaatattcatattaggtggttctcttcatccatttgttttcacactgatacataaaaattaacagcagtctaatctagtgacacctcagtcatatttcgctatagattttac

SEQ ID NO: 7458 - DNA, 2187 bp, Homo sapiens
aacaaaatttaaaacaacaaaaagttgtttgctgcatatacccaacatgaatctgcatattagtaacaactctaaactgaatgggaacagtaaagtattgtcttggaatcactaaaacaattcaattcaacatgagtatagtttagaactttatgagaattatgcttgcttgtttctgattggcacatctttggatctactttgctgatatgtttctattgtagcagctgagctttttttttttccactgggaacacatgtaagaaactcattattggaaagggaatttggccttgtatttagcttttgaagtgaagactgccatgcctttaatttcttataaaaatgagtctgtgggtagccctagtgtttattttaactgtgagcttgtaacagaatgtgacaaagatgcaaagatgggagaggaaaaaagggtaaagggaaaggagaattaaggaaataataggagttaaaaacacaagtagaaatctcaaagatttgcagtgcaagtaatagtaatgcaagttggaattctagttctcaagaaagagtattgagaagacttttaaaaaggcaagtagcttttgtaaatgatttctgtggaaatacagatgaggatttaaagatttcacatatttgcttcaatttttattaatatatgaagccatatgtttaaagagatacttgaataatttggaattttaagatactggtgtaaaagtgtttacagaaacatctttgttcaaagaagaacctgagagatctcatttagttttatgttttaaatttatttttataatgctttattaacttacctaatgctcagaggggggaaatatgtatcaaattaaatgaaggtagagcaataaaacccactggattaaagagctcttggtttgtcatcaggattataattcatatcttactttgagaagatctttgagtaagaaaatgcagtgtttgaacctgaggaaaagttaaagtgtagaaaatattgtcttgccgaaggattttgcagtcctctgtcagtaacttccattgattaggcagacatattcaggtaaaccctaatcattaaaaaaaaattatcaatgtagaaagtaattcccttttttctctctgagatatacctcaatcacacacttccccacccccacttgaaacagacctcttcacttgtgttttttttttttttttcctgaggtggagtcttcccctgttgcccaggctggagtgcagtgggatgatcttggctcactgcaacttctgccacctgggttcaagggattctcgtgcctcaacctcctgagtagctgggactgcaggcacgcgccacctgtatttttgtatttttagtaaagacgggggtttgccatgttgcccagactggttttgaactcctggcctcaggtgatctgcccaccttggcctcccaaagtgctgggattacaggtgtgagccaccgcacctggccagaccgcttcacttgtaaaagaaattaggctaataagaaggtgtagtttttgagaaatgaaatttaactttagccttttcactagtaaatagtcacatctcattttcttcctttgtaaaatggggttactactggccctacctcatattctatgagaatgagtttgtagctgtttcaaatcatgaagtgcatagtatcacatgtgatagaatatttataactttttattagatgcttaatgttcaattaagtaattttgatgtgaaaaataaaagtaataaaagtatcttaaaaatagcataagaattttcatatttttaaacaaggcagttttgtagtcccttaagattaaatacaactgctccttttttttttaaactgaggccttgcgatattttgtgtgaatagatatgccctaggagttcagaaaaagttaaaagtatgttttctaattaaatgcagtgcacattcctggatcaatattcaaagactggtcataacctgctgtgttaaaataatcacatatgctctttttcatcagatttgttgatgatgtaaataaaatgtgtaaatatattagtaaatgttaatattcatgtattttaagttaaggttataaaatttgtcacaatgtgtttttttattcaagtgaaaacagatgtgtgcagctattttgaatattggtttataaacattcatattctttatcaaac

SEQ ID NO: 7459 - DNA, 3862 bp, Homo sapiens
tcttcatttgatggaactgtgcaagaaaagaacaaggaaaaatggatgtttcgctgcaggattaagttacaattatcttctcagtgaaggtcatttgtgatggggtctaattcttattacttcaacaaatattgttttgacttggggggaggggctataaccctgctatttttcattgactctattgaactctttaggatgatgactgatcatacaaaacgtattataacattttcgtagcaaaattaaccttttttttttccagtcacagtatttgtgaaaagtaatgagccatagtacccagtcatgttaaatgaatattaaaagcatggagaggaaacatgaggaacaatgaatttcaacatatggcttcagaacatgaagatgttcttgtatggattatagtatctagtattcaaaaatgcctgcatctcttctcttatttattgtaagtttttaaatgtataaattgtcttatatttcttaacctcttttataaaaattttcctagaaggtttatactgccttcttgctttaaagcaattggtctaaaatatatgtaatcgtcttaattaaaaagttgcagtagggttgcttttagagtattatttttttgtaagggggtgggtgggacagtaaatttgtattgtctcgatgtacagtttaacggggatagagggggaataatgtccataccattgtgtgtggaggatttacagctaagctgtagttgcagagtacatgtacagtaatgaagttcactgtgtttataaattgaaaaggtaccaggtcttacagcattttatatatcacatctttacagaataacatgatggcaatatacaagtggtattgttaggtggtttaacttagaataaaatgagaattcttcagttatattttgtactatggtttagggctatgactaatatttcaggccatttccggtgaaagaaacttagttttacaagaaaaaccatttgctactgaatgcttaaactaattttagtgtttaatgttacatgcttaaatttttttcagttttaacagtggcatatttaggcatggaaatattattatgaaatttattttcaggatctgctataaggttgaaatttagcccagctctaggcattttacaaattatttttcaagcagtcattcttgattgtttgacttttttttttaaattaaagattgggaatgtatgtgagagtatgcatatgtatgggtgtgtgtgtgtgcgcgcaatcaaactgtggtgtaaatagattctcagtgaattctggtattcagactctattccactagtgaaagaaccattttttaaacttcccttgccttttttatttatttaattttcttggtttggagatgtcagtcccaaacaccagagtctgtacttttctataacacagctcagattaaggtagggcatatgccaaggaggttctcacctccctaaagaagggacttgaattttagggactttaattcacccctccttcaatacaactttcccccttcttgtttgcacatgccaagataactgcttttatgcaggctgtacccccttgaaaaatcctttctacagtgctgctcacaaaagagcccaagttcgcctcctacctgcattgctgacttgaattcacagtcgccgagtctacctagctttcttggaagcagtctagcaaaatttctatttgtacgttcactaattatctacaaggacaaaatcagttgtatttacaaaactctacttcagtgtttgttttagtttttttttttactgaaacttgtttttgtgaatactctgtgcttagaattaaatatcactttcttatgaacaacataacttcttcagattgtgtatatgaaaacattagcaagtcttgttttttctatgaagcaaacacaattggtgacaaaggttgtcaatcatttcttcaaaattataatgcagttctaatggtcagcatattttgatattaaatttaaagatcacctctctgcatttgtttttaaattatgctaatacaccacacattatgttggtatgttttgttctgtactttctttaaaaaaaaaaaaaaaacttgtctgagatttgaaggaaaatgtgcttatttggaatttccataaaaagagtatcctttttatacacttaatagtgactttacaaaataaaagttatattctcagttgtttaaaatcactaacctatgataaccacacctcaatttgaaagtagatttaaaattattccctgacaggttatttaatatggagccataaggagggaacccagtacacaattattttttatttgggaatcagggaatagttcccaaatatacaggatttattgataagattttttttcttcccttcatatatccattcaaactcaatggaaagttattaaataaccattagaaaagctcagtagacttatttgagaaattaagccttgtgcaggatgatggatttgacttactaatgtactgtcacagacaaatatgggtagttttgtttaaataggtaagcaaaatattatactttatagcagtggattaccaacaccttgacttctttgttacagtgctaacatctttttttttgtgcaggtatccatgattattaagcagggtggaagttcagtattttgtcatttaaaaagattagttatataatgtctgcttccagccagtgagaaacatctagccatacctttcttatgcaagccattgagttatcaggactgtgaattaacactgtatgaataaatttctgtacaccttattgtttggccagaaggccaccaagtgtacttatatgtaatccttaaattttaaagtagctgtaatttttaaatatttctaaacttttcttaaaccactaaaattaagctcttactacttagtcaactatcctcagctgtattcgtactcaattgtcagtatggcacagattactgtattaaaatattctcctttcgtcttcatatttaccttctgaggtaattttttaacttaatgtgttactacaaagatttgcagatctttaatcaagcactatgttaatactgtaatatcagaatactatgttgcattatttaaaatgttcaaattgaatagattaaaaagtttttaaatgctattgcatcatataatttgctattcatccactatggcattgcatatcaatcagttaatacacttaatgttgcatgagtgatattttggtctgggtttcctcttaagattttagtttgtctgaattaaggaaaaatgtttttaatatacattcttattttgtcccacccctccagaaataagctggaaatcttaactttttggggggtcttttttggtgttttaatgggcccagaactgtggtttaaatttttatgtatgtattttcttttttgtggagtataaatttaaaaactggatttgggacctaaaatactcctcaggttgatgtattcatgaagttttaaaacatctttagttttcaaagtaaactggatatgtggaccttaaagttattgagtttaagctacaaattgtaacgtcattactggacatgtcagcatcaaccctctcaaaatagcttggtcactttatgaaggggcgttttaaagttgttgtttagcagtgacatttaatatggtccaattgcttttctttttaacgtgacaaaaagagaataaggaacaaacactattgctgccgaatgccataacactgagttgtacaaattgtgattgaggaaatgaaaaggtttatactttttaaaaaaaaaaaaacaaaaacaaaaaacaaaacttcaaatggaataaattattcatgaagccttc

SEQ ID NO: 7460 - DNA, 389 bp, Homo sapiens
caaggaagccaactgtggagctcggcggagacctctcctgccagcccttctttctacgtccccaagtgcctccctccctcctcctctttactgaaactgaaaccaaagcgttcacagttagattttcacctcgtgccactctcttttggggtctggcttgagcatctatgggcagccacagcgaccagtctagtcccagacagcacaggtcaagcagcgtgggactgtggagcccctggcaggctggcctggtgctgcccccttagcccagaagccctgccaggtccagtggcctggggtcccactgctgagggcacctgccaggcctcactccaccctgaatggactcgagccatgtattcattcagtaaactgacattattctccca

SEQ ID NO: 7461 - DNA, 2097 bp, Homo sapiens
tgcgcccggccggccctgggggttcgcggggtgtcttcttgcctgcccctgctgaggcgtcttcaggactgcaggctccggagagtggctctggcagcaggcgggcgcgtgggtgcagctgcatctgtttgagtgctgctttctggggtcaggtctccgcctcctctgcttctcctttctccgctgctatagaccagttcattgtgtgtggctcccgtgtctctgttgcccccttcagtgcagaaggctttgggtaggacttcgggtgttcggtcctggtcgcagagcacagatctttaaagaagcgagagaggaggccccaccctcctggcagcagatgcctggggcaaggccaggggaaactgggggggcctcagggacaggcctggaaaggccacgatggctgctgaattcaaacaaggagtccctccagcctgaataacacgtggcacaaatgggcccggcctttggcagaggagcaagtgatatgatgtgtaaagtatgttggtggtgaaagcaaggttccccaggagaggggagggactggcccctgggaagctctgagatgaggctgtggcccagctgtagtcctgaccttcctcttctttaaccctttagccctaggatggctttggtgggagaggggatagaagcccatgacttcagacagactttctcttggcagatgcaggcgggcctcctcccaggctgctccagacatgggggttggggatggggggcaccttgcagccccttcctgctggggctccctccttgtagcaccccccttgcggctcagctctggtttcctctcccaggctcacccaggctctgctcaggctgggaggcagagggcacaaaccttataattttttaaatgaaaaaccgctgctgctggctgtggctagagccccctggggctgctggagctgctgcctctgttctggaggacgagccttctccttatctgctgcccatctttccaggaagtcaggatggagtcagaacaactacagtcatcccccgtggtgtctgcacatcactccagccccataaagagtgtcatgttagctgagtcaccatttggcttcggcctggaaatagtgtgattagaacactgatcgtgtgcgaggccaggagatcaagaccatcctgactaacaaacacagtgaaaccccgtctctactaaaaatacaaaaaaattagccaggcgtggtggtgggcgcctgtagtcccagctacttgggaggctgaggcaggagaatggtgtgaacccgggagatggcgcttgcagtgagctgagattgcactccagcctgggcgacaggctcaaaaaagaaaaaaaaaagaacaccgatcatgtgcttcttggatctggtgactgttctctccctgttttcctttctttttgggtgtttgaggagcatggcttagcttgagacacacacagacactgtgtacttcagtgaagggcttaatatacagtttccaaacctgacgactcttcttcttgtaatggctgcccttttcctacctgaggccgtcttagagaaaggggccagtctcctctaatgctcagatttcccatagttggcttttgctgtgtctcctgcctcaggcagtgtcatttctgggagcaggtggttgtagtccaggcccctccccagcagggtctgcccaggctccttcgagcccctttccccgcctcctctcagcctgtccggatgacagtgttcgcctcctgtttagactgtacactcttcaggggtaggggtgccgtcagttcttcaatcagctggcacacacttgtatagtgaaatgtttacatgtgggaaaactccgccttagacaaactaccaaagtacaatcgtgtctctctctagccggaatgctacagagagaaatggaaccttagatttgcaacaaaagtctgtaaactggtctgtttgccaaagtgaacactggatgactaaggagctgaagaaggcccccagaagcggatttgtggtgggttattttattttgcctgtggccaatcttctgtgaaatacaatgtgctgttggtgcaacagatgattcaataaatgtctacagcag

SEQ ID NO: 7462 - DNA, 2663 bp, Homo sapiens
ggcctctgtaaccttccaccccctctgcggaaggcctggagccggcagggggaaggtgggaaggaggtcgagctgggcttgcgtgggggccaggtgggaaggggatgaggcttgctcaggcgtaggggaccagggcagggctctgctccaggactccttccttcttccttctcccgcagccggtgagggtttggaaaccaggattggggtctgcccaccaccctgcttcctgcttcgttcagcctccctccccacctcaccccaggaccccctgggaggcccccaagcccagctcccctatctaggtgccttttctccagcaaggagtcagcatgcccccctcagggtcccaagctccctcactgccaccggagactgtgtggcccccacgtctccccatctacctctacccttaacctgtttctgagccacggagacagggaggaaggagcgcgacagtgccacctgttgggcatcataaatgcccctgcagcccatgggggaggagatggggaagtggagccaccctgcctctgcagggcaaggcagggcctgccccagtggggcttgggaccatctcgaaccaccagcgtggagaagcagaagcaaaagcactcgccaggctgcagcctcaggcactggcaggggctggtgcggccccactcccctcccccgctcccatttgtgcccatcctgttgtgaccaaccccgttttaaacatgtttcaatagatccagattctctattgtgtggcctgctgggggatctgtcacaggaagggtgcagactcaccatggggcgggcatggggggacagggccagccccgactacctcggccctgatgggggcagggagctagaagtgggtgtcagttccctgacacaccattgagaaatgggagggctcctcttcacagcgagggcttcatgctgtcacacccacagtggttttggaactgaaactccacctcacccctcagttctgggttggttcagacccaccaacttaccatatgcaccccattgtgaagaggcctgagagcgggagggccaggctgccagtgggtgatggcgcctgtcctcgctgcacttcagtgcctggggtgcaagctgccgcgttccctggctggttccagctgtctagctccctcccttcttcccagccctttgacctggaagtaagttagcgaagaatggcggtaaccagcagacccagcaagtgctgcccaaggttttagtgacccctggattgtcccccctcatcattacccctcgctgctgtcatcatccccttgccttttcaagctctgcggaggtgcagtcacagctactgtctcaggaaatccaaagagaaactacctctgcttctctgaaaacccagggacaatgagggatgagttcacagcagagcaaaccaggcaagttgggaggacctgagggcgccccggtgggacacaggcagaagtctgggttgtcctgctccagattcaacttcctgatgtctccagacatgggatcgatgagaacagagactcctggagggtttgctgccaccacaccatacaactgcctgagttcctaagtggcctccccgtggaacagggcagggagctgggccacaggctccagtgtcacataagtcactatgctgaggcaggcactgctcctcgagggagcagagcgaatactcagcagagatggtgccccggcctggatcctcccaagtgtgaagtgagcgcctcagagcctctcagggcaggccaacttcctgcaccagaggtctcagatggcaaggatcatcttggttcggttaagcaacagtagcagatgaccacaagggggtactggagaggtggctcttggagacacctgacccctgccctgcaaagatgggactgaaggaagtcctctgggccaggaagaccctaccaaatatcatgaaagctccgggaactcagccactggtgacgttcaggttgtgagggccagcagtgccaccctggtaaatcagccctgttgggaccaccccagtggagctcctggaggggcaactggaggaaaggggcagacacctctggactgacaatggtatcagccagatcaccccaggacccctctacttggagtcaagttctcttctgcttgaaaggcccaggctcgttgccaggcaccatacctggcccctgctaagcaaaaacctacctccaccccccacaactgaaagcactgccacaggacccctctgatataaatgatcccttttattgtaagtaatgcgcaacactggcctggctttgcactgcaagccctcggtcaagatatagtcaaataactatggctgcaggttccacagttccacaataaccatggctgcacgatccacaattcagacacagacatagagctggggtgggtggaaggggcaggagggtggcagagtgcggactgtccccagccctggcctctccatgcagagttggcccaggcagacacaccccatggaatgatgagaaagtgacggcacggccccttcccacagcaagcctggggctgccaggaactgcccttcagaacctttgggcccaggtcaccctgaagccccacaactttttatctggattagttattaaaaaacaataaattaagcaacaacttggtcctga

SEQ ID NO: 7463 - DNA, 1447 bp, Homo sapiens
ggccagggtgtgaagggacttacctcccaaaggttctgcaggggaatctggagctacacacaggagggatcagctcctgggtgtgtcagaggccagcctggggagctctggccactgcttcccatgagctgagggagagggagaggggacccgaggctgaggcataagtggcaggatttcgggaagctggggacacggcagtgatgctgcggtctctcctcccctttccctccaggcccagtgccagcaccctcctgaaccactctttcttcaagcaggtatcgtagccccttcgttctggttctggttctagttctggttctaacaactcacaatccctttagctttctctcccctccctttgaatgagagaaactaccccgcttccgaagcccctgaaagacactgctccttcctctcatggagttggctccgacagcccgtctgccaccaggccatggttccttgccccatggtgtcctgggacccagagcaacaggatctgtcacccacctctctcttctcccccagatcaagcgacgtgcctcagaggctttgcccgaattgcttcgtcctgtcacccccatcaccaattttgagggcagccagtctcaggaccacagtggaatctttggcctggtaacaaacctggaagagctggaggtggacgattgggagttctgagcctctgcaaactgtgcgcattctccagccagggatgcagaggccacccagaggcccttcctgagggccggccacattcccgccctcctgggcagattgggtagaaaggacattcttccaggaaagttgactgctgactgattgggaaagaaaatcctggagagacacttcactgctccaaggcttttgagacacaagggaatctcaacaaccagggatcaggagggtccaaagccgacattcccagtcctgtgagctcaggtgacctcctccgcagaagagagatgctgctctggccctgggagctgaattccaagcccagggtttggctccttaaacccgaggaccgccacctcttcccagtgcttgcgaccagcctcattctatttaactttgctctcagatgcctcagatgctataggtcagtgaaagggcaagtagtaagctgcctgcctcccttccctcagacctctccctcataattccagagaagggcatttctgtctttttaagcacagactaaggctggaacagtccatccttatccctcttctggcttgggccctgacacctaagtctttcccacggtttatgtgtgtgcctcattcctttcccaccaagaatccatcttagcgcctcctgccagctgccctggtgctttctccaagggccatcagtgtcttgcctagcttgagggcttaagtccttatgctgtgttagtttcgttgtcagaacaaattaaaattttcagagacgctgctgg

SEQ ID NO: 7464 - DNA, 1630 bp, Homo sapiens
agccatcccagagatttgagttctgatgccacctgtaagctctgaattcacaggaaacatgaaaaacgccagtccatttctcaaccttaaatttcagacagtcttgggcaactgagaaatccttatttcatcatctactctgtttggggtttggggttttacagagattgaagatacctggaaagggctctgtttcaagaatttttttttccagataatcaaattattttgattattttataaaaggaatgatctatgaaatctgtgtaggttttaaatattttaaaaattataatacaaatcatcagtgcttttagtacttcagtgtttaaagaaataccgtgaaatttataggtagataaccagattgttgctttttgtttaaaccaagcagttgaaatggctataaagactgactctaaaccaagattctgcaaataatgattggaattgcacaataaacattgcttgatgttttcttgtatgtctacattaaacttgagaaaaagtaaaaattagaacactgtatgtagtaatgaaatttcagggacccagaacataatgtagtatatgtttttaggtgggagatgctgataacaaaattaataggaagtctgtaggcattaggatactgacatgtacatggaaaattctagggacaggagcatcattttttccttacctgataccacgaaccagtgacaacgtgaatgctgtattttaagtggttgtatgtttattttcttgagtaacaaatgcatgaaaaattaatgcttcacctaggtaagatcattggtctgtgtgaaatcacaaatgttttttccttcttggttgctgcagcctggtggatgttcatggagaagctctgttctctatattatggctgtgtgccgttgcttctccctctgcttttatcttttccacagttgaggctgggtatgttctttcaaagaaatggccatgaatatgtgtaagtatacttttgaaaatgagctttcctaaactattgagagttctttccacctcttgcggaaccaactcttggaggagaggcccatgtatctgcacgagcacttagcttgttcagatctctgcattttataaatgcttcttaccaagaaagcatttttaggtcattgcttgtaccaggtaatttttgccggggatgggtaagggttgggttttctggtgggagtggggtggtgggtattttttgttgatgctttagtgcaggcctgttctgaggcaataacaagttgctgtgaaaacagcatgtgctgctgcctttgtaactgcatggaaacttttcacatgggtttttctccaagttaatacagaaatatgtaaactgagagatgcaaatgtaatatttttaacagttcatgaagttgttattaaaataactaacataaaacttaattactttaatattatataattatagtagtggccttgttttacaaacctttaaattacattttagaaatcaaagttgatagtcttagttatcttttgagtaagaaaagctttcctaaagtcccatacatttggaccatggcagctaattttgtaacttaagcattcatatgaactacctatggacatctattaaagtgattgacaaaatctc

SEQ ID NO: 7465 - DNA, 367 bp, Homo sapiens
gcagagctgccaggctcccaggagagcatggggactaggaggaagggtgtggcatggctcagtctggcccccttgattaccggcctagcccctgctcacatcacagctgtctgaagaacagtgaggtggagtgcctagaactcccgtggtggtcctgagcagagaggaggatgtcctcctgcctgcctgaaggtctcccatgaaaacactgctgaactgtgttgacactcatgaccctttttttaaaccgttaaagggaagttcggtgttggagcgatactcaatgtagtcagtctacacctggacgtgtgggccacttaagccctccccacccccatcctattcctgaataaaaccaggataatgg

SEQ ID NO: 7466 - DNA, 857 bp, Homo sapiens
ctgctcagggatctttcttcccagccctggagcctggagggagaccaccctctgggtccttgctggggccgcagacacgtaggctggggtgaggagtgtctgctgtcaccctctactctccagctttagtcttataaatgtagtgataggattccttgttgcttggtccccaaagccttatactttttgcattggctttaattgggttcagcagatgcctcctctgcccccctgcaggcaggcccaagtaggactgctggaggctgtgctttgacattgtaagacatttccgaaccaaaggctgctgggtttgcatgtttacagactccccctggggcgagggtcagagctggctctggggagctgggctaggaagaggaggtgcagcccagactcttcctagcctttctaaaccaaagttctttgccattcctacaagcccagccttgctgctggttttttcctttcctttgggtatttgcactattttgggagcaagttttctatgtgggagccactttttttgtacaggggtaagttgggggttttcagggagcctgttaggtgcctccttcttttctttcctcaatctatgcaagcggctctggccgccatcatctcctgggatgccagagggctgcctctccagcggcttgggccggggaggggacactccagttctctagcatggcctgaggtatggggtatgtgcatgtggaggccagggtaaggtgaatggggaggctgggaggactggtgttgccctttggagcttggtgaggagggtgggcctagggcttggcgagtgccacatctggcaggtttggaaatttccaaataaatccttttgtctattg

SEQ ID NO: 7467 - DNA, 516 bp, Homo sapiens
agggctgggggagagaaacactgctgccctctttgtagcagtcaggcgctgacccaagagaactcaccttattcttcatttcgcctggtgaatcctccaggcccttctctacaccctgaaggggagggaggaaaatggatgaatgagagagggagggaacagtgcccaagcgcttggcctctccttctcttccttcactttgcagaggctggaagacggcagccgccggactgggcagatcctcaagcagacctacagcaagtttgacacaaactcacacaaccatgacgcactgctcaagaactacgggctgctctactgcttcaggaaggacatggacaaggtcgagacattcctgcgcatggtgcagtgccgctctgtagagggtagctgtggcttctaggtgcccgcgtggcatcctgtgaccgacccctccccagtgcctctcctggccctggaaggtgccactccagtgcccatcagccttgtcctaataaaattaagttgtatcatttc

SEQ ID NO: 7468 - DNA, 245 bp, Homo sapiens
cacaaaatcgcacaacgatgacgcactgctcaagaactacgggctgctctactgcttcaggaaggacatggacaaggtcgagacattcctgcgcatcgtgcagtgccgctctgtggagggcagctgtggcttctagctgcccgggtggcatccctgtgacccctccccagtgcctctcctggtcgtggaaggtgctactccagtgcccaccagccttgtcctaataaaattaagttgcatcattt

SEQ ID NO: 7469 - DNA, 244 bp, Homo sapiens
cacaaactcgcacaaccatgacgcactgctcaagaactacgggctgctctactgcttcaggaaggacatggacaaggtcgagacattcctgcgcatggtgcagtgccgctctgtggagggcagctgtggcttctaggtgcccgagtagcatcctgtgacccctccccagtgcctctcctggccctgaaggtgccactccagtgcccaccagccttgtcctaataaaattaagttgtatcatttc

SEQ ID NO: 7470 - DNA, 106 bp, Homo sapiens
gggcccgcgtggcatcctgtgacccctccccagtgcctctcctggccctgaaggtgccactccagtgcccaccagccttgtcttaataaaattaagttgtattgtt

SEQ ID NO: 7471 - DNA, 220 bp, Homo sapiens
cgcactactcaagaactacgggctgctctactgcttcaggaaggacatggacaaggtcgagacattcctgcgcatcgtgcagtgccgctctgtggagggcagctgtggcttctagctgcccgggtggcatccctgtgacccctccccagtgcctctcctggccctggaagttgccactccagtgcccaccagccttgtcctaataaaattaagttgcatc

SEQ ID NO: 7472 - DNA, 487 bp, Homo sapiens
gagccaggtcgccccatgacctgggtgcaggctccctggcctcagtgactgcttcggagctgcctggctcatggcccaacccctttcctggaccccccagctggcctctgaagctggcccaccagagctgccatttgtctccagcccctggtccccagctcttgccaaagggcctggagtagaaggacaacagggcagcaacttggagggagttctctggggatggacgggacccagccttctgggggtgctatgaggtgatccgtccccacacatgggatgggggaggcagagactggtccagagcccgcaaatggactcggagccgagggcctcccagcagagcttgggaagggccatggacccaactgggccccagaagagccacaggaacatcattcctctcccgcaaccactcccaccccagggaggccctggcctccagtgccttcccccgtggaataaacggtgtgtcctgagaaaccac

SEQ ID NO: 7473 - DNA, 2217 bp, Homo sapiens
caggcagcatcggggtggcccactgagtctcggcatagtccccagagctcccccgtggtgcctgcacacagagtgagggaggagggctttgaatctgggactgtgcctggctccctgatgggggacaggatttggccacactggggctgacacccaggcccgagcgcctgcgttcccagaccatgggaaatgggaattgcgctcaggggctccatgctgggtctgaggcccctgcctccaagatttaacctgcaagttgctctgacctcctctgggccctgtcgcccctccttttggcctgggggaggtcagaacattcgaatctctgcccctcacttgaggaggagctggcctgcggtggagggatcagttgccccccatcaccagagtcttaagggtcactggcctctccccaggaagtggctcagacccctcagccccagcccagacaaagatgtcttaacctcagggagtgcagacacctaaccccagggcactgccagcccaccccctttgactctggggtgcagcttcacccaccaggccagctcaggaattccctggaaaagggaaatgtgactggttcagaaatagctcctcaaagcctcaaaacctgattggccactggatcctgctgctttgggctgggatggtgactcctgaaacctcttcctaggccacgtccaggtccgtagctcccctggctggctcctaggggaagagcagaaggaaggatgccacttgggaatgaattgtccttttctaggaagcacgggggagtgagacaggctgggtcctgccagctggatcgctgcacatggcctgagcatccagacctgagcgggagtcagggacctgctgctcagtaagaagattctcgccccttccctctctccctgcctcactcctccgtgagcaccaccagggctccaggagcctcatccagcctcagagatctcccttctcatctccccacgcccgtctctttctcacctttcccacctctctccccaaagtgatcctaagaatgtacagttgagctcaggttagatatttcgaccctggggcgtgcagcagggaaggcccaactggttcaggctcaaccttccaacttcctgtggcctgaagaagcacttctgctgcatcgctgttctgggcatggcagggccaggcctctgctggctcaggaggaggggtgagagacctgctcaggcgtcgctggatttattcacttgtgtgtgtacctgtggctgtgtgtctgcttgtatgcttttataggcctgtgtgtatagctgtgtgtgtgttcaagtgcgtgactgtatgtgtgtgtgtgaaccactgtgtactggagcctgcattatgcacgtgtctgggtatctttgtatatatgtgtatatatgtgtgccctggactgtttcaaggtccatggagtacggctggtgtgtcatactgtgcaggcctgtccctgggagtgttcccgtgcctgggagagtggacctgtgctgtgagtgtgtggatgcgtgtgaacgcatgtggtaaggtgtgtactcagggcattctgttggcctaagtgcctcttctttttcttcttgtttctcatgaaaagtttgattaaaattcaggaagcagcaaaaccttcaaaacaagacatgtatgtgtgcttgagtgtgtgaacacgtgtgtgtgtgtgcacatctacatgccatgcctatgggccagagttgtctttattgtccaccatgctctctcacctgctcccagtcctgcctgaacagccctctctctcactcccctctcctccccttcctgtttctcgttgtcacacccatggcctcagccctgctccctgcctcctgcctatgtctcctctatggaaggaggcctccactccttccatctcttccttcagaagtttcgtctaatgggggcagtctccccttcctggcacattgcccctctgccttgccctcctgggccctgggctggcacagcccctggagcctcagaaatctgtttgattggatattctcctcggactgtgtgcaggttgcagaggaagagtagatgagccgggtccggcctctccctgcctgtggcccctcccctgcagacggatgcccattcctgcctggtccagtggggaacaggtcccacgccaggccagcaggcgggctcctttgtacagttcttacaataaaccctccttggtgcctctgg

SEQ ID NO: 7474 - DNA, 152 bp, Homo sapiens
caaccatgagtggcatggccaccaccacggtggtcactggaactcagtgtgactcctcagggttgaggtccagccctggctgaaggactgtgacaggcagcagagacttgggacattgccttttctagcccgaatacaaacacctggactta

SEQ ID NO: 7475 - DNA, 1065 bp, Homo sapiens
gaggcggcaccgggccgggagagcttccctgacgggagtcgcggccccaccgaggcgtcggccgcccgaagagcctcccaagccagcgcggctgtcacgggcagcggctccccggaccccgcgggctcgggcgcaacttcgtggcgtcctgcacggcacttgggggtcccagaaggccccggcctgaggaggccgcccacctgcgggaccctcctcctcgcgggcgggcgccggcgctgcctggcgggggccgcggaggagccgaaagggcgttgggatccaggggaagggtctgtcctgcgcttcgaatccttgtttgaactttttaaaaattcgaaaactttggggaacgaatgcaacagggagtaaggactctcacccgagagctggcttctgccacttgccctgccggtttcttggtactgggaggctgcaggcttccttctgtgcaccgagacttccttgagcaagtggagctgtgggaattgcactcttggaagatcccgcatgggttcgaggtgaggccgcttcagaacctcaaatgaaagactgtctcctcgtgggagagcacctggggccatcagaaatgtcttttcatctttttctggaggagacgaatgatagggcctggtttacattcatttaactctttatgaccttcactcagctgtggatttgggggcactttgtgggagacttggcttttttttttcttctggttggaagaacctaaattagcgaatgtttttcacaaaatgtattgttcaggatgtgagcgtggcaaatttgtccgtgttctgtttaatgacctctttaaaggtactgtgtactctttaatagggatatcatgtaccaggtgtcccagtagagcactgacatgtgtgtgcctgagtgccagccaccgtgtgaactctttggaggttttgcattttaggtaaataactgtctgtactcttggagtaacaagaatttggaaacaggagaagtaaataaataaggttgcctttttcaaattcagggtttttttttttaaataaaggaaaatttgtagactctttataatag

SEQ ID NO: 7476 - DNA, 958 bp, Homo sapiens
gcgagggcggcccctctgttctggtggccccagctgtgactgagggcctggtcaccacaattagagcttgatgcctcccggctttgcagggagaccaggcttcccaaaccaagtgccttgagctgcctgctctgcagcccacagaggacagtgctgaccccaggaagtgggagaagtggcccctcgtgacctacagggaactgggaagatgctggccccaaaagccttacggtcatgatgtctgcaaaggagggcctcagagacagcgcgagtagcacccccagccatctactggataaacttgcttcagactttttaaattcctgcttaatgtcagtctacaggcctttcaggaagggagaggagggaatcgtacattttgcttgcgtgctgggacagctaggctgagatgcaccaagtacagccttcactggagaccggaattgagaggtgggggatgctgaggagggggaggacggagttcagagggtgtcgtcctgcagtgtgagatttctcattgatcacagatgtgcccagagtagcccaggtcactgttaactagtgtttctgcagaggcagcaggagccatgagcatgaggtgtggcattagggactggtcagctatgcatgctggcaggtggggttgtgtctgcaggtctcagaaatgaagaggctgctctgttctggaggcagccgtggcccagtgccagtggccagaacagtggcctttggtgggtgtgtcccgggccatctcggggtggtgctcaggagcgcctggggcaagaggtaaagagttccctggccttcaaggagagcagcgaagacccagacaggggccagccttcaggaccagagggaggccgccgaatgggaccctcctggtcaccaggagaaagccctgggccagcgagtaggcagtcaaactccttcgtccccaaggccggtggaacaagaggct

SEQ ID NO: 7477 - DNA, 301 bp, Homo sapiens
gactttagaagtatatgtaaatgtctgtttttcataattgctctttatattgtgtgttatctgacaagatagttatttaagaaacatgggaattgcagaaatgactgcagtgcagcagtaattatggtgcactttttcgctatttaagttggatatttctctacattcctgaaacaatttttaggttttttttgtactagaaaatgcaggcagtgttttcacaaaagtaaatgtacagtgatttgaaatacaataaatgaaggcaatgcatggccttccaataaaaaatatttgaagactg

SEQ ID NO: 7478 - DNA, 1533 bp, Homo sapiens
tgggtgatgtcagatgttccccatattgtgacatcgagctggatgtgtggggttcttggccgccatctgtactgtagcactggcctctgtgccacagctactgtttcttaaaggactgcttctgccctctgcctgccagtgcccattccactgtgaggtgtcattccctgcatctagtgacaactgtctggattgcctgctgcaaagctttgatttggcaaaggagaccatggaagaatcatggtggatccagaagttatacgtgacccacaccatggcttttaaaagtctacccatgtttgtggcagcaaatgagcacagtaagagcaaagctgaacaacttgcctcctctactcctccaaagcttttcttcaggcagccggtgcacagtggactttttcacttctatactttgtatgcggccttccacacttccagagaatgtcagtgtgcaatgtgtctggagggtggggagaggaattctgtgagccttttcatttcggtgacagaagagatgggcagagcaacttattttccacattaaattgtgcatttgggaagcaagtagccatagtacacacacaacacgctatcagcttgggtaaggacagtgggatttatgtgaacatcaggcaaagccatgagatcaaaccatcccaagcctttcaccaatgaggtacaaccacctgggggctagctaatcttgaatgttttcctgagacaggagcgtatgtgaaaacatcaaacactgcacatgacaggatgggtcctctcatacagatgggatggggttagaaagccagagccagtttttccatctggcgtttcctgtgtcctccaggtttatatgggaatcgaaacagtttgttaatctgattgggagagttccatgggcagatttcccttcctgaaggccaaaacggagaactgctctctttaattatttcaagagtcaagaccaaaagtttgctcagcatcacactacatctcaaaattaatgttgccaacttaattttgtgcatttgtgtcagaatgtttagtttacaaggttgggggctctctttgcttcgagaagtaaacctaataccatttttttattgtttaaagctgcattcaacgtcaaaattaccttgggtaacttttgataacttacatgtgtggacaaagctaatagtggttttttaaacagcaccttgcctgaacatgactttaaagaaattaatatattgaaaacatgtttgaacccttattttaattgcaccattaaaacatttgacttaaattgtttgaccattccagttggtgtactgttctgatttttcgttgtgtaggccgatctgcctgtcagagtccacgtgtcctggtcactggtctttataattgttgtgcaataactaaaggctaaggactagatgcactatcgtgtaaagagattacacatgactgtaccatgttgcacttaatcaaatagtatgtggggatttaaaatcgcttgcattgtttcacaaaataaatatctcaatgtcaaatact

SEQ ID NO: 7479 - DNA, 1312 bp, Homo sapiens
acagcaaggccagatgcacatccctggaaggacatccatgttccgagaagaacagataatccctgtatttcaagacctctgtgcacttatttatgaacctgccctgctcccacagaacacagcaattcctcaggctaagctgccggttcttaaatccatcctgctaagttaatgttgggtagaaagagatacagaggggctgttgaatttcccacataccctccttccaccaagttggaacatccttggaaattggaagagcacaagaggagatccagggcaaggccattgggatattctgaaacttgaatattttgttttgtgcagagataaagaccttttccatgcaccctcatacacagaaaccaattttcttttttatactcaatcatttctagcgcatggcctggttagaggctggttttttctcttttcctttggtccttcaaaggcttgtagttttggctagtccttgttctttggaaatacacagtgctgaccagacagcctccccctgtcccctctatgacctcgccctccacaaatgggaaaaccagactacttgggagcaccgcctgtgaaataccaacctgaagacaccgttcattcaggcaacgcacaaaacagaaaatgaaggtggaacaagcacagatgttcttcaactgtttttgtctacactctttctcttttcctctaccatgctgaaggctgaaagacaggaagatggtgccatcagcaaatattattcttaattgaaaacttgaaatgtgtatgtttcttactaatttttaaaaatgtattccttgccagggcaggcaaggtggctcacgcctgtaatcccagcacttcaggaggctgaggtgggcggatcacctgaggtcaggagtttgagaccagcctgatgaaaccctgtctctactaaaaatacaagaattagccgggcgtggtggcgcatgcctgtagtatcagctactcaagaggctgaggtgagattatcgcttgaacccaggaaacggaggttgtagtgagcggagatcgcgccactgcactccagcctgagtgacagagtgagaatccatctcaaaaaaaacaaaaaacaaaattgcttgctaaagaagtggtctcctgaggtcttaagacattcctgacagtgtcttgagtgggtgggagagaggctgctgtcattgcgctgtggaatttcacagatgagaaccacgcctagccaaaatcacttttcctgtttgcctcagtgacacagctgcagggaccctcgtggatgttgtattaaataaatttgacctttgctctttgc

SEQ ID NO: 7480 - DNA, 36 bp, Homo sapiens
atttttatatttgtataataaatattcttctctcct

SEQ ID NO: 7481 - DNA, 1231 bp, Homo sapiens
caagcttcaaggatttacccaggactctatttatacaaccctgactgacagcctcctttcagcagagtttcaaagaatatgctgaaatacaggaaaacactccccccccccccctttttttttttttttttacattttaggacactgtgaggggaaaggacaattttgaaattccttttcaaggaaaaaaaaggtctttatgctttgccatgaggccacattcagctgctatttaaacttaatatcttgaacctaaagaatgctgacttttcctacatttccagagttaggcagtattctacacttaaagactactactatttttataaaaggtaatctattcaaatttcttcacagatttcaagtctctcaaacatcaagacaacttcagcagtcggtacaagtcacatttcattttgattgaatacatgatcttgaacagctcctgtacttgctctttgtaaaaaaaaataaaattattttgaattattctacctttgtaaacaattggctaaaagaatcatctttaagaaattaagccatttacatgtttgtgtttttctatagcagagcattatattttgcattatatgtttcaacctagtctaagtgggtcttttttacatttttcaagaacggatttcctggaatacagcgatataattttggttgtcaaattcctaatgcaaccatttagtctaaacttagtcatttatttgtgacaataagatgtgttcaggggctccctgtttttaagagactcttttaaaaaaaaaaaaacctaatgtttttatcttgagtcaatatgattaggtattttggatttacttttaatcttaaaatactgcatttttatagcttctcagagcatgtggatgggatgggattttcgttattttgctgggtcagcttatctttaatatatggactattcctataaaccaaagtctctgacaagtgcacctaatttatattgtattttaactacagtgtaagtttccattaacaaaaccatcctaaagcgttaactgctcataattttaatcagctacagttatgaaaaaggaagaattttgctctaaagattattaataagcttagaaaatcctgcttttacctaacagaatgaagtggggttgaggggcggtagtatgaacagtgattctaactctatggcgtaaattactttgaagagttcattttggaagtaagggaatcccgcttcccttgg

SEQ ID NO: 7482 - DNA, 229 bp, Homo sapiens
gaggagaacccagcccacctcaggcctcctgcaaaaatacatagcgtaaacaacggccatcaaaaaagcaggactgaagccagcggcccacacatccacagaggcagcgggcagagcaagcacagggccatcgttcctgcccttgtttcccagtctaattagtcacccagacctgaaaacatatgctcagggggtggagattttacaattaaataacattgtttttggt

SEQ ID NO: 7483 - DNA, 3541 bp, Homo sapiens
tgtacaaaagacttgctgttttaatatctttttgtgtttttgatgttttctgtttgttttgttttttaaaatagcagtttacaaccagaattagaacaatcttaattctacgtttaacttcttgaaaatcttagtactttttctgcggcctttggtttgtggctgaaagctgttgagtgactcatcgccaagatttgctgtaatgcaggctttgatctgtttcaccatggcttctattcaagtccagttaaaacctcccagctgacctcagactaggcatatttcaggctttaaattattctactttccaaactgaattctcctgcagtgccaagtatcaaaggtgtccttaaatacttgtagggatgaggttaggaatattcagttccaaaacaagatatcttctgtccgccttacatatagcagtgacacttgttgcctaactttatggtgacctcctattttgtaagggctgttagaagttctatctaagaaatggcattctgtaggtttatagaaggtttagccttcatattttaattgcttgtatacacaacagctgttttgcttttagatttctgtgtttctgaaggtaatgttcttcctgttttcaagtttacataaggatctttggtctgatgctgatgaagagttcacaggtggtatgggagagcaaaaggcaagctaatgctgtttaccgtgttttggtcaaacgtaacgagtgaaatagaatttgcctttctcatatttaattatcatgtagtttaatgtaccatatgtgaaacattctggccatagcagcaactaaaaactgcaagcaacttggtaacagaactttctaaataaacttaacctgttccagaatgtcatgtatttgacttttaagccctatctcagttggtcagtaaagaccaatccttactgtaggaaatcattgttgtatcatcacaaacatctatcttttgctgtcctgtccagtcccatcaactccacactgtgccatttgtggcatcgttttgtttatttggagtttgctaagggcagtatttttctgtcaagactattcaagaaggcattatttgagattcctgttcattcttggtgtgtctctaacagatacagtatgtatacatttgtataattgttgttgttgaaagtccagcttttttgaggtatattttaaatgttttaaggatgcttctaaggatcagtagtaatttttttagttcgcacctaaagatgattacattgacctcccccgactgcttaccaaattaaaatgtgtccacgaagtagctttgtgatcgcagatacattcatagtgaactcatcagaatggctggtttgcagtactgaaatactatcttctaggctgtatgtagtgctacaattagagaaacagaagtccaaggctggcgacagcttgaaaagtctgacagcttttctacttttcctgaaaattttaagactgtgatatctgtcattttactgtatagctgactgtgtactcaggtattttattggtccttgaaagattggtcgttatggatcacccagcctttccaagtcagtggctgttgttctgtcttgctgtctgatacgagagtggggcttttcagtgaactaaccagggattgttcttgacatacctgacttttctcacatttgaacttccactatcattgtatccatataacttctagcattttcatgccatggtaatccatgagctacacatacgtagcccggcaccgtgatgcaagttcatggtatcgtgcatgttcgtggtatcatggtatcattcatgcgtgtttgaatagttctacatctagtgcttcttgccaaaaagaatacattgtttaaattcacaaaattagcataattgcagtgctaatgaatatcggaatatgtgcacagtaacatttggactattcattggagagtttacccatacatttagcaaattgaatggccaaaacatttgactccagtgagggctcaagttagatccctatagaaagaggacacttcatcttacttaagtcatagttaagatctgtgatacgaaccatagatattgcctgacaaagcagaaatcaccaagtttcccccttttgaattaccaccaagaagtgttgaaacaccaaatagatatcatgttattttgggcatttgcagttttcttccctgctgcatgtaatgtctcagaatcaacattcttttaaaatctagactatattttgaggcaatgaattacttatattcaacttaggcttgttttgacattcagtagaactttaagttcaatctaaaggcttcagtccacatttttttatacgttgtattttaaaaacgtttgaaaggagtcttacacctgtatcatgaaaactgaatccttttgaaataccactatatgaagagagagatgaaatttagtgaacagaattgaaaaggtgctcataatttcactatgcaaacttaccccagtctctaaaaaagtaatttagatttaaagttctttgatgtatttgattttctaaatctttatggttatgatttggaataaaatgtgcctaatcctgtgttacattctgttcttaaatctgaatgccttctcatttaattctgaggaaatatcacacaagtgtcttcattgaccttgaagaaatgtatatacagttgccttataaaacaacataaatttagaccataacttttatagagaaagggttttgtcaaatgttttctgaaaatctgagtaattcaaagcatgcctctgcccctttaatatttttaataacctgcattgttgctgtctgccaaatattaaattgaaatcttcatttcaattttattatctggaaagggcactggattgctctgcaaccaaagaaagcaatatggaatgaaaaaactcattcacttttgtcttattttcttttaaggtgtattggcatgtaatttgcatagagaaggtcctctggttagtctctcaaattgaggctgtttagggaaatccttattcagttggtggcagtggttggtttaaagtagaaggaaataagatcgccttaataccagaaatgattagaagtgctgatttagattcaacaaataccatatgtccttatcattttttgtaagaagaaattggttaagtcctaactttcaatgtgtacccaaatacttgtatttatgcttttgataaaatgtattttcagcattaatacacatccgattatgccttatttatatatgaagaataaagttaccatgttacactgttatgtcctaaaattcaaatcactatttgagaaaccctcaaattggtgctttcattatataatgatacatttagacaaaaccccaaactaagccatttgaaacaagattctctccattgcagtttgtagcaatgttatttctgtgtatgtcatgagaaggctaaatatcagtgttaatttcttgtttgaatccgtgaaatcatgcctgtaaagcccaaacatttgtaacaaactccctaataaatttagagaaagtc

SEQ ID NO: 7484 - DNA, 1409 bp, Homo sapiens
gccctggggtctggctttggtgaactgttggagcccgaagctcttgtgaactgtcttggctgtgagcaactgcgacaaaacattttgaaggaaaattaaaccaatgaagaagacaaagtctaaggaagaatcggccagtgggccttcgggagggcggggggaggttgattttcatgattcatgagctgggtactgactgagataagaaaagcctgaactatttattaaaaacatgaccactcttggctattgaagatgctgcctgtatttgagagactgccatacataatatatgacttcctagggatctgaaatccataaactaagagaaactgtgtatagcttacctgaacaggaatccttactgatatttatagaacagttgatttcccccatccccagtttatggatatgctgctttaaacttggaagggggagacaggaagttttaattgttctgactaaacttaggagttgagctaggagtgcgttcatggtttcttcactaacagaggaattatgctttgcactacgtccctccaagtgaagacagactgttttagacagactttttaaaatggtgccctaccattgacacatgcagaaattggtgcgttttgtttttttttttcctatgctgctctgttttgtcttaaaggtcttgagggttgaccatgttgcgtcatcatcaacattttgggggttgtgttggatgggatgatctgttgcagagggagaggcagggaaccctgctccttcgggccccaggttgatcctgtgactgaggctccccctcatgtagcctccccaggcccagggccctgaggcctgctagaatcactgccgctgtgctttcgtggaaatgacagttccttgttttttttgtttctgtttttgttttacattagtcattggaccacagccattcaggaactaccccctgccccacaaagaaatgaacagttgtagggagacccagcagcacctttcctccacacaccttcattttgatgttcgggtttttgtgttaagttaatctgtacattctgtttgccattgttacttgtactatacatctgtatatagtgtacggcaaaagagtattaatccactatctctagtgcttgactttaaatcagtacagtacctgtacctgcacggtcacccgctccgtgtgtcgccctatattgagggctcaagctttcccttgttttttgaaaggggtttatgtataaatatattttatgcctttttattacaagtcttgtactcaatgacttttgtcatgacattttgttctacttatactgtaaattatgcattataaagagttcatttaaggaaaattacttggtacaataattattgtaattaagagatgtagcctttattaaaattttatatttttc

SEQ ID NO: 7485 - DNA, 430 bp, Homo sapiens
ctgcacgagagaatgcaacggatgcaatttccaggctgtgctgtggacttcttccagcaggtttgaagatttggatattgtaaactgtgagatcagtggcattttttaaatccttaaatgtaattaagatcataaaaacatgcatcattcatacactagtggggtggttttatttgtgtctgcctaagttatttttttaacattcctttatttccgattttcatgtttgtgtgcatttgagtatgtgctgagaactgcttatattgggcaaagtgatttcctatgatatgccttgttaatccttttgcatagaattttaccagttgcgtacgatcaaaatcacgtttgtagtatcatatcaaaaattctaacctgtttacattgttttcatgttcatgttcctatgttattaaaatattattttgtactt

SEQ ID NO: 7486 - DNA, 104 bp, Homo sapiens
ggtggttttcagattccacacaaaatgtcacacttgtttcttgttcatccaaggaacctaattgaaatttaaaaataaagctactgaatttattgccgcaccca

SEQ ID NO: 7487 - DNA, 7814 bp, Homo sapiens
tcactttttttttccctcaagggagaatgttttaatttctgtttgtatcagtagaattaaggtagttggacttcatctatagatgcacagttccctttgttttaatattaaatatgttctcacttaattgctttgctgctagacttgcaactaatttttttaaagtatattccattattttgcatttttgatgtgtcaaaactttgacagcttttatgtagaataaaaaaatttttaaatttgtgtattgttacatatgtttgcatcaagctagcagccaagaggttaattgtgcaactataaaaaaaaaaaaaaaaagaaaagtttgtctaaaatgtatttaaaaagaaaaaaaaattgtaagtagcatttacatttattcaataatattaccacatgctgggtttctgtaccagaaatggccagttgatgtacaaatgtatgttatttttgcttaaattcatttaaattttttttaaaataaaggggcagcatcttctaaataagttttatcagctttttttttttttttggtgacacgatgctgcattctaaaacttttatagttttagactatgtatgatgtgttgttgtaatctccatccaccataggatagagttaaaggcattctttgcaggcatattttgtatgccactgttttttgaaatgtgaaaaaaacgttggcatacttagttattttttggacaagctacacttcaagcttgtttttaatgttaatttgatagtgtgtgtttttttttttaaacaaatcaagaagctgaaaaatttttaggattgttggtgcttagtagacttgataactattttaaaaatgcgtgaatttagtaaaattctttttttctcactatgcatgtgtaaatgtttgtaacctggcttccctcttctccagtggtataaagaattgtgccgctttaaggtttgggtttttttctctccagtaaaaattttggtaccttatttgatgtttacattaaaatgtgacattatacgtggcaattcaaatattttgctagctgtcttgtttgaggaacaccattaaagaagaaatataatgtttgtcaaaaatgtatcaaaattcatcagaatctggggcagaaaactacccttgtttttcatgtctttcaattcttctaaaataccccttattgaacttgtacacaatataaaatttaaatagccatcttaaatattctaccatctaaaaattgctttgaatgaattttggtaaaatccaaaggaagatgtttaccctcttgaaacttatggtcttgtcacacatttaaagcaatatatgtccttattttcctgaccttgtaatactacttttatatttcagaggtatctcgaaactacaatataaacttttaaaaaaaaataagatgaggctggggaacctttcgaatgaacccaatcttcctgatgatccattcaaaaacaggtttttggaagaccactttcgataggcaatcctataatcaaagtacatttttaaaatcaggttgtaaaatggcaaaggtaaagaaaaattactgacatttcttctatgattggagtttagtttatgttggccagctacaaccccttttaatcctcagacagtttgggataaaagagtgcctttggttaatggttagcaagctccaggataagcgctgcgtgcctcttgtattcagctctacctttctgctaagagtgcggttcatttgtgtgtggctttgcgttccaggctgtgggtctctgtgtaaggtggcagacatagacttgtaaactgcagacgtgttaatggttagcataaatcacagctggaaaactgagccggcaagttacagcaccactctttctctgtatgatgtcagatcaccacatttagcaatgtcaaattttactcaacattctttagtaggaagaaaagaagaaaaagttttgccacgtagctatgtgcttttaagtctgtgacaaaactcaagacatatccgaatgaaaattagatctctctgatgtgaggatgttatggaaaataattttcccatcagtgattatccaccccccagcccccatatacaggactacaacgcaagctagataaatgttcaaaagcaatctgataatatgaagacagaattgtcaagtcagggctttcagttgaccccttgtcatgaggttattgcctaattttctgttttctatacttgaatctttaaaaaatatcagtttttaaattatttatatttatatttagttaagggtcatggggtcgtgtatgcaccccatcaccttatataaatatgttgatgatggaagctttggataaggaagctattaagttgtcatgacatccttgttctaagcagttatttctaaaaactaaaaataatagctacttattggcccaccgctctgctgtgagtatatgagtacttctcattccttatttccatagccagtcaaggattctaacgctgcttccatctgatactcttcttagattctgcatcaaatgcttattttgacttacaacaagcttactcttcctcagcattacataatgccatctttccaaccatgctttaaagaacctgctctttacgcatagtatcttataacattttgaacacgtcttgtgtaagaatcattgcaagtttccatcaaaatgaggcgtgtcttctgagtacagctgatgttctttgggtattacttgagtagtagtagcaagtacccataaatcagatttatgaaacataacttatatgctaggttcaacccttatatatgcatatatatgtatagtatatgtatataaaatttttttccagaaaacttgatgatagctctcagataataccaagtattaccagcttccatttcttcagagcagatttttttctaagtgaggttaattgttcacataatgtctttttacatctttgtcctttgtatcactctgaagttttctttttcttgccagaatatttgtttcactttttaatttcagtgctacttgagattttctttttttttaacctgaaagacgatattttggatgatagagtttgtaaagtgagccttcatgctgaaaaaattcttttcatgatctaaaaatggtcttttgttacgatttgaagaacctcattccgtgtaacatggatattttcttgtgtgtctttaaagggggttttggttgtcatttgggcatatgctttgccaaattgttatagcagaactttgtttttgattaatcagtagttaattattgaccatttaaactaacatgaccttaattttcctttcctcacacagatgtgctttctatccaggtcattttttacacgtgaaataacaaactgctttgtgtagattttttttttttttaaatcatcagattttagaataagtttaggtttaatgtaaacatcaactggtcttttcagttcagagaactgcagaataagtaaaataagcagaattcccactgaataagcattacctaattaaacatagcaacatctaagaccaatttatgaaaatactctccttttttatggaggcattggagctgctgagaaagctaatgaatttcccaactttgggataattaatatatagtattgtgttgctctagtgtagttgattttatgtgtttaatatttttcatgtcaagagcaaagctgcagacgtaaaagatgtttctctagcccccttagctagagcgagccacctttgttaagagtcagggtgtgaagaacaatttcaagataaattttagtatttcaaccattgttattaagaaaattagacttactgaaatactcatttaaaaacagacaccttctatagcattgttttatagtggagttatttttaaaaagggaatcccagaaagaatctataaaaatacaaggttaaaactttaaatgtattgaaagatacaaattggtgctttcaaatgtcatgtaagctagccattgtgtttttttttttccctccagctcctcaatggtagtaatttgtcttttatgatttaccgtacattatttcttgctcaccatccccttaacatatgaaaatccttaatttctactgccgcgctatatgtcttcctgaatctcaaggtataaatgtcttaatggatctgatttgtctccactctttgccatctgatccacattcaaaccgcctagaaattagaaagaataggtaatgttctatctacgatttcttgttcaaaatatcacgtagtggtgccaatcacttacaaagacaccatctccatcttgaaagagtaactggcatgttagtcttgaaaatgctcattatgatatgctcctcacatttcccatctgcttgaggatggacatttattagctgagactttaaagctgctaaattcacactttctactttcatacctttttaatcagtaatgtcaagaccattgttgcaaggagtgaatcttactaaacacatcctgttattactttaaactagaatatgagattcaagagatttaaaaacaattttaatgtaacgtttaaaatttttgaaccaattgagaatgtctactttggagtgaagtttaaggaaacagtcaccagagtttctaaaaattttttggagggaggtacctaatagaagaatctagacttagaaatgtgaactgtggttaaataccaaacccagttccgcagtggtcgtctaaagcgtctaaaactggagtgttaagaaaacccagagacattcatatagtttcagttatcagagtattagaccagactttatttgcaatttgttcaacagagagattttattttgatacagatattaagcataaagcatagtaagttttatataattctatgagttcattaaacaatattatgaaattttcattatgttcgtggggagtctttttaactgtttctacctcatatatgaggtctcttctgtattttactttgcatactagcatgtgattgcctgccttagaactatgtagaggaggggaaatcgatattaccttttaagaaatttttgattttatgaagtgttttcattaatacttttttaatgtttgagaagtaaaggggaaagggtggcaaattacataggttgcaacacagagtagaagtcacatagtactatttacagatctgtcctgttttaagatttgagaattgtgaacaggatggagcaatggttctcaaacttcagccagtatcagaattgcctcgaggtcttgttaaaattcagatagctggacccacccccagcatttctgattttggtctggagcctgatgatttgcatttccaacaagtttccaggcgatgctgatgctgccagtccaggaaccacactttgaaaatcactgggtctgattctcgcagtttgaaagtctcagagaccttcagagtctgaacgtcttttcaaccatgtatttatttactcagtgtaaaaaactgatctctggagacatttttataaatctggtgccatgactggaacatttgtggagaaaggtctccatggagcgacaggccctttggattggccaccacccctcctcactctcacccctgctggggtctgcactgctcttccgcagtagggtgaaggagctctttggttttagggtgagtttgcttttgtgtacgctgctgcctggacatcagtctggaagctgtgcatttgtttggtgtgcttagggtcaatcttgatccacatgcatggaagtgagaatcctggaaagaagccatcagaatgccatgagagtgcacctagcatgtatcgaggcactaagtgcaggagtccctgtcctaagatggcagtgacatggagcatcgaaaaccacagataatccttaaataataaaataatagttttgtttttttttcttcggggcagagtctcgctctgttgccctggctggagtacagtggcatgatctcggctcactgcaacctccgcctcccggcttcaagtgattctcctgcctcagcctcccaagtagttgggactacaggcatgcgccaccacgcccagctaatttttgtattttttagtagagacggggtttcaccgtgttggccaggatggtctccatctcttgacctcatgatctgcccgcctcgggctcccaaagtgttgggattacaggcatgagccactgcgcctggcaaatgttttagtttttatggttattattattttttttttttgtgggggagggtggtgagggcaaaggatttgtttttcaaattatgtgtttctcaggttaacaaagttattttagattctctgccatgccagcaggtgttagagagagcctgaagtgttacatatggcagaaaataaatgtctctgattactttgctacctttaaaaaaatctatatgtgtttgcaaaacagcctagggggatctaccacctacacagcatgaattattcataagtcataggtgcacatgtatgagcaagttatttttgagaaagaaactgcctataatataataaacctgtcaggtctttgggtattgtttaatttgtgtgttgttgctgttttatctggactgcatcttggggggtactgggctctgcttctggtttttagtttgcctttgaatttactgagctactagaaagacaaaaaaaagctatttttatggtaatagaatacagaatgacttaggtgtaaaagtacacgtgaagaccatcgtagaatatacagctttggagttttcttaagacacagtccttcctactgaaaaggcttgctcacctttggagaggattgtttatattttcagcctgggttcctttatgcagtcccaacttagaggggagcttcggtttatttacactttgctttgcacgataacttgtatgcgaagacctctttatatctttcagtaggtcagagggctctttgtcctggttgaagtcccaaagtgtcagtgcagctgagaatgtttctcagcctccccctttacagaggaagggtcctggattttcataaatccagaccatgcctgcttcctataaatccatgtatatgacattgtactgtatctgatttctgtgccagtcatctgacctgattctttaaaccccataaaggtactggctatatgtagtagttgtatcctaggtaaatatggtgattaaaatacttctcttctaaattataaagataatgagttttgcattttattaaagggtcctgttattagtgacacaggatttttttttaatgcttcatacatatagttcttatctaaacttgttcagctaacttcatagatcagttacttagcaaattcatactgagtcttattttgggaagtcttcctgagggaagctgtacaaaactgaggtggtcaggttcatctcttcaaagtaccagttatacagccatctaaataggcataacttatggcaaaattataacaattttttttctttgcagtaaatgatacctcatctaagaggctctaatacctaaagagtttatccttaaaagtaaaagtgactttgtaccataaaataaccccaaagccactctctagggtttttattttcttctttctttgtctttatcttttctaacttagttttggaattacgttagctactttggttccatagaacaagttttcaacttggggtctacagttcctacagtgtgctcattgtctcagtgaagttcttttgttttcaaagattcatggtaacaaaatgtattttactgctacaactaaaatgtatttataataaaatgcctttttaataatttgga

SEQ ID NO: 7488 - DNA, 339 bp, Homo sapiens
gggtcttagtgctttagaaaaaagttaaaattggaagtcattaaaaaaagactgttataatggtgtatatgttggggttttttttctaagcttctttgtcttaaattttaaaatagtgaatatgtttgagactccctttgacctttcagttccccaagttcattgttaactttgcatttgcaattggtgcaaaaatacagatttctgtcgtctgaatacacaaaaagttgtgtcataacttacccagatatgtttttctatcatttgaaacctttttagctactgtttgttttcattcaactaacaaacatattccaataataaaagcagtatatacat

SEQ ID NO: 7489 - DNA, 1003 bp, Homo sapiens
gcagcaggtatattgtgatgggccacatctaccataagagacggcagctccctacagctctgctccaggtcctgagaggccgcctccgtccaggggatggactgctaaggagcagcagcagctatgtgaaaaggtttaatcgaaaaagggaagggcagattcaaggtgcaattcatacccaatgcatttgaaacaaccatcctggcatttctggaccgcaagagacttggacgtcggcaacaagacatgaaaggtctaccttcatgtaatgggtcctccttcagaagagagccctcagctactctgtgaatgacttgcatagctgcaactgtaatctcgaaggtgtcactttgttatttacaagatgcttcttaaatgggctgctcctgagctcagtgtcaaggtgattcaactgtagtgccagacaatgatttacacagctcagataattgacctgtccagttaacagatcattgcttcataagtttttaaattattttaatttaatattctttagtagaaatagtccacaaaaacattttcttgaatttaaatatacaacttttatatcatgtatcaaaccagattttatattcaaacgatcacattttaaattctgtacataacagtaagcgcactagtcaaaagacatttatgtttgaaatgtcatttagatcaaacacaagggtcaaagcccaggacaagtattaaagttttatacttaaagagtactaaagggccagtgtgcagatgggtggattaaaaaaataaataaaataaaaaatagtactaaagggcttacttcaggcaaaagtgttcctgacgtaccaaaaagtaagatatagtttattttcatgcctccctgctcctagtaatgtatgttttgtgctgaactggcagctatcccaatgtgaaatgtattttggatgtatctggtgtcatttttctattaagaccaagtataatgtttgtttgtaaagcaataaatcttgacttgaaatca

SEQ ID NO: 7490 - DNA, 899 bp, Homo sapiens
cacactttcttacaacaacagccactgtgttggctggagagggatggggtgggcccaacggggacacaaggaggcagaggagctaacccctctactccactttcaaaactacattttaaagggaatgtgtatgtgaagagcactaccaacatcgcttttgttttgttttgttttgttttaagctttttttttttgcttgtttttaaagccaaaacaaaaaacaaccaagcactcttccatatataaatctggctgtattcagtagcaatacaagagatatgtagaaagactctttggttcacattccgatattaaaatagtgacatgaactggcaaagtggttttaaaagctttcacgtgggataaatgattttctttttttcttttctttcttcctatggtcttgtctgaataaactactctcctgaataaaacaacatccaacccaggtcattgaaatgaaattggccagtcaaaaaaaaaaagacttcaatcatttttaaaattcctaattttcagaaatatgaataaatagtttttgttaaaccctttgtaaaataccaaggttcccgttaacaaattacggcctctgcttgctggaaatgaaatatagtttaagaccaaacattttactaataaacaaattttaagtatatatatatatatataacttgaacttcataaatgtgaagattaccacttctttttatggccagtccttatcagaagtgtttcagtacagaatatacaaaatggcatttaaaaatgtgtttcctgttgcttttagttatacagaaatatgtgactgtagtgtctttaatttaaaccgctatttattattaagttattctaggatgattaaagtaatcaaaagaaataaaatctgagacataagcagc

SEQ ID NO: 7491 - DNA, 492 bp, Homo sapiens
tgagaagcacacctcagaaatcaggacatcccccctatcaggtggttttggagaaaacaaggaaggcggaagaatggagtgcaattgtgtgagcagaaaggggggcaggaatcccgggtgctccactgcttaaaccacaggacctggttaactcctcaccaagcttcccacgaccctggttgccaatgggcgcgggagacattgtatacacatcatgctatttaaaatacgttcaaactatagtgtaaatgctaattaaccatattggtatataaccggaattttatattaaaaggggcctcctttttaaatatatgccgtgtaaaaaatgtacttataggaacatctctttgaattgtatttcttgtatattacatacttagagagagactcttttagccaggcaaagtcttttttggctgtggctggaataaatcatttattacttgggagtcccattttggacactaataataaaatcatggcaatgca

SEQ ID NO: 7492 - DNA, 353 bp, Homo sapiens
gggctggcagagtccagtttcagaaaatacgcctggagccagagcagtcgactcgagtgccgaccctgcgtcctcactcccacctgttactgctgggagtcaagtcagctaggaaggaagcaggacattttctcaaacagcaagtggggcccatggaactgaatctttactccttggtgcaccgcttctgtcgtgcgttgccttgctccgtttttcccaaaaagcactggcttcatcaaggccaccgacgatctcctgagtgcactgggaaatctgggtataggtcaggcttggcagccttgatcccaggagagtactaatggtaacaagtcaaataaaaggacatcaagtgg

SEQ ID NO: 7493 - DNA, 795 bp, Homo sapiens
aaccccaaattctgtgttcctgtttaaacccgtggttttttttaaatacatttatttttatagcagcaatgttctatttttagaaactatattataagtacagaaatggttctccgtgtggtgggaggaggaggttcgggtgctgggtaagtgccatgtcagtgtggacagaggcatttgactaagccaacctcctctcacagcctctgtatctctgcaggccatactggttccattgttctgtataatactgaataaataaatttacttttacatgatcgtataagtttctagataagataaacaaattttgtttaaatttttttaataaaaatcttaaaacactttttttctaacctagactgagaaattcatgtttacttttctaggtgtatgatactttgtaaagttgatactttcctaagaatttaacatgtcatatttttgaaatagatttaagtgtgcttcttattgctaaaaatactaaatgtcatgggtcatagtatctgatatcaatatcgttgataacatatccacaggtaacaccatgatgtaggcataaatggaaaacaaaaaccctactatttcaaatatattgtacttttttatttctgtaagccaactgtgtgccattttcactggacttttaaatctagactttagtgatgtctacattgtaaatgatcttttgtggatatttgtcacttggtttcagaaagttcacaaatgtagcaacagctcacatgactgagtaggtagaaaatgtgaaataaatctcatatatatagttttgaa

SEQ ID NO: 7494 - DNA, 1282 bp, Homo sapiens
agctccaaataccctatatctttctttaatcctgtgactcttttaaagataatattttatagccttaatatgccttatatcagaggtggtacaaaatgcatttgaaactcatgcaataattatcctcagtagtatttcttacagtgagacaacaggcgatgtcagtgagggcgatcatagggcataagcctaagccataccatgcagcctttgtgccagcaaccaaatcccatgtttcctactgtgttaagtttaaaaatgcatttattatagaattgtctacatttctgaggatgtcatggagaatgcttaattttctttctctgaacttcaaaatattaaatattttcttatttatttttttgattaaagtataaattaagacaccctattgacttccgggtaaggggagtcaattgattacccagcagcacagtatttgctttttataattccctttttaaatacttgttcttaattcactggttttccttttctgtcatttttcagagtttagattgtgagtccatgttttgtctgttgtgcctataaaggaaatttgaaatctgtatcattctactataaagacacatgcacacgtatgtttattgcagcactgtttacaatagcaaagacttggaaccaaccaaaatacccacaaatgatagaccggataaagaaaacgtgacacatatacaccatggaatactatgcagccatagaaaaggatgagttcatattcttcacagggacatggatgaagctggaaaccatcatcctcagcaaactaacacaggaacagaaaaccaaacaccgcatgttctcactcataagtgggaattgaacaatgagaatacatggacacagggaggggaacaccacaccctggggcctgttggggggatgggggctaggggagggatagcattaggagaaatacctgatgtagatgatgggttgatgggtgcagcaaagtaccatggcacatgtatacctgtgtaacaaacctgcacattcagcacatgtatcccagaacttaaagtataataaaaataaataaataatttcagtaagaacctgatcaagttgaacatgtatatatatgttatacacaagtttgaaacatatttctgtttttatatgttttcttatgatgcaagggcatactcttatgcaaataattaaaacttcataggtcttaatttcccatatctctatatattattatgacctatccaactggtaaccctatgaacaccttaaaataaacttgtatactctt

SEQ ID NO: 7495 - DNA, 267 bp, Homo sapiens
aacctcaaacctagtaattttttgttgatctcctataaactcatgttttatgtaataattaatagtatgtttaattttaaagatcatttaaaattaacatcaggtatattttgtaaatttagttaacaaatacataaattttaaaattattcttcctctcaaacataggggtgatagcaaacctgtgataaaggcaatacaaaatattagtaaagtcacccaaagagtcaggcactgggtattgtggaaataaaactatataaactt

SEQ ID NO: 7496 - DNA, 820 bp, Homo sapiens
aatgaagaacctcctaacattcaattttaggtcctactacattgttagtttccataattctacaagaatgtttccttttacttcagttaacaaaagaaaacatttaataaacattcaataatgattacagttttcatttttaaaaatttaggatgaaggaaacaaggaaatatagggaaaagtagtagacaaaattaacaaaatcagacatgttattcatccccaacatgggtctattttgtgcttaaaaataatttaaaaatcatacaatattaggttggttatcggttattatcaataaagctaacactgagaacattttacaaataaaaatatgaggtttttagcctgaacttcaaatgtatcagctatttttaaacattatttactcggattctaatttaatgtgacattgactataagaaggtctgataaactgatgaaatggcacagcataacatttaattataatgacattctgattataaaataaatgcatgtgaattttagtacatattgaagttatatggaagaagatagccataatctgtaagaaagtaccgcagttaatattttctttagccaacttatattcaatgtattttttatggatcctttttcaaaggtagtatcagtaggcatagtcattttctgtatcttttcacctcacagttcatgaacatttcccatgtcattatagcacttttgtgttatataattgctgcattaatgttatagctgtattgatgtaataccagagttgttacgttcgggttatatgcaagtttatttcttagaaataaaactttgatggactttt

SEQ ID NO: 7497 - DNA, 886 bp, Homo sapiens
atttgtattgttcggtctgcttactgggacttctttctttttcacttaattttaactttggtttaaaaagttttttattggaatggtaactggagaaccaagaacgcacttgaaatttttctaagctccttaattgaaatgctgtggttgtgtgttttgcttttctttaaataaaacgtatgtataattaagtgaagctgcatgtttgtattgaagtatattgaactatatagtttgtatgtcatctttttcaccattcagaaacagtgcttctgaatttgtgatttaaaggaattgtaatagaatagttttatttttaagttatctttaagtttatgccatcttcttaaataagtacgtaatgttccaatctaaataaaaaactaattcataactaatgcatagaaaagatacataaagcaatgtgaaagtttcttgcttctcctttttaatttctaaaaaagccactttgaatggaagttgtcatccgtaaaagctgaagtgtaagcactaggaaatctcaatatagagatttgaggaaagttatatccactaggtggcagtcattgatcataataagtgaaatgagcccttgttctagtacatgattttaggcttaggtaattaggtatgtgaaattacatttctttaatttaaagtaaaattcagaaggttttagttattataattaaaggaagactgtgtgtagaatcttacgtaatagtctgattctttgactctgtggctagaatgacagttatctatggaggtggtagaattaagccataccttttccttcatcactcttggaacatataaattttttgtcatcttccttgcaaagggcacatttaattttgttcttgaataaaatattttattgggt

SEQ ID NO: 7498 - DNA, 1634 bp, Homo sapiens
ggctgagacgcttcggaccccgggaaaggccatacgaagaaacagcagtggttggcttctatgggacaacaagcttctttcttcacattaaaacttttttccttcctctcttcttcatctcattatcctgattgactctgattataatagaaccatttttactttgctttgagggagatttttgatttaatggggaattttaaggtgtcatggaaatacagattctttgttttggccactgaatggactctctcttcagtgggattatcaaggaacttcagatcagggaaatctccacttcgggaccttctatctgcctcccaactcctcaaggtcacctatagaagcgagctaccaaaagacgtctcctaagcattttggtggcctagtgactcagggcagagtggccagcacacctctcatccgcccctcctgctccatcactgctgagcctctccccatctagaatgttggaactggagcatcataaagatagcaagctaccttccaaggccgagccagcccagagaggagcatgtcttcctttacctccccctaaggagatactacatgggagggggacacagaaaaagggaaggaaattggctagtctggctttttttttttttttttttaaaggcaaagattgacattattgaaggaaaggggatgaggacaactgtgaactcacagtgagccctgtggaaagaagagacagacagagtgtgggtttgttcggaggcctctgctgtcaatggattccaggagcaaggccatttgtcgcgctttccaaatttcttaggcatttattttgataagtttatagccatcatgtttctaagagacttggagacaccagcaaactgctagaactcaaactcttcaattactcaaagaaggagccatttcagttaactcaagtgaatgaaagagttttggaatctgctgtgggtccttccctgttgaccatttggtaacttataatctgacaaaaactcttgagctgcaacaggccttgccagagggctcaggatgggaaaggaagaaggggataggaaaagaagaggtaattttacatttcccctttaaagtaaattttagccaactcatcattctgaaatgtccctataaagaatgagtcgaactagaccagaagccagcctactccttcttacatagcttctccaacaggggtagcaatgacctgtccacttcaaacacagataaggcctgccatcctcattggttaaaggcacacgtgagactttcagtgggctctgctgagaaggaaggcagcccaggagtcaggtatgcaggcattgcattgtcagtgtctgctctcagagtttacacattcaattgcttccaagggtgaatctcctgctctgtgaatgctatcagaccccaaaggccaaccttgggctgggtctatgtacgttcttccgaagcactgatgatcaaaattgaagacacattcagaggtttgattggttgagattaactggtgtggtggttggtgtatgtatgttttatttttatgtctttgtatgtagttctacataatgcaaattgtgctttctgatggacaagacctcataactgtgattaatatcaataaaaaggggatgttgtgg

SEQ ID NO: 7499 - DNA, 2176 bp, Homo sapiens
tgtgccggcagtttcttgccttctgtgaagggacagcgctgtgcagatttgatatttcaacttacaacttgttttaaaagaaaaattgcacacgaaaaatgcctgttggcttttcagtctatatttgaaataacaggttaacaggcagttgtttacttgtggttttgctgcactattgcaatttcaaaggggctttgaagcaattttttataggattcttttgagggagggtatcaaatctatgtcaaggtagtggtttgaggaaaactcattctgtgtgttgaatccatagtatgtcccattcagactgatttccaaatctgtcaactagaaactctactttatgtaaagggccttttaaaaatgcgggatcttcaattttttttattcaataaactagtaaagagtatctagtttccatgaaaaaacataagtttttttccaaaatataggaagcttgattcagtcttgcactgaaattaactgccatactacctctcagtatgtagatgttctattgaaagtactctctcctgtgtaacaggagaacaatcagatccaattcagactgtcagtgaagcacactccctaataatagtctctactctttgttatatatttgtatttccagagagaatgtcttttagattcttgtatacccagataacttctgtgtcactattccaccagagtctgcacctcagactttagtaggaaacatggcacagttctgcaagtaaagtaatatgtaatgactttttgtcctacaaacttggtcagtcagcagcttacatgatctcattgacaattccaccttgtagtgtcaacaattaaggtgttgttgaacgctgataaaatgtaagctacctgaactgatgtctaaagcaacaagtattgtgaaattttgggacaaggattaacttgatgcttaaagtaacccccaacagtaactagggggccacattccatcagtgaaactggaaagattggtgtggctgagaatcagatgagcagaggcacctttagaagaaataatgtggtagtatttatttagggagagacagatgtgttgccatgttacttagtcatactagagagccagccaagtttgaataatgaaggtgcagacgtgttgtcttcttcactgacaagctgtctgaacaaggagccaggaactgtcgggtcaccagctgtggagcgtgccggggggacaacctgccattggatgtagagaaaagtgccttagagttggcctgagccctcctgcccactcgccctccgcgcgacgccactcggagtccacacggcacacacaagcggagctgagaagcacgatggctctagtcagaggactttgctgtcggtccagatttgaagaggacacggaacagcatgagcctttgtgacaaaactagaatttggaaatgaggactgtcttgggaaaagggtagacacaggcacttctctccacagcctgctaacctaatgtgggcagaactgaaagatcactgcagtggaaactgttctggaagaggctgcaacatagcccatgcttagggactggatggtttttgcaagagctttttttttttttaaactaccatctcccaacttttaaagccagatacttgacaaggattttagatcttaatgggttcgatggtagggaatacggaaaggatacactgctaatattgtgtctaacaataaagcaaacaactcgatgctgtaagaagacaagctgtttgagctttcaaacacacatgcacacagcacaattcagaaatacccaggaggattcctgcaggcttaacagttggcatcgtactgaaatgaaacgtgtattaacaagaaaatgtcaaacttttggggaaacaaattttctgttacttcccacccaactaaaagggaagataaaaccatcatcaccagaacaaaacagattttctccaaacaagtacaatgatagtgccgggttggcagttaactctttcaccctactaaattcaagagctcatctccaccctgtcctgtatattttctacatttctattaagaggctacttggtagtgtcagcgggcatcttttacaccttctagtagctcaagctagtaaaaccttgtacttctctattgcgccgccattaaaagcagcattagtgcattttgtcattca

SEQ ID NO: 7500 - DNA, 1805 bp, Homo sapiens
ggcggacagtgggtggccaccgggagctcttggctgcatcttctccctgcccccaccccactatgacctttgaccctacggcgcaggggcagccaggacccttgattcagaccatggaccctggaccttgtagatgagggacactggcctggccctcgggtcttcggaggacgtagggggctggcatgggtgccgactggctgcctgacttcatcatgctccctgcacttaggctgcgtgggacaagggctgtgttgtcacagcaggaataggttttcctctgttggcctccctttcctccaccctggcctcaaatggatgccagatgccaaccccagttctggccacgtacagccagcgggtcagcccagaggcagcctcagctccagggctaaggactctcggctcccattttctctgctggcgtttctgctgtgcccagcagtggctgctggggaagcagctgcagcaggagggagacggtcttgcctctcagcccctccctgccccaccccagctcctgccctggaaatctggagccccttggagctgagctggacggggggccagctgcgagcatgtgcactaaacgcagccctttccaggggaagagaacaggatggagaatggaaggaaagccccccaggcttcgtgaattgcaagaagggacccttccaggatgacactaggaacagggctagggcactcgctcagtccctaggggcttgtttgttctttattattgtgtttaaatccttatagagcaatatcaggatggtgttaataggtctgcctcagaatgagaatcaatccttttagaaaacctttatactaagcctcctcttcaaaattcacagtggcgattagcggactggagtctggtggcgattagcggactggagtctggggacatccgtggcaaagacaccagctcaactttagtgcttcccaactttatttagaatgacatggggtgggtgtctggtgtgtgtgttttccctacgcacctcccatagctattaacaactgaggaaggccagtgcagaatatttttggagaacgattttttttttaaataatatatcattcctatggggggaaagccttttttttctttttggctgagttattccctccctcccctcaataccctcagtactgactacttccctttcttttctcaggcctccccccaccgacttttgaggccagggttggccagatttagcaaaaccaaaacagagtgctgagttaaacgcaaatttcaggtaaacaaaagataattttctagcattaatatgccccacgcaatatttggaacacttatgtgaaaaatgatttgtttttctgaaattcacgtttctctctgagtcctgtaactgtccccgaggggattgagcagaagctcgggtatgagccctgaggttgactgccggttatttttctgtcctgggaacagcctgacccacctccctgtctccatgtagccagtgaggggagggggagacacagaaccaaccacagccaggggcgtccccatggcgactgtggcccggcccctcctctcttgcctgactctcctctcttgcctgactctagacactaacttagttccaggttcggtgccctgttggtgctcctgtttccaatagcttaggtcccatggtgggggaggaacctcaggggctatgcagcccccgccagctgccctcgaatcccgtccaggccaattccagattctaaactgatttttttcatgatattgtcaaaacagtgaggaaacattaaaaaaaaagccctaaagc

SEQ ID NO: 7501 - DNA, 913 bp, Homo sapiens
catcagaagaggaaaaagcagaaagagaaatggcaccaaactcctccttcacccctcctctcactgcctgccagaaaacaaaaacaccaagaaaccaagtcaacttttcacctcctgagtttatttttccagagattccagggccagcaaagccggcgttcagaaggagggagaaaaccgtgagaggatgtgtgtggccagcagctcttcagctttgagatggtggggttcactgctcccttgggaattacacggagctggggaagtggctgtgtcactgctatggacacggagtggggcgggcatctggagagagagagggagcggaggctaaggactggaggccgccaggcaggcgtggccgagggaagaaaaagcttctggatgtccagccagctgcccccttccagcccctccaggacccctggacccactgccgctgctctctgcaaaaagaatgggcatcccggaggccacgcctatcttctctctctgctcctccttccctccatgcaccatcactgtggctggcaggcatcggacagcctcatccagaccccctgccctgtcttggcaacctctactgcccatctcccctgctcaacttctccaccaagcatttggtttatttagaaaaaggaagaaaaacaaaaaacaaaaaactaaagggtgagaatttgcttagcgccttccttgttcctgcatattttttaaaatattgaatccaaggaagagagcccaagggtaggggagaaaccccccacaactgacccctgcctccctgtgctggaattgactttcctgagcatggacaaggaaaggtgaagtctggggagcagaggtgtaaataaggcgactggccttggcactgtgggatgattaggtttaacgcattgtgggcaagataagaatg

SEQ ID NO: 7502 - DNA, 1154 bp, Homo sapiens
cacgagagattcattggaacatgtgccctcgttccactctcatcagcccaccgcagggacaggagctgttcatctttttggctgtgctcgcagcctccagaacacttatgaggggcaccttgtgggcgccgtggtcggatgaggcccctggggctcttccagaggctggcactctctgcagttgtcgctcacatacctgctcaggccaggccaggccagagtggacaatgtcttcccagcaggccagaccagtctcccaggaggctgaggctgctgtatcactcaccaaaccctctcatctgccggcctgaccctgtgctatgctggaaatagcactcgagccagacgccctccctgacttggacaagggcagtgccctggaaggagagggcacagaagcagctgtttacagaacctccgagggctgcaatggggcaatggggtgtgcaggagagtgaccaggagcccggggcagctggtgacccacccctccaggcattcgtgaggtgtcagaagagggggccccttgaacggggcctgcagagatggctaagagtccatcaggcagatgaaatgatttgctttcttcacacttaccaagcttagaaatgacctccttcatgcatgtgaatgactttattcatgtatatgactcaccttcctcatgcatgtgatgatcttattgtatgtgactcactttcatgcacgtgatgaccttatccatgtatgtgactcaccttcatgcatgtgatgaccttattcatgtaggtgattcaccttcttcatgcatgtgatgaccctatccatgtatgtgattcaccttcttcatgcatgtgatgaccttattcacgtatgtgatttgccttcttcatgcatgtgattaccttatacatgtatatgactcaccttcatgtatgtgatgaccttattcacatgtgactcgccttcttcatgcatgtgatgaccttattcacatgtgactcgccttcatgcatgtgacgaccttatccatgtatgtgactcaccttcttcatgcatgtgatgaccttatccatgtatgcgactcaccttcttcatgcatgtgatgactttatctatgaatgtgactcattgtttgtcttcccatccccctaaaacataaactcaatgagagc

SEQ ID NO: 7503 - DNA, 1564 bp, Homo sapiens
agagatggatctgcagagccttcctgccctggccacgtttccagaagagactcgggctgtggaaggaacatctacgagtcctcgggatgcagtgactgagataggggccctgggcctccgccctggccttggagctggtgggcacctccctgttctgcacagctcagggacttagccaggtcctctcctgagccaccatcacctcctggggtgccagcacctgttctcttggtcaggagctgtagagatggagctcaagcactggacgactctgtccccactgctggaataactcgggcacagagcatgggaccaaagtacagaaagaggttgggggagacccccccagccctagacttccatcattccggagaccaactcaacaccgtctttgcctgagaacctgatatatccgtgtttttaaatttttttttttctagcaaagttgggttttaatgacttatgttcataggaaacctctctgatcccacacacaaggagggtgattctgggatgagttcctggttctagggcatgaggggctggatggaccctgtccccagggaggacatggctctgagtccacagggctgaggaggcaatgggaacctccctggcccggcccggtgcttgtcctccccctcccacctcttcctcctcctagctccccaagctccctgcctattcccccacctccgaggggctgcagcttgggagcctcctcagcatgacagcttgggtctcctccccaaaagagcctgtcaggcctcaagaaccacctccaggtggggagggcagtaacgaaaaccatcgcaggaaatggcaccctcccttttcggtgatgttgaaatcatgttactaatgaaaactgtcctagggaagtggttctgtctcctcacaggcttcacccacggcgatgaggcccttgaatgtggtcactttgtgctgtatggttgagggaccctcacaccaaagggaccttcccatgtgagatgtgctcccgcccccacctgcccacaagcaaacacaccacacatgttcggcatgttgccctttgaacacccatgaggacgcctccaacctgctcttggttctaatagggagtactgactgtcagcagtggataaaggagaggggaccctctggtccctagcatggcacccagagcctcccctcttcttgtccttcagccaaagagaaactttctctgactttgaactgaatttaggtctctggccaatgatgggcctgaaaattccataatggccagagaggagagttcgagcccggctaagatcccctgagtcattctgtgagggaccaagacccacagtccaccagccccagggccctacctcctggaatgctttcctggatccagcttcccgaagatccgaccagacccagggaggacggcaccgctccgcgggagggaaagccaaagcatggtgcttcaccagctggactcaggggcgaggggacatgggcgcttgtcaacgtgatgtcattcttttcccaccgtttcttcctgttgatattcaatgaatccgtcaatctctctgga

SEQ ID NO: 7504 - DNA, 481 bp, Homo sapiens
catctgctgtccatcaaggccctgtgctgcaacagagcccctctgggggactggaatgacctcctgaccactccctcccgggctgctctctccacatctcctggaatcctttgtgagcctccttcagccttttccctgtgcccgatcctcatgtgtcacatgtgaacctgacggacatggacgccctgagctgtgagtccacgtctcatgtgcacgccccggccagctaagcctcgggccgtcagcaatacctctgagtgcccggatgccctccctgcacccttccatttctccaggagcctggcactgcttcctccaccgttttcacagggagaagcaggtctaggactcccctgcacctttgccaccataatggcccacactccctgggtccaggagtgtagaatatgcggctgcttccatttgctgagtgtgtcgattcaatgatgctttcaaactttaataaatgacaatgtgtagg

SEQ ID NO: 7505 - DNA, 80 bp, Homo sapiens
agccaggctgacccgaagccctgcagagccccatccccaggagtgccccgtgcagggagtcaacctttcagactggatgc

SEQ ID NO: 7506 - DNA, 783 bp, Homo sapiens
cctgcactccaggctccttcttggaccccaggctgtgagcacactcctgcctcatcgaccgtctgccccctgctcccctcatcaggaccaacccggggactggtgcctctgcctgatcagccagcattgcccctagctctgggttgggcttggggccaagtctcagggggcttctaggagttggggttttctaaacgtcccctcctctcctacatagttgaggagggggctagggatatgctctggggctttcatgggaatgatgaagatgataatgagaaaaatgttatcattattatcatgaagtaccattatcgtaatacaatgaacctttatttattgcctaccacatgttatgggctgaataatggcccccaaagatatctgtgtcctaatcctcagaacctgtgactgttaccttctgtggcagaaagggacagtgcagatgtatgtaagttaaggactttgagatagagaggttattcttgctgattcaggtgggcccaaaatatcaccacaagggtcctcataagaaagaggccagaaggtcaaagaggtagagacaaagtgatgatggaagtggacgtgggtgtgacgtgagcaggggccatgaatgccgcagccttcagatgccagaaagggaaaggaatggattcccctgcctggagcctccaaaagaaaccagccctgcccacgccttgacttgagcccattgaaactgatcttgagctcctggcctccagaattgcaggagaataaatttgtgttgtttttaatgagcca

SEQ ID NO: 7507 - DNA, 1174 bp, Homo sapiens
tggctgggccttgtgggcagccactctgtgtgagcagggtgttgggcccatacacttcaaagaccagagccctgcactgggagagtgctcctggcccaggctgggaatcacctttcgaggcccttcagactctggcggggcttgctgtggcctccctccagctagtggtgtggctgagcagactccagggccagggccagttcccttctcccctcccggccaaacccagacccagactctaggaagctggaatggagggcagggatccatgggagatgtcgggatgaaggtgggagctggaggtgcagggggacctggaacatggatgggagtggacaggcctttctccttagaggccagaggtgctgccctggctgggagtgaagctccaggcactaccagctttcctgattttcccgtttggtccatgtgaagagctaccacgagccccagcctcacagtgtccactcaagggcagcttggtcctcttgtcctgcagaggcaggctggtgtgaccctgggaacttgacccgggaacaacaggtggtccagagtgagtgtggcctggcccctcaacctagtgtccgtcctcctctctcctggagccagtcttgagtttaaaggcattagtgttagatacagctccttgtggctggaaaacacccctctgctgataaagctcagggggcactgaggaagcagaggccccttgggggtgccctcctgaagagagcgtcaggccatcagctctgtccctctggtgctcccacgtctgttcctcaccctccatctctgggagcagctgcacctgactggccacgcgggggcagtggaggcacaggctcagggtggccgggctacctggcaccctatggcttacaaagtagagttggcccagtttccttccacctgaggggagcactctgactcctaacagtcttccttgccctgccatcatctggggtggctggctgtcaagaaaggccgggcatgctttctaaacacagccacaggaggcttgtagggcatcttccaggtggggaaacagtcttagataagtaaggtgacttgcctaaggcctcccagcacccttgatcttggagtctcacagcagactgcatgtgaacaactggaaccgaaaacatgcctcagtataaaacaaacattataaaac

SEQ ID NO: 7508 - DNA, 406 bp, Homo sapiens
gttatcagccactcaggctccgagccagctggattctctgcctgccactgtcagggttaagcggcaggcaggattgggcttttctggcttctgccatgaaatcctggccatgggaccccagtgacagatgatgtcttccatggtcatcagtgacctcagtagcctcaaatcatggtgagggctgggcttttgctgtcctcttctcacgcagagttctgccaggagggtgtgctgtgggggtcagactcctgaggctctcccttccctggggctagccagttactggtcatggctgctgtgggcatggaggctggaacttgtggttgaggcagggccatcccgatccttgctctacctggctagagtttcttctcatcagagcactgggacattaaaccaacctttt

SEQ ID NO: 7509 - DNA, 319 bp, Homo sapiens
gcccagccccagccccggcccccagcagggaagggatgagtgttgggaggggaagggctgggtccgtctgagtgggactttgcacctctgctgatcccggccggccctggcttggaggcttggctgctcttccagcgtctctcctccctcctggggaaggtcgcccttgcgcgcaaggttttagctttcagcaactgaggtaaccttagggacaggtggaggtgtgggccgatctaaccccttacccatctctctactgctggactgtggagggtcaccaggttgggaacatgctggaaataaaacagctgcaaccaag

SEQ ID NO: 7510 - DNA, 987 bp, Homo sapiens
tgaggccgggccggtgcagccaccctgcccctccctggcctggccctggccctcctgctgctgctggtccagggggtgtggctcagtggctggtggtggacctggagagtggaggcaccggccaggcaggggggcaggggagctcaggcctggggtctgggggccacctgccttgcgtgcttttctgggttttgaggggtgtctgggggaagcggtaatggtggctgtgcattctggtcagtctggacctcagcaacttcatctcaggactaaagagctgggtccttccccctgctccatctgagccttggtagggttaaagggaggtgacagggtgaagagggatcctgtgcaggggccacctgggagatagcagggggcacagagagagcagggtcagctccctcggctgggacctccctggcattgggagagccccacacggccttggctattgcttccttcaggctctgcccaccaaggtgccctctccccggggaccttagggtgagcttgcttttggcaggccttcctcgatcctcagccaaaggaacctgtgcaagacactggctcagcagttccccaggccacagtatcagcaagataaaagtgagtgtgttttgtcgggagggaactccaggggaagtgaggggagaaggttccccagggacagagttagggaaagagtataaatagccagccaggggcggtggctcatgcctgtaatcccagcactttgggaggccaaggcgggtggatcgcgagatcaggagctcgagaccaccctggccaacatggtgaaaccccgtctctactaaaaatacaaaaaattagctggatgtggtggcatacacttgtagtcccagctacttggcaggctgaggcagaagaatcacctgaacccgggaggtggaggttgcagtgagccaagattgcaccattgcattccagcctgggtgacagagcgagactccatctcaaaaaaat

SEQ ID NO: 7511 - DNA, 1992 bp, Homo sapiens
ccgggggctcctctccccagaccaaaatgaattgcaagttgccacaacctatggtggggtctcgaggtcctcacagttgccagccctgcagcccccttccccaggagcaaggaccagttggggcgactcctttgaaagtctgtctgcaccttgaagctgagggtgtggcctggaggcaccagaggggcaagagaatgttccggaactccagttctgaggggtcttgaaggccctgagccacccattctgagcagccgtaaaggacatgtagacttgggggaggcctgccccagagggagggcaggggcatcggaactggatgagagtgtgggaggtggatgcgggagggtgcacctgtcccgggcgccgtaggcctctcccacccctcccctgatggtcttgttctcttgtgctcaggccagagacttgctcacttcctgcattgttgtgaagggaagagtttgggctgcctcccctcctcccgtccaccccagaggggaagttcctcagccagactcttcagccaaatgccccaactttcagtctgtaccccatcccaagcatagccagctccccctccttcacctagtggtcaaggcccggagctggaaagccgggttggggtggggtgggggtactgacgcccttcccagctcatccaggggtggagcctggcctgtcttcctccaacctccccctttttcgttgtgcagcctggccccccagggaccccagagggccagggcgctagatgcaaggtgctagaccaatgggctgcagtattatagcccccaggcctggcaggcatgcgctgggctagagaaaggtgtccgccaacctcctcagtctcccaggcctgggacaggcagaacagggtgtggctgggtgtcaggcctggggtgggtaagtcctgcgatgtggacactggagaaagtggatcctctaaactgcagattgtccccaggtcaccagggctgtgtgcgtgtgcatgtttgtgtgcatgtatgcgtgtgtgcatgcatgtgtgtgtaagtatgtggtatgtgtgagcacgggtgtgtgcttgggtgtgtgtgtgttcttgcatacatgtgtacgtgtgtgtgcacgtgaacgcgtgcgtgtttgtgtgtgtgcatgcatgtgtgtgcatgtgtgtgtgtgcatgcatgtgtgtgtgtgtgcatgtgtgcgtgtgtgcacactcacgttgggtggtgtttggtaggtttccctccaggtctggtagggactgggctgttgcgtgattctgcgtggatcgggggtaagagagctcacctgtgtcccagccctctgatggtggtgagaccaggggaaaggccagctcagagggtggtcacagcatgtgtcctctgacgtatgcccccaaagctctccagccagactgaggtcacagatgtgggagagtccctgatgagcccgctgacacgtgtgcgcccctttgcaccccatgcagaggtgctctcctcctttctcagccatggccccccatccctgacctcagcttgggaagcagctcctgctgggagcatggcctcagcccccagcatctcctggggcccccatggctggggcaggggaaagagagccctcaaaggcctctttctggtctgtctgggggttcccattcccacacatgtgcccagagtagggggcatggaggagatggtccctgtcctactgcaggacactgagggcttggctgcctgccaccgccatctggagcccaccacagctcttctccctgttctctgggcctgagcctggggccacccccaagtgccgacttgtttctcccagagccccaggtgctgccccttctctcctgttcctcgtccgtttactgccgcagcccctcctggttcttctggtgctggggtggagcaggctctgtgctcccaccactgtaccccgaatccctcctgcaggctcattgccacttttgtagagaatgttctctatcagtatcgt

SEQ ID NO: 7512 - DNA, 825 bp, Homo sapiens
ggatgaagccgacgaggggctcagtctaggggaaggcagggccttggtccctgaggcttcccccatccaccattctgagctttaaattaccacgatcagggcctggaacaggcagagtggccctgagtgtcatgccctagagacccctgtggccaggacaatgtgaactggctcagatccccctcaacccctaggctggactcacaggagccccatctctggggctatgcccccaccagagaccactgcccccaacactcggactccctctttaagacctggctcagtgctggcccctcagtgcccacccactcctgtgctacccagccccagaggcagaagccaatgggtcactgtgccctaaggggtttgaccagggaaccacgggctgtcccttgaggtgcctggacagggtaagggggtgcttccagcctcctaacccaaagccagctgttccaggctccaggggaaaaaggtgtggccaggctgctcctcgaggaggctgggagctggccgactgcaaaagccagactggggcacctcccgtatccttggggcatggtgtggggtggtgagggtctcctgctatattctcctggatccatggaaatagcctggctccctcttacccagtaatgaggggcagggaagggaactgggaggcagccgtttagtcctccctgccctgcccactgcctggatggggcgatgccacccctcatccttcacccagctctggcctctgggtcccaccacccagccccccgtgtcagaacaatctttgctctgtacaatcggcctctttacaataaaacctcctgctcc

SEQ ID NO: 7513 - DNA, 72 bp, Homo sapiens
aattgagtccaggaggaagctctggcccttgtattacacattctggacattaaaaataataattatacagtt

SEQ ID NO: 7514 - DNA, 1665 bp, Homo sapiens
ccccagaggacgctgtgatctccaccttgaagccaggcaggctgccctgagacgaggagggctctggtcccgtcactctccatgccctgacaacagtgcttgtagctttgatgtggaacaggggccctgggcatttctgctgagaaccaaactgctgctgtgataacctctcctttggcccctaaaaggacctgtttttatctacctgtgtgacttgaagtggccatatgctgtcaggggtgcggagtggcccctgacttcactgctgtcccgggaacatggacccccaggcttggcgtaggtgtttgcttccttctactggcattcactgaagccactggggtgggggtctctaaagagagactgtcatgggtcattccccacaagagccacatcctcacacctgacagatgcacggcccaaggggctgcagccctgttgcaattccatgcttcccccgccaaccagctcctgctgccatccccagggaggtggcccaggaaggtgcctggcccagaataaggaactggcatactgcaaagtccccagccctgcctctggtggacagcatcgtcctggaatggccacggagtgatgagttgtgtgcttgtccctggcagtggcaggctgtgtcctatggacatcttggcaggacatggaatttggcctcatgacaggcccaactagggataggaaggaaaatgaagagagccagtatttccccttctccagaagcaggtactcagctttctgggaaaagcgtgcctccagccgtggggacaggccatcctactgactacctcttgcttggcatgaaataaactgctatcctccccttggaatctaccgccactctacatcctactgctttggcctccctctcctctcaccagatggcatgtggtgtggcacctgtggctggacacaggaggcctcaggatcacaaatgttacactagacatatgtcctaatgtgctgcccagaaacctcaactgttccccagctactgaggggcactgtcagcgagatgttgggtctggaggtgatgagatcgggccacacttgagctgagtcaccagaccctattgcttcaacagtgcttggcccccgccagcttgtcccagccactctagctgctggatgtgatcctgggacatgtactccaagcctccgtcacaaaaaaaaaatcaccagctgccatagacacgggggaagcttgcggagcccaggtgaacaagctcagcaatcggacatctctggggaaaggaaggtggcacagaccatgttccctggttcctccctgccccttgccaggcttccttattccttactatgggaagaggtcatatcccttccctgcccctcgctgtctttagcaagcaggtttcactgcttcattagaagaggacaagtcaaaagtgaatcatttttcactacttaaggaataaatccaagagctttccagagactggctgctgcagccctgggaatgtctgtggaattactatgtggaaatggaactttgtgttatgctctagacattacagttatttgagtgttactcgttactgttgaggtcagtgcttcgtggcaaatggctgtactggatatcccagctctgctgcccttgttttgctgcatgttaaataaaaccattttcactgt

SEQ ID NO: 7515 - DNA, 259 bp, Homo sapiens
gcggggatgccgcgggcagcagctggagctaaaggaagggcaggcccacaggggccaccgcagagccgagtcggggcggcatcgtgctggtgcctctggccccgtggagtggagcaggcagataccgttaagcgctgtgctaccgggccccaggcccagccacccggtacctcccgagaggctgtccctggaccctggctggcatggaaatacagtgggaaaaccagtcgggacctttaataaaagaccttggctttct

SEQ ID NO: 7516 - DNA, 851 bp, Homo sapiens
ctctgactgtcctgaacgctgtcgttctgtctgtttcctccatgcttgtgaactgcacaacttgagcctgactgtacatctcttggatttgtttcattaaaaagaagcactttatgtactgctgtcttttttttttttcttttgaagaacaggtttctctctgtccttgactcttgggtctgtgggccatggcatgagtgttttctagtagtagattggagggaaagctttgtgacacttagtactgtgtttttaagaagaaataatttggttccagatgtgttagaggatcttttgtactgaggtttttaacactttacttgggtttaccaagcctcaactggacagaccataaacagtccacaggcaccgttcctgccaggccccaacccacagggagtctctccgcagagccttcttggtgttgccctaacttgccagtggcctttgctcagagcctcctcctgtgacatgtgaacaatgaagaggcctgcgcctcctgccttgccgcctgcaaagcaaagaaactgccttttattttttaaccttaaaaagtagccagatagtaacaagactggctggctgatgagcaaagcctttgctctcacgcagaggaaggcttggatgtacaatgaaactgcctggaactaaaagcagtgaagcaagggaggcaatcacactgaagcgggtcttcctccaggaacggggtcccacaggcgtgttgttttaaataacctgatgctgtgtgcatgatgctggtgcttgaccatgaaaggaaagtctcatccttaaaatgtgttgtacttcacaatcctggactgttgcttcaagtaaacaatatccacattttg

SEQ ID NO: 7517 - DNA, 608 bp, Homo sapiens
aaagggaacctgcttctttactccagaactctgttctttaaagaccaagattacattctcaattagaaaactgcaatttggttccaccacatcctgactactaccgtatagttttctctattctttcatttcccccttccccattcctttattgtacataaagtaactggtatatgtgcacaagcatattgcattttttttttttttaactaaacagccaatggtatgttttgattgacatcaagtggagacgggatggggaaaaatactgattctgtgaaaataccccctttctccattagtggcatgctcattcagctcttatctttatattccagtaagttattttgctctcactgttttaacaaaaaaaaaaaacaacaacataaaaatccttgcataccttgttcaattggagaattttaatgtttttcatttatcattgtaaaaccaaggacaattttataacttttttgtacgtagctgttacatgtagggcaatctgtctttaagtagggataaattactctaaaacaaaaaagaatcctagatagttttcccttcaagtcaagcgtcttgttgtttaaataaacttcttgtttaaaatg

SEQ ID NO: 7518 - DNA, 508 bp, Homo sapiens
gcctccagatcagggcttcctcaccagcactggcctttcttctacccacctctaaagctggcagtggagtctctgcctcacccaaagacttttcccttccagactttgagtgtcttcccttctagactttcccatctcctggtgagatgtttcccacttatgccgtggtcctgccctgagcccctttccccaccacaacccaccacggccaggcagagaagggcaactcccaagagccactgcactgtgtaaccattagtgcaactactaccttggtgcctcagtttacccatctgtaaaatgggtaagcatagccactggtgggatattttgggatgtcaaggggtggaggcagagcacaagtcacaccagaaactgctttttatacattttgtataaggacaactctggaaacaagcctatttcctccagccagtttcactgaatgctgcaccacatgctacaccagttcagcgtgagaattttctaataaatcttttctgatact

SEQ ID NO: 7519 - DNA, 458 bp, Homo sapiens
gtgcaggaaggaccccaggtcttccctggaggcagcctcctgaaggaaggaagattcagtctccactgagaggtgccgtctggcccttccctgcaggccagctgccccaagcggggtagcagccttgaacccacccagctgggacaccaccagaaggtccagggctctccccatgagagaatcagagggaatgcaggacgtggtctatggtgagccaacgacacagtgagaaggagcaggaagttgctgtttctcctctgaccagcccacactccaaaggaaacagacgccatcctacacctatcagccctgcctgccaggagaacagaacacactcctggtctggatggggctgctgcttgagtgcagagggctgcggtaggccctttgcaggagtcaggtccctacacttggcctgtttttccaacctatttaatagacattaaagctaaacacac

SEQ ID NO: 7520 - DNA, 2292 bp, Homo sapiens
gagtcaagaagcaattatttaaagaaagtgaaaaatgtaaaacacatacaaaagaattaaacccacaagctgcctctgacagcagcctgtgagggagtgcagaacacctggccgggtcaccctgtgaccctctcactttggttggaactttagggggtgggagggggcgttggatttaaaaatgccaaaacttacctataaattaagaagagtttttattacaaattttcactgctgctcctctttcccctcctttgtcttttttttcatccttttttctcttctgtccatcagtgcatgacgtttaaggccacgtatagtcctagctgacgccaataataaaaaacaagaaaccaagtgggctggtattctctctatgcaaaatgtctgttttagttggaatgactgaaagaagaacagctgttcctgtgttcttcgtatatacacacaaaaaggagcgggcagggccgctcgatgcctttgctgtttagcttcctccagaggaggggacttgtaggaatctgccttccagcccagacccccagtgtattttgtccaagttcacagtagagtagggtagaaggaaagcatgtctctgcttccatggcttcctgagaaagcccacctgggctgggcgcggtggctcacgcctgtaatcccagcactttgggaggccaaggtgggcggatcacaaggtcaggagttcgagaccaacctagccaacatggtgaaaccccgtctctactaaaaataagaaattagccgggtgtggcacgcacctgtagtcccagctacttgggagcctgaggcaggagaatcgcttgaacctgggaagtggaggttgagtgagccgggaccgtgccattgtactccagcctgggtgacagagcgagattccgtctcaaaaaaaaaaaaaaaaagcccacctgaaagcctgtctctttccactttgttggcccttccagtgggattatcgagcatgttgttttttcatagtgcctttttccttatttcaagggttgcttctgagtggtgttttttttttttttttaatttgttttgttttaaaataagttaaaggcagtccagagcttttcagccaatttgtctcctactctgtgtaaatatttttccctccgggcaggggagccagggtagagcaaaggagacaaagcaggagtggaaggtgaggcgttctcctgcttgtactaagccaggaggctttaagctccagctttaagggttgtgagccccttgggggttcagggaactgcttgcccagggtgcagtgtgagtgtgatgggccaccggggcaagagggaaggtgaccgcccagctctcccacatcccactggatctggcttacaggggggtcggaagcctgtcctcaccgtctcgggggttgtggcccccgccccctccctatatgcacccctggaaccagcaagtcccagacaaggagagcggaggaggaagtcatgggaacgcagcctccagttgtagcaggtttcactattcctatgctggggtacacagtgagagtactcacttttcacttgtcttgctcttagattgggccatggctttcatcctgtgtcccctgacctgtccaggtgagtgtgagggcagcactgggaagctggagtgctgcttgtgcctcccttcccagtgggctgtgttgactgctgctccccacccctaccgatggtcccaggaagcagggagagttggggaaggcaagattggaaagacaggaagaccaaggcctcggcagaactctctgtcttctctccacttctggtcccctgtggtgatgtgcctgtaatctttttctccacccaaaccccttcccacgacaaaaacaagactgcctccctctcttccgggagctggtgacagccttgggcctttcagtcccaaagcggccgatgggagtctccctccgactccagatatgaacagggcccaggcctggagcgtttgctgtgccaggaggcggcagctcttctgggcagagcctgtccccgccttccctcactcttcctcatcctgcttctcttttcctcgcagatgataaaaggaatctggcattctacacctggaccatttgattgttttattttggaattggtgtatatcatgaagccttgctgaactaagttttgtgtgtatatatttaaaaaaaaaatcagtgtttaaataaagacctatgtacttaatcctttaactctgcggatagcatttggtaggtagtgattaactgtgaataataaatacacaatgaattcttca

SEQ ID NO: 7521 - DNA, 818 bp, Homo sapiens
gccctccagcagtgcccactgtgacctgccgaagtccactgcctttgccccagcacagaagaggcccctgccaccctagggacgggccaagggctggtcaggctgaagtgcccctcctagcagggccccttcccactcagcccgcggctgtgggcaccacagctcttgtggggcagcccaccttagaacctgactagcgagggacctccgctgcatctcagcaaagcccctcccagggtttgatcgattgagcaggacagccctgctcctggacagggaccctggtaagagctctctcctcagggaggaagtaggggtggggctttgggggtgctttctctgtaccccccagcccatgtcccaagttgtgccaagggaatgcctcttgccacccaccatcctgcccaggccctgagaggctggaggaggcgtgtgtctggccgggccccctctccgtaggtgtacagaggacatgtaaatacacagcggtggtgcccaggcagctcctgcccccgccttccctcactgaggcagggctagcaggggtgggaggcagtggggttaacagatcccacaagtcctaacttttcaattgtaaatgttattttctaagcagagagaaatgcatatattttaaatggaatttattctatcaactgcctgagaggacacaatgggggaggggcttcggaccacagcaggagccccgactgcccacctgagggcagggagagcctgaccccattggcccaggccctggctctgtaaccattaacctcttcccccaactaacaccaatgaaaacaccattccacgtg

SEQ ID NO: 7522 - DNA, 2317 bp, Homo sapiens
gtgacttattttatatgtggagcaaagtgtcagtgagatcatttacttccccggcacgccctagttaagcagctgacataagacagcccgtaggctaccaagggacacctgcctgcaaaggctgttgtgtcgggcagtgtggaagtcaggaccttgctcttctctattggaggccccgggatctctcgcagtgtggggatttgctcagtattctgagtggtgtccttccctccactccaccctcttctgggatggctggccccacaagccactcagttccaagggatgtgaccagctctgagccatcggctttgtggtcatcatgtgccaccgagctgggacttctggcatcacttgagtagtcctcacccttatccaggacccacacagaagcctgtggccccacttacctcggggagtcatgtgctttgaactcacgcatctgttttacctgcatctgcaggcgatggggcaggggccacggaaagagtctgagggctgcttggtgtagtcaggttgtgtccaggcatgcggagctgtgagtgcctgcaggagagacacccaggaggagtttttacattttggtctaaaaagctcttggattcatctcatctcatggaatgatcctgtcggatgacgctgacgtgattgcttcagacttagaggtgaataaattgaggtccagagaggtcacagtcacgaagctcatggtagactgaggccactaaacacccgtctcctgattttcagtggcgtcctcatttgcatacacctgggccatcttggtttttgcaagaaaaaagcgaggaaatcagagaaactctttgggctgtgtgtttttatttccacctcctcctgttgaccagtgagtcggtggcttctggactgaagctattttcttctccaaactgctgtctctaatttggcctctgtggcaagaccacgcccagcaaaagtggtcggctgcagtgccaggaccacccttgcctgcagcctttgcgaccagagcccttttcaagcacaattaatatgggagttgctaaatttggccttcttaggcttcttgagcagagctcttatttctggtgaggaatgaaagggccaagtgttcctgttcattgtgagtcctgtttgctgaaaaaagctctggggctgtctgaggctctggaatgctctctggagggttaactctgcctgtccccagggtctgctccgcctgccaggcaagggaacaggtcctcccaagggcctctgccttcatttctcctgtcaccttccggggagctgggacttcttagtgcatcagtggcctggttgccaggggctggggtccaggcatctgtggactcaaggagtccaggtgacggtgttgcgctgcctcttgagcagcctcgtgcctgtctcctttgctacatgtgatgattctgaaatccaggcagcaggctggaataaacgctgctggtatgtctgtattggctactgttctttgaataagtgaatgtttctttattgcataactggcgtgtagcacaaagaaaaagccccttctccaccagatatttgcttcctaagaatagttctcattggaggctgaggtcgaagcagcctcccaccagcgatcccttggggcgggcacctggcagtgagggacagagctagtggggtgggctcagcagaagtgggtgcatttctgcaaaggaagctgtaggtttcttgtcagtttgttgtggggtctgaggcacatgggagtgggaccagcagaaaagatactcaggtcagttaactaatgaggcggggctgtggcagccagcggttttcctctcttctctatctgtagctactttctctgggctgcagccttgaaaaagcagtgtttgattattcataacaatgagtgtcttttagtgtcacagggaacagttattaggtttgaagcaacctccagcttgaggcctcggcatcttgagatggaagagcagccttgtgtttagacctggattgaattgggccctgttgtttcctgggatcttggggctgggggtgcccaacagcctggcatcttcttgtttctctgtgtgtttactcattcattcatttattcagctgataaatattgactgatgccagctctgtgccaggcacattggacatgggggatacactagtgggcagaaatagccccgtcccagagccggccatggtggctcatacctgttataccagcactttgggaggctgaagtgggaggatcgcttgagcctgggagttcaagaccagcctgggcaacatggcaagaccctgtctctactaaaaatac

SEQ ID NO: 7523 - DNA, 552 bp, Homo sapiens
ccaactgctggctgggcagggcccgcgtcctcccccagattctagcatgggtcatcctgggcctcacctgctgatgccagggccatcgtcttttctcagtccttctcctttccaaccatacttggctttggggatgaccccagacaccccctgaatccaggtcagaggtcagcccacctttctttctgcttgcaaagcctatagacccttctcagagcggtcctcatggctgggttttctgggacacatgtcgaggacagaaggtggagggtggtggagctgctgctggaagaaggggaaggaagagtggcccctccccgagttctaagtcaggatgaggcccacctgtccaaggtatcggaacctacccaggggaccctcagatcctccacccactcccccatccattacgatgccagcttccagccttgcccaggtcagagctgtggcagaggagaggcagccaggccctgttcctgctcagctcctgctcaggaaggccaggcctgacagatgtttgggagaggaataaagttgtgttgttgtggggca

SEQ ID NO: 7524 - DNA, 277 bp, Homo sapiens
gtgcctgcaggagagacacccaggaggagtttttacattttggtctaaaaagctcttggattcatctcatctcatggaatgatcctgtcggatgacgctgacgtgattgcttcagacttagaggtgaataaattgaggtccagagaggtcacagtcacgaagctcatggtagactgaggccactaaacacccgtctcctgattttcagtggcgtcctcatttgcatacacctgggccatcttggtttttgcaagaaaaaagcgaggaaatcagagaa

SEQ ID NO: 7525 - DNA, 119 bp, Homo sapiens
ggcacccccaggacagcacacggtgagggtgcggggcctgcaggccagtcccacggctctgtgcccggtgccatcttccatatccgggtgctcaataaacttgtgcctccaatgtggta

SEQ ID NO: 7526 - DNA, 2159 bp, Homo sapiens
gtgaaggcagtttttatggcgttttgtagtaaattctgtaaaatactttggtttaatttgtgactttttttgtaagaaattgtttataatatgttgcatttgtacttaagtcattccatctttcactcaggatgaatgcgaaaagtgactgttcacagacctcagtgatgtgagcactgttgctcaggagtgacaagttgctaatatgcagaagggatgggtgatacttcttgcttctcatgatgcatgtttctgtatgttaatgacttgttgggtagctattaaggtactagagttgataaatgtgtacagggtccttttgcaataaaactggttatgacttgatccaagtgtttaacaattggggctgttaagtctgaccatacatcactgtgatagaatgtgggctttttcaagggtgaagatacaagtcttaaccacagtgtaacttacagtttcctttaaaaaaaaaaaaagtaaacctggcagctatagaatacactatgtgcatttataatagctattttatatattgtagtatcaacatttttaaattaaatgttttacattcacaagtggtggggagtcttgtcattaaggtgtgtgtaatttagagtccagttggttttcttctgactgcacttgttctcatagtagtaaaatgctatgcgcatttataccttgcataagtcctcattctaccacatgttaaccctctagctgataatgcaaacactaactgggggattttatttataagggctctagaaaaaacgagttattcacaccagcatcatcttaactaacattctgaactagttagtgcagcttttcattgtgttgtgtggttggtctcataactaggttgagtttttctcctctgctgaggaaacagtaccgaagttctttttcttgtggcatttgtattataaaaacttggtgtgggggaggagcacaaaactccagcccactgaacctctgccaattaagatggtgttgggttaggttacatctggttactgtcctgggaaaatcatttttatagagatggccttccaagtggttttaaaatttactgaagtttttaggtcaattatgtatgttgactaaatttacaaataaacttgtttatccaactaagtgtccaaaacctaaattgaatgtactaagttttcacatgtcccattatctaggtccttgtatactaatgttttgaacttagatcatttcaggtgttgtttggtggataaaggaaccttttatttataaagatactgtagaaagcatgtgaacagctctctgcttgattaagatgccataatagtgctgtatttgcagtgtgggctaagacaaagtatattaataagcttttcagcccccccactcccgttccgtagtgtagaagcccacaggtgtagaactcagtcttaaacttcagtatgaaaccagtttccttgtgcgatgatggccactaaagcatagtacgtggatgtcagtgagacagcatgagagccagcagtcatcaaagcgttccacgtttgaagttagcaactgcttaaagttataccccattaaaattgctttctcaaaagtttgggttagtttcaaatgtgatattttggagggaaggtaaagtaggtatctttcaggtcgtgataatgagctcctatgaaaggatgcaatataatgacccgcttttctagaaagttcataatcagctctggaacaagcacacttgattcctcactgtgcttcagaatgagattaagatcagatgttggaacgtgctatgctgtagcgtgtctggaaacaaagtacacaaacctggctacggtgatgagttagcttctgcttactacctgtgacaacccaagtgggtgacactagtgaaccttctccagtctgcaggctggcatagaaggctcttagattatattgggcagcttgcaatctgccgaagcagtgacttgcatttccacacttggcttgagcactcaacccagaaggcgaagatagcttttggttgtaggcggcttcctgtatgggatatccctcggtaagggtaaaggagcagaggcaaaggagaaaagcagaagttgcagctgatgcaggtatcctatgcccttgatggatgagactaaaataaaatttttgaagtt

SEQ ID NO: 7527 - DNA, 739 bp, Homo sapiens
ccgtagaggtttgcggtggggctgggtccccggtggggacttgcaagggctttcctgtagggtctggggcttccccgccacatcgcggccctccagcctggcctaacacttggggagccccagcatgcggagtgcccagagtgcagacctcccctgcctcccatggtgatgggggctcagcagcgacatctctactcccgcctccctgcctccagccctggctgcaatgtctctaccacatcccagcaccagggggagcaaaccctgcccctgcccgcctctcagaaaagctgctgtggtgggcaggggattgggccatctgtctcctggccctggcccatctgcctcctggccttcctgttccagccactggggtgggggccaggttcactgggaccagggctacaggcacagagtctcctggaaaagggagaggggaccctgccaaagatgaggctccagctgccctggggggagggtggtggccattactagagggggcctgggtcctctccccaggggctgccagcatccaggccaggaagcctggagccaagaaccttctggctctgagggagcaagagctggcaggcggcagggctggcacagacagacggaagcagaaaggacagtttggctgctgtgtctgctgcgcacgccccctccccggacagcacctgccacctagaaactttcttagcaaaaaaattaataaaaacaaatccattgtcctcttaaa

SEQ ID NO: 7528 - DNA, 1034 bp, Homo sapiens
gccctcctgcctccctgcctcccaccctcatctctctaccctacccctcccatcggggctgtgctggggcttggggaggggagggggcgccttgttctccctccaggtctgatcataaacaattaccaggaactagcattgtgggacattagggcccccggcctcgggagaggtgccgcccagcttcccatgccagcccggagcccacagtgctgcccagcgtacctccctcaccgtctggggctcttctgggagcacggagcatcccctgttcctgtttcactctcagcttctcccctcgaagggactctctggccacctcctccaccgcagtccagctccctcagtctggcacccactgctacactcagcctcatgagccacttcagaccagccaggtgtcttcccgggccctgccagaccctgctcacattccctctgctggtctgtgctggtctcagaaggccaccgcgcccgcattccactcagccagggtccagctgcagcccccgccacccttccttcccttccctgtcctgggtcatgttgttgccaccctgtgtgacttttgaagctgtaaaatgagcttccagggcttgggtggcgtcggggcagggccgccgaggctgggaggaagcccttctgccttttgctggtgtttctggaatttgctttccctcacctctcacttccttctagaaggagcttcctgactggaaccagagaatgcatgtctgtccacttggtggctgctgggtggggccgggaacaagggcccctgaccctgtgtgctggccgggacctgccaccagccccccagcctgcttcttccccttaagctttgtgcccctggatgcgctaacattcactcttgtttgtccctggactggccatgaagtgaggagatggttatttaaagagaattccctatttatttgacaaaaaatccagttaatatattaatgtgaaataaaccctgtttgcacctcgatttgtttgctgaaaatgtgaaatagtaaaaatgaaataactgg

SEQ ID NO: 7529 - DNA, 317 bp, Homo sapiens
tgccgggcacgggcgctcctgctgccgtctctgctccaggaagctgcctcctctgggccctctccttcgtctgggaaggcaccagcatgagtcccacacacccagccttctcatttctagaggcttccacctttttatacactcagccttccctctcccaggcaggaggacccccagaccctgttcccctgcagacctcacttctgggagacagagctacagctgggacagctccaagctaccctaacccctcctttcccaggtttctagaatagtgtctggcatgtagtagatgctcaataaacacttgttgaatg

SEQ ID NO: 7530 - DNA, 1817 bp, Homo sapiens
agaaggcatgggatggagccctggcatagctgccaccatgcctatgtgcccaagagctgcccagcttcagcttggggactggaggaccagctgttggcctctctgttaactcagaaagagatgggaggttgggggaggtgagcataaacgcagagttcactgttgcagcctttttgaaggggacacagtctaggagggggataaatgggatgcccttgccccagagagaacccagttctaggtactgtctgggcctgggaggcgagagcagtgcccaggggacttctgggcttacaggacagcgtgtgtgacaaaattcagatctacctgaacttgcctctggagatgataagggccaaaggagcagtcagggaggggcggtgagccagagtagtcccagggggagacagattcctccctcctccccgcctgcagctctctttaattttttgtaacatttggagagacgtccgtcctgtcttgtagtctttttattttgtgcatccttataattgtattctacaaacaattttgttttctgcatttaaacatttttgtgtttttaggagatggtcttgctctgtcactcaggctggagtacagtggcacaatcatggctcactgcagcctcgagctcctgagctcaaaggatcctcccacctcagcctccagagtagctcagattacagtgttttctgaagtttcctgacttaacataagcatttttcacatgattgaaaattttcactgattgctgtagtcattctaatgactatcaagtttatttatccattattggacatttaaatttctttctttttagctatacaaacattgatgtgttttttttgagacaggatctccatctgtcacccaggctggtgtgcaggggtgcggtcatgggctcatgggattctcctacctcagcctcctgagtagctgggattacaggtgtatgccaccacgcctggcttatgatgaatatttctgagtgggatgtttggccacatttatggtcatgtatgtaggctgttacctcaagtgagtcactcagggaacaatgagcacttgaagatttttttatacaaaaggccacagtgaggccaccttgagtcaagccgactaaggcccctcaaccctgtcactaagcagcacgtgacactggcaggaccttcatctccagcatcccacccctgggtgtgggactttggggcagccgtgtgtgcaggtgtcggcacaggctagctcctcctggtttggtgtggtgtttgccattgcagagcaagctgccacgaagacccctgggcatgattttgcttgtatttccggaagtggggttgctgggtcatagggcaggtgtaattttttttacttgaaatgttccacttcttgttctgggaggtggttccaagggtgtctgcttttggccaggcgcagtggctcacgcttgtaatcccagcactttgggaggccgaggcaggcggatcacaaggtcaggagttcgagaccagcctggccaacaaggcaaaaccccgtctctactaaaaatacaaaaattagccgggcatggtggtgtgcgcctgtaatcccagctactggggaggctgaggcagaagaatcgcttgaacccaggaggtgaggttgcagtgagctgagattgcaccactggactacagcctgggtgacagagcgagactctgtctcaaaaaaaaaaaaaaaaagggagggctgtctgctttttgtaacttgaaaaactggacatctatgttatatgtactcatggataaatatttcacaataaaactttttaaaaggat

SEQ ID NO: 7531 - DNA, 207 bp, Homo sapiens
ggagccagagtgtgcgcatttcagagcatgggattgatcggcagcaagagtaaagacacagctccagaggcccacactgtggggtctgggccctgccttaggcagcccccctctttggccccctcccgtcaggcccagggcttggagtgaaagtgactctcaggtggtggggtggggaatgtgaataaacatgatttcttgccgggc

SEQ ID NO: 7532 - DNA, 5235 bp, Homo sapiens
agtgtcacaaggacaagtttaatctgcttcagaaagcgcctgtgtgcaactcaaattttgtggaatctttttcgaattcaaatagctatagagcaaatgataaattgacccctttttataaatggagggaaaaaatgaacagatttcagagattaaatgaaaaaaagcagatgttttaagtgcaattaacactgaaagagacctgttaaaccattcagaaaaagcttaagaaatgcgatatgacttccttttgtaatgctgctgatcccagtagactatgacttttgataattagcagaatttaactactgagtagttgattattttcacattttaattgctaatcactggctatataagtgtttttaagcaaaggtatttttgaagtggtgtagaacccttccaagctttcctgctcagtgttctaccagacttaccctggggcctggcttaaaagcaggattgaagaaaagggactgggggaaggaaacttattggaaaacttgatgcgaatgagtttctgcttggcacagtctctgcctgcttgctctcctttgctgatggattgcatttatcaaactattcatgctagcatttttccaacgagggaacttattccgcacgggcctactgtaggaccattgtctcgtgtaattaggaattttccatttgaaggattgctaaattgtcacagtagtaggaagtatagggaaacctctcagctgtggcactgttgtagctttggagtgcagagtgtaactctgggacaatcagatttcacatattctgtcatcttggcataagccattaaaagcttggagattactgtatttggcattaaaaaaaaatgtcacttaggtcagcactcccagacgtagcacagaaaaaccctttgacacaaaccatgtgttctgatttttggttcagaaaatattgaaactgtgagttgttttttttttaacaactgggaaaaaacaaaaacaaaaaactatagttagaaaaatggaagttccataggttctatttcttactctatgtatggctttgttttcagtctatttctaggagctttctctgaatcgctaattgtcctttcagttgaaatctaatttatacaatcattctatacttaaaggttaaatacatcttaattaattttttcttaaagtcaatgtaagtcactttgttttgtttttttttaatctacgccatatgcctcatgaaaccagctgttctagaatcagtcctgagaatatggcttaattccatggaaacataactcctatcttgggacctgacataatatctatctatcctggggaactggtaatatgagacttataggttacagcagaaatgctacatgttgacaaaagccttaatcgttccactgggagaactaattgataattgtgttaagattgaagattaaccctgtgttaatctcacttgagtctatcctgacagtagttcagattctggaaaatgataaactgacctgctagatgtagaattgtttcaaaattagtgttgaaataccttgttcacagatgaatatctgggcaggatctgagggtgtttggaatgacaccccccaatccagttgcatagatgggatgtctttgcaggtttgaggagatcatcgacctgcagagccccctttgacccagtacctcacgttttatttaaaatctaaatctggggccaggcgtggtggctcacgcctgtaatccaagcactttgggaggccgaagcgggtggatcacctgaggtcaggagtttgagaccatcctggccaacatggtgaaaccccgtctctactgaaaaaaatacaaaaattagctgggcatggtggtagcacgcgcctgtagtcccagctactcgggaggctgaggcaggataatcgcttgaacttggcgggtagaggttgcagtgagccaagatggtgccactacactgcagcctgggtggctgagcgagactccgtctcaaaaaaaaaatctaaatctgacatttgatgctatttttattaatattggaatgttctgtcttgaactttattcaatataatcaagaataaagatagagtaaacgtcactgatttgtactattaagagagaaaaaatatgccacacaactaaacataggtttaaattatgaagaaatttagaatagaggtttattagatttagggaacactaagaacaaaaaaggaaggagtgatacctgcctgagtggacagctgtaaatcagctgtaattactgcagttgtaccaatagttgtgagtggctccagtcactttaggagtccttggaagtacttggtacacatttgttggctgtaccttaaaggaagtggcaagtccagtttgttctctctaccacactagactgccactgacaagtttgggtctgttggattcaaaattttgtaagccattttcacaagtacaaagatacattttaaccttgtcttctccaaaattactgagtaggaattttatttttatctttttgagacagggtatcactgtcacccagactggagtgcagtggtgggatcttggcttactgtgacctctgcctcccgggttcaaatggtcctccctcctcagtctcctgagtagctgggacgacaggcacgtgccaccatgcccagctaatttgttctattttttctgtagagacggggttttgccatgttgcccaggctggtctcagactcctgggctcaagcgatcatttcgcctcagcctcccaaagtgctgagattataggtgtgagccacagcatctggcccagagtgaggagaattaatgagattttttgtgtgtgttagataatattgatttaagcctttttttaaaaagtactctcaaccaaatacaaaattgaaaatgtgaggtttaatagaaatgtgttggctatttgcaatggattttcttcttgcccaagtgtttggagttctactttatgctctgtatttaaaaattagtgacctcaaagcagagttgatgacacaggctttggggccctcatgttcttgtctttagaacatatcactactaagtatcagcttatcttcagaacattacaacattcaccgtgttcatatgctttctgagaagtcaccacttgtaatttcagatcacatacacctgaaggcattttatagttcctaaagttaacatgttagatcttttttttccaccccatgagggtctcactctcacccaggctggaatgcagtggtgtgattgtagcacactttggccaccaactcctgggctcaagtgatcctcctgctttggcctcctctgagaagctgggattactggtgcacaccaccacacctggctaattttttatttttttttatttttggaaatagggtatggctatgttgccttgggcccgtcatgaactcctagcctcaggtgaccctcccacctcaggcctcccaaagggttgggattacaggagtgagctactgcactgggccaacatgttaatttttttttttttttttttgagatggagtctcccaggcgggaatgcaatggtgcgatctcgacttcactgcaatcttcacctcccgggttcgagcgattctcccacctcagcctcctgagtagctgggattacaggcacctgccatcacgctcggctaatttttgtattttgagcagagatggagtttcaccatgttggccaggtgatctgcactcccactccccccacacttcccaaagtgctgggattacaggcataagccacaagccacctcacccagccaacatgttacatcttaattcttggattttcttcactgcagggctttgggtggagaaataaaactcttcaaatgcatgatcttggagatccctgtgaatcaataattctttagacaactgcggctcaaaatccctcctttcccttttccgagttattccatccatcttattagaaaggaagtgaattaggtgtaggtggtctgtaacacctgcacatctttttatacgtgtagagggtatgcctgggatatataggttgtcttcaagcagtagctgctactacagctagagagaggaggagtgccaggaaactgatgacctgagaccaagagtcttgttgatgttctgacttagataaaggttttgatcattttcatgaaataatgcagggaagtcatttctgctgtttctttactactccattcttggaggattagaacaagtcacactgtaattgactaaaacgactttttattttaaaatattgatggtggggttttgcttttttttttttttttttttttgagacgttgtcttgctctttcacccagggtagagtgcagtggcgaaatcttggctcactgcaacctctgcctcccgggttcaagcaattctctgcctcagcctcctgagaagctgggattacagcgcctgccaccatgcctgtctagtttttttgtatttttagtagagacaggggtttcaccaagttggccaggctggtcttgaactcctgacctcgtgatccacccacctcggcctcccaaagtgctgggattacaggcgtgagccaccgtgccgggccagtgtttttaactgtccacacttactaaattttccagtacttcttcctatggttcatgatagtaaacacagaaacatataaggaacattattagagttaccagatgttagctgttgcatatgtgcacattcctagattcaagggtgtttttgccttaaatttaagtgggtcattggttgtcttgggaagatcatggaaaattcgggattttttagaattctgaaccaaaatatgttttgagtgtttcttagtaaatgtgtgatcttccaccttccacattcagactgcggactacacttcataaatgcctttttatttccagttatggattcaactaaatgactgccttgggagcacataattactttgctacctttttccccctttgctgttgtggctcgagtttggttctcacctgagaagatgcattgagcatatgttgttacccagccctggcttaatggtgtcctgtggggtaggggtgggaggacgaggggcacggggccagagcatgtgaatggatcatggttggacagctgtgacctgccagcactgcgggtaagcaaaactacaaaccgttctttcctctgtgacattgaataaaccttaataaaattcataattagcacatactag

SEQ ID NO: 7533 - DNA, 257 bp, Homo sapiens
cacgggccaaggagccagtggggaagtgcgtgtgttgggccaggtaggatacgtacacctcttgcctcagagcagcctcatcccaggcagtgggtcttccctctgtccaaccactgttttattattttactaacatggtgatgggctccctcccctaaccttggtgcctgatccatccccagaccaggacagcagccactcagttcttcctccacctccacccagtgatcccaataaacgaattctgtctccccgtg

SEQ ID NO: 7534 - DNA, 596 bp, Homo sapiens
ccaggctcttcctcgggggcgggggagattctgactcttaatctgtattgtgagaaaatcccagcaagttccatgatattaaatccaggtctgcattggcccggggcaagagtttaacatcttcggccctgcattcctacatcttgtgtctgtacacgttcttaagcagcgtgtcaggagagcaccctgttgtcttctggtaaatgtgtgcagggtcatcctgtctcctgtacctcctgggaaaggggccgctgctgtctggtgccctgtgagctgtgattgattgcctttggtcagtaatgcgttcaggagtccacaccaggcacagatggggccttgaaacgctttgtcatgcttcttcagtaccatggatttgaaatgaactcatccttgctgtgagcatccaggagcccttgagaagtttatctatgactatgaaactggcaacgtcaccccagaattacggtcagccttattccccttcacctcccagtgaacgctaagaagtttcagacaagcagagagctctatttttagaagaaatatgttacactcagaaatgatgaaaccaaatcttatattaaaaggcaaagatg

SEQ ID NO: 7535 - DNA, 2642 bp, Homo sapiens
gcctgctgctagccctgcctggttccaccagactggcgtgtcattggacagataaaccagtgttagcttgcctctgggctgggtgagcttgaagtcctctgggacagagacctgtctccacgcctccgggagctgtgtccctgagccccctagtcctggctcctgctttttccccacagcccgtgttcccagccgaaccagcactctcccggaagcctggggtccctccacaccttggcttttatgaccctgatggcttctgaaacaggaaaagagagaaggaagacagaggcctgtgcccactgctgctccatgtgtaccaagagcagcagggcagaagggccctccctccagcctaggtcagaggtggggacagagaactcccctacagcccagagatgtggcagggctcagagaagcagccagagctcctggaggaaaggcagtcgggactgaccccctctcttaaaacacattcccgcccgcccacaggcctgaggtctgggacctttccctcccaggagtcccctaggtggctgggggaggcaggctcactggccattttccctagagtccagcacactgcaggaggcgttcggaggaggagttccgccccaccctctacagccttcctcaggcccctgtctctggcccccagcctcagtgcctcttggcccagggccaggcagtcgtggttgcagaaggagcaattaggctgcctgcctgtgggctgggagacagggacaatggggaaaagttaaggagcaaaatgggggttggaagcaaaaaatagggccccacctatttaggacgagattgaagactgacccttgaggcacacttgcactggagatgggtttatttcacgctctgtgcttgtgtgctagcggagggagagctcagggtggcttaatccagaggccctgtcatggcccgcccccagccatgggaaagcaaacttcatcctaaggtgtgcagcccaggccctgcccctttacagtctaggccgcctgccatggggtgcagcctctccaggggctgcgtcagacttgcacgctgcccacatccagattcctgcaaagacgaattgggtgcacagcaccccaaccacatacacgaggaagaagatgcggtcagcagtctcaggccagcttctctgtgacccctttactcctctggagggctctgtggggagagatacagggaaaggagctgttcttcaaggtcccctcaacatgagcggaagagcgaaccccaggggtcatcagcctgtatcgcttcctttcttagattctcagctgatgaaaatttgggtctggcccatttcaggccatcttcagttgaagaaacaccctcttaggctgtgcaaggcatgggttatcaggggattgaggtcacctgggacttcagggaggctcagcttgctccctgccccagacctgtttcttctaagggaggaggacatggtggagaccagggacaggagagccagcagggtggatgcaaggggcctctacccacacctggacctccgtgccctcaccccagccctaggtgtgcacctaggcctcattccttaccccccagcccctgcccaccttcagcaggatgaggccctgggttgccgtgctctcgctgttcccctctcggggctgggctggggccgctcttggccccaaggttgccccgggccagcagcccagccagcagcacagtctctatggtgctgaggaagagcagcagcagcaggatggtgaagtagtaaactgggggaggcagggcacagggagatgctcaggggccagtccctgtgtctctggtgcccagcgagctgagcaccagtgggtgaccggggagaaacagggcagactgggtaagggagcagggcttactgagcagtgggttgcaggaggaggagctgggcagggcctgcaccagggaggagtggaggacgaggtaactcagcagcaatgtcaccttgtagcctatgcgctcaatggcccggaggggcagcaaccccccgcacacgtcagccaacagcagtgcctctgcaggcaccaagagagcgatgatggacttgagcgccgtgttcttcagcctcagctggaaggggaaaagtcagggccttcccggcgggggggaaggaggtgggcatcgggggcatggggcctggcctctggccgtgcatcctcactcccacccgcctccagcagccctctgtcggcctcctcccgacttgactcaccgtcacctggaagcagggcaccagctgctggggtgggacttgggtcttcagatcataaactacgtattccctcttgacactcacaatctcgttcaccacgtgggcctggaactctaactccatcgctgaggggtgggaatgagaactatgaaccaggaaggagagatcccagctgccaagtctgggggtagcagactggagcccaggggtgatggagacttttgatggcttttggcagggacagacttggacacaaaaccgatccatagaagggcttcccaaaccttgttttgcaacatcccaaattgtctccagttgaaggaaggcctttatcagattcatagatgagctttcattgtaaaaataaatgtactttgcaccacttcatgatggaggg

SEQ ID NO: 7536 - DNA, 1017 bp, Homo sapiens
gaggccaggccctgccccacctctggacagtgcccaagtcagggtccagaactgccccccaacacaggtccacagacaccccaccacctaggcaggggctgggccagggctccaaggcttgccccagaggccacatggccaccagccccagctgccatcagattcaagcccaggaggctgaaaacgagggcccaggaccagaatcgctgcctcctctccccagccccaccttgtacacacagtgtttcattgctccgcgtcttcccagccccagaaaccggctaaaggaccctgcaccatgagagccgaggcctggaggagcccgggtcaggctggggaggaacagaactgggccctcccagagcacctccgcttcccccctgcttccccaggtctctatccagagagagtccccaggtacaacaaatgctaattagatgacagcaaattaaccccctggaggcttctcctggcagagcctccctggggccggggcaggctgtggatggggcggagcagggcagaagatggactgggggagggggcagagagaggagaccaaaatgaggtggtggcacagggtggggcaaggagatcctctctaaggcctctggggtctttgcctggccccatccctagggggcggggaggggacgtaaatccctaatctttaagcccgacttgaggctgagagcagctggaagtttgggtttggtggtttgggggccggggcagccaagctgtatggggcaggacagacagactaatgtagtgagtgtagctgtagctgaggcttaactgggagggatgccgagcttgctggaactactgggaccaagaagcggggtaccccacgcccctgcctgcactcctcgggggcgtggggcgtgccttgctccacccggactccctgggctgcgtcccacatccaccctcctgccccgtggggcaatttaacctttttcatgaaagttatttacaatgaaaagtttttaaaaataaaatttttaaaaatct

SEQ ID NO: 7537 - DNA, 1460 bp, Homo sapiens
gccccagcctctgcacttgggctcccctcctgccctgcattccatccatcctcactcagctgctgcctactgggcatcctcagcaagatgctggagactttttaccctcctgtgacagctgttacaacctgtaaccacaatccctcacctctcagagggaactggaaccctcctttctccgtgtgacctaaagccactcaatgaactgcagctcacgagaccttttgcagggactctggaatgtcctcacggtatattgatgttcaggtggagctggggtccatgggctaatttcttacacatcttttttctccttagggggtagaacaagaaggcttagagtttggcagctttgttacaaacatccctctggcatttcctggtctctggcacatcataaccaattggaaacctgcagtttggggtagggctggaggatcgctcctgtggaaagggagagccatactgcacggacgtagcgtttccctctacaagcactaggagcacctttctcaaggacaagaaatggtagcaaccaaaaggttggttgaaggaaacaatccttccttctggtggcagagccagtcttctgggcctcacatgcctgtgcggttaagaaggagctcttggccgggcgcggtggctcacgcctgtaatcccagcactttgggaggccgaggcgggtggatcatgagatcaggagatcgagaccatcctggctaacacggcgaaaccccgtctctactaaaaatacaaaaaattagctgggcatggttgcaggcgcctgtagtcccagctacttgggaggctgaggcaggagaatggcctgaacccgggaggcggagcttgcagtgagccgagatcgcgccaatgcactccagcctgggcgacagagaaaaaaaaaaaaaaagaaggagcccttgaatctgagaatcccccagttaagatgatttcccttaaggagcatttctcctgatcaggtgcattcagggaggcctgcaactccatcctaaggtgacatttcaagaaacacatgtgttgaccacctctgtgtgccaagcactgggtgaggagtggtcgtatattaccataattcatcctcactcaattgggaggtggcattcttgtccctgttgcccccatctctacccccttttgttaatggttgagagaaatgtggaccagtgattctcagtttggtgcccaggtccccaaaggaagtgatggagagccttgagctaagttcaggcagcagcatgtggccagcagcagtgtgctgggagcagaggttggaatcagggctcagggccttcacttcaagggccctccccagctactcgggaggctgaggcaggagaatcgcttgaactcaggaggtggaggttgcggtgagccaagatcgtgccactgcactccagcctgggctacaagattgaaaagatcgaaactctgtctcaaac

SEQ ID NO: 7538 - DNA, 185 bp, Homo sapiens
accttcctccgagggccgtctctcccagccgaacacagcccacccgcccagctccgccgcggtggcaaacagggggctggagaggcacgtggacatgcctcctggggaggggctcgaggagcccacgcgggggccgcggtccagcaccgctcagtgagcggaggtgtaaataaacattcaggagg

SEQ ID NO: 7539 - DNA, 608 bp, Homo sapiens
ctttcacgagggtctcgaccctggacctcctgagggaaacatggaaaaagcagtgccatgagtgatacagtgtttccttgcaagggaggactcgaaacagcctggagttagatatcttcttttgcccggattgatggggaggagggattaaaagagtcaggaagaagacagagctaatggataaatatcataacatggccttacatgtctgctgtcatcagccctgttccttaaaagttctagctgctttcttaaaaataatctgaaaatcttattgatactaaagaggagttaaaggcacataaagtcttaactctataatgttcatttagttgtttcagctccagggaaatggaggtattgatgttgaacctggttagggaagctgagcgcctgtggccctattactatccagttggcctctcccaaatcaacttcaagtcttttatagagaatcgtatttttctttcagaaattgttatgcctacagccattgaaaaatgaagcattcatgttgttacatcttccaaggatgtcagattagaaaatagcatcccacctctgggtatctgagtggctctgaagttgcaaataaaataatttgttgt

SEQ ID NO: 7540 - DNA, 1128 bp, Homo sapiens
ctgccaggcacagaggaaagagcatcaccgtgggagaggccagccgccgcctgctcactcccccccggaatcacccctcttcccatgcccctctgtccccactgcaaacccactgccctcttctccccaaggtgagtttgatgctgaagtgcaagaagtgtgttgagatgctgccgtttctattttgaagcgagctttcaacaggcgggtcccctgtggcaaagaaaatcggaaccctgttgccgattttccatttgtcaccccagcagaatgtccggcacttgctcccttgctgccccttctcaggtcagaggcgggtgttccagggcctgccgcggggctctctgggccggttccctgcagacccgcaggagagcacatgtgccttgcatgaagtgtgggttgcgccaacaattcccctggtccctttcaacctgtttagttcaactcaagcctccctgtgtcccagaccctcctgctgccaccaccacccaggtcctccctagtcctccagcgtcaacactatcccttgggagttgtagctgctgtcactgactcccggctatacatggcctgtcgaccacgttatagccctcaggcctgttgaacttgctctctaagagaggttgggaccaggctaggttccgggtgacgcccaggagaggtggtggccttcacacatgcacatggagttgaggaccagggagctgcagggaaagcaacagctataggtgccttgctcttctgtcggaggctgctgggggcaagagcagctgcacaaggccagggcaagtgctagggcccctcccccatcacatggtcacactgggacaggcgtgcagctcactgaactccaagcgagccagccctctcttggactagaaggcctactgtcagcccttcgcttacaaactgcaggctcaatccgaaggggacggccggcgggggctctcctagtgcccagagacaggcccagaggtttacaagttttctaagcttttgataatgtgaagctccaggccgagaggatgctgttgagcacattgcagctatgtaatttttggtgtatgtatgtaatatttaaggttggaaaaaaaactcaaaagcaaagatattaactcttattag

SEQ ID NO: 7541 - DNA, 739 bp, Homo sapiens
ccgctgggccacacggctgcccctcagccctgctggaacagggtctgcctgcgagggctgccctctgcagagcgctctctgtgtgccagagagccagagacccaagacagggcccgggctctggacctgggtgcccccctgccaggcgaggctgactccgcgtgagatggttggttaaggcggggtttttctggggcgtgaggcctgtgagatcctgacccaagctcaggcacacccaaggcacctgcctctctgagtcttgggtctcagttcctaatatcccgctccttgctgagaccatctcctggggcagggtccttttcttcccaggtcctcagcgctgcctctgctggtgccttctcccccactactactggagcgtgcccttgctggggacgtggctgtgccctcagttgcccccagggctgggtgcccaccatgccccttcctctttctcctcctacctctgccctgtgagcccatccataaggctctcagatgggacattgtgggaaaggctttggccatggtctgggggcagagaacaaggggggagacacaagtagacctcaggtagaacgacactgggcggagccaccccagggcctgctcccagggagtgctcgaggcgcatcaggcccgttttttaccagtttatatcacggtcttcatttttaaaagtaacgctaactttgtacggacgatgtctcatggattaaataatattctttatggcagt

SEQ ID NO: 7542 - DNA, 1220 bp, Homo sapiens
gacccctaactccacccccctccctggcagcacctcgagcagaaggccgagttctgaagaccctccttgacgctccatttctgggtgccaaggaagctggaggaatccctgactcaacttccccgaaggaggcctctgtggcggccagggtccccccctggagctgctgggaggcggcgctggctgcctggatgctgaccccagcgcggcgggcagagcggggcccactcttcttagcttttctactcactgttagagagagacctagctgagcggctggcaggaagcgggacaggtctaggagtcccttagggaataaaccagccccgtttctatcagcccggccagcatgcaggtctccacatcaccatctagagtatcacgcacacatctaccatatatacagatatattctatatacgagctatatataaatatatatatacatatatatatacacacatacatatctagaatgtgtatccgcggcgcccagaagcctcggtttggcccacctgtgagtggggcagggaggggttccggttgtgcagagaacagagtgttctggcaaagaggaaatcccacagcagcgcagaggacctgggcctggaggggcagggctggggcaacccggcttggcggcaaagcccagccccttctcagaccagctccccacattcctgaattccacttccaggcagaaaggagtgggctccccctactccctcagaggaactgactcaccggctgtcctagaatgggcaggggcagagcgaagttctgggtgggatgaccgcactgggggaggggcctcagtccagaaacctcgaccgctagctccacctgccttggccaccagggcagccccgggggatccgggctgctgggcagcaggtcggcgggaccacatgcctgggtctcaccctcagctccgagggccgagggctttccccaccccaccctcctcctggccggcagtcggccctgtctattcatctgcgtcaggcttgccaggggggccccccgtgtgtgccccttggtcacgtgtgtcgtcttcaaggatgttttgctgctgtggctcctgctgtgtcccctcctggcccatcctcatcctcatcttcatcctcatcctcatctgtgcaaccgcccgtcctccttttctagtttctgatgtttgtaaccagacccagctgtgtcattaaacagacccgttcttgctg

SEQ ID NO: 7543 - DNA, 704 bp, Homo sapiens
ccccaatgcactgagccctttgcttcttcaagagttgcggccctgatcctctcaagtggccaaaagcttttttaacttttcaatcttcaccttcccttgccaacagagggcactggggtgaattcaagattttcatcgaggtctgttcaatataggacaccccagcttgtccttggctcatccaagaactcttctgtatctaaaacaatacatctcaatcttggccaagggaaaatggactgctttgctggattggcactgagcaactttaggaaatgtcggtggagtgttcagcaagatcagacagcagtccaggtcaaaggcaaacacacacgctccagcccaaatcctcctggtggcacatcctaccccagatgctaaagtgattcaaggactccaggacacctcttaagagcctttctaagaacatgataggcttacttctgctccataataaagtgggagaaaaaagccagaatataacttaagactagataactgcgtacatgatggaccatttttttttttttggctgggtagagaaatcatataaaacgcaggctgtttagcatggagatgactctcagaacactgggagggtctggcacttgatgggggttagttgcttggcagcctgcctgccactgagggaagtcccattagagatgtatcaccaccttgtcaccaacaggatgatgtcacca

SEQ ID NO: 7544 - DNA, 565 bp, Homo sapiens
ccggggccagggctgccatggtctccttgcctgctccaaggcacaggatacagtgggaatcttgagactctttggccatttcccatggctcagactaagctccaagcccttcaggagttccaagggaacacttgaaccatggacaagactctctcaagatggcaaatggctaattgaggttctgaagttcttcagtacattgctgtaggtcctgaggccagggatttttaattaaatggggtgatgggtggccaataccacaattcctgctgaaaaacactcttccagtccaaaagcttcttgatacagaaaaaagagcctggatttacagaaacatatagatctggtttgaattccagatcgagtttacagttgtgaaatcttgaaggtattacttaacttcactacagattgtctagaagacctttctaggagttatctgattctagaagggtctatacttgtccttgtctttaagctatttgacaactctacgtgttgtagaaaactgataataatacaaatgattgttgtccatggaaaggcaaataaattttctacagtg

SEQ ID NO: 7545 - DNA, 1861 bp, Homo sapiens
actgcgcccacgggatgcacagcggccatgcctgatgctgtccccacccttgccccatgcccttgttctttccagacttctgtaggcctaattttcccttataaacatagatgcaggcgtacattctataggtacttgccgagttcttgcagtgtgtatattactttgcaggaatcaaaattgttttattcagaagacaaagtccctgacccctctggtttctgcttgctggtgaggttccagctgttattgggctctgaggccctctcctgatccaaatctttttttgtttgtttgagatggagtctcactctgtctcccaggctggagtgcagtggcgtgatcttggctcactgcaacctccacctccctgattcaagcgactctcctgcctcagcctcccgagtagctgggattgcaggcatgcaccatcacacctggctaattttgtattttcagtagagacagcgttttgccatgctggccaggctcgtctcgaactcctgacctcaggtgatccgcccaccttggcctcccaaagtgctgggattacacgcgtgagccaccatgcccggccaatactacactcttattctgccttacgaggatttctggaagcttctgtaactgtagggaagaaagctgtaggggagcatggtttttttgttttgtttttgtttttgagacgaggtctcactgtcacccaggctggagtgcagtggtgccatcatgactcactgcagccttgacctcccaggcgcacaaaatcctcctctcagcctgagtaactgggactacaggtgtgtaccactacatccagctaaaggagagcgtttttttctttttctttttgagacagagtctcactctggcgcctggtcactgtgcccttcaccttctgggttcaagtgattctcctgcctcagcctccctagtagctgggattacaggcatgcaccaccatacccagctaatttctgtatttttagtagagatggagtttcaccatgttggccaggctggtctcgaactcctgacctcaggtgatccacctgcctcggcctcccaaagtgctaggattacaggcgtgagccaccatgcccagctgggagcgttctttcagcaaaaagtctaattcagagactcaccttccatcctggcactaaacaatagtactagaggtaagatctgccaagaatttctctcacttaagcaggatacttactttaaatataattaggcaagacttatttgagtacttgcctaattgtatttaattagaactatgctggatgctgtagacagaagaaataaaatactcaacttggtccctatcttccagcaggttagaggcctttagggaagaaaagcctgtgtgcagggaaagagaacctcaccagaaagtattcaataaaatgccaaagtgatcttacagaacagtgcctgtgacaccggaggggattgttctgtctttgtgagtgaacatacaatgatggggataactggtcctcataccatgcaggtcccatttctgatcaccccactggcaggacaattcacagttcttgagcaaactgagttagggagggtatgctaacgacagaacctatgcaagttcttagaaatattttttgtttgctgaaataaagctcaatcaacacactaccttaaaaaaaaagtggagcagtggcatttccatgcctcatgctcaccatcatgaggttaacttcccgccgtcgcctcttgcctgccaggggtttttcgggagcccctctctgttccactctgattccttttgtttcttgctgaccattcactctctgtgtctgttgttggatccaaatacgagtgtttttctttc

SEQ ID NO: 7546 - DNA, 1309 bp, Homo sapiens
aactgaagaataacgaagttatccttagcgtcctcctaaaggcttttccttttggcatcttaaaagcttgagagataaaacggaaaccccagagaggagtctgggcaggctcccagggtgcatgctgcctccataaatctgctgagctctagaccctcaatcaggacttgtcccttggctagcaggatcctgggaacacctttggccctgccctgtgtagagatgttcatgtctgttcctgtgggtcactttgttaagctgaagagttttaagaggtagagctcagaccctggactgggatttttcttaccactcaaacttgctatccacacaccctgcacaccttagataaaaagaacattttaaaagcagagttcactttcactccagtctcccctcttttgccctcactgaagccaaaccacagaagactttgaggaatgagagacaaatgaggtagagctcacctgtgctcaccagctccgtcagggtggtcagccgacccctttccctgggaaccccacttctctctgtggctggcttggttgtcgggggtgagatgccatattgattacagggcagcaaagaaccagtaccaggaatttacttgaccattccccttatttttcatctagaggaatctcggattcagccctttcattgctaagacaccttttcactgaggttcttaccagctcagccaaatctccactctgctatagcagaagcaataatgtttgctttaaaaagatttcttgacctatgccttttcttagaaagtttgatagattagttagaacttcagatcatcagatcagtctcaaatgggtttcttggaattttatatttgacaatatttatactataccaaactcatttgcagttcttaggtttgttggttaaaacatttttttaaagcagtaagtttatagaaaatgttttcatttaatggaaggctggggaatgtccagcatcaacccctatggcatgcattcccaggggccttctcatctgggcctggaacctttggttcagggcttaggggagaacaggccacatggcaacagccacacagtcattgccttcaacacagagccacgtgtccccaaacagcaatagtcatgcccttgtccaggctgggatctaattgacacaataggtcgttgactccctcctagtagagctatctaggtttgtctggaaagtttccgaccctggcttataggcaccacacctcatgtactcctcatggcttggatctctgtattcagcctttgttcagtccaataaactttgagtagatgatctc

SEQ ID NO: 7547 - DNA, 286 bp, Homo sapiens
cccagcaaggctgttgtctgtatggaaggacacgctcgcggcaagggcagggcctggggagggtggcctgtccagtcctgcagacaaggggaggcctgacagagcccaagaatgaggacaccctcggcacgggaacccattcacttagcgtttgctccagtagctttccctctgctaccaatgcagataaacgcggcttgttttactcaggcaagagaatgtgaatagtgccaagaaaatcctttacattatttaataaaaattgaatccattttctatcttggaa

SEQ ID NO: 7548 - DNA, 2046 bp, Homo sapiens
gaaaatggtaatgtctgggaatccgagacacataaccctaattcataaatgggatttggggtaggtctttttgagtcgtgttaatgtaagaatgactcctatcattaggagtgctgctcggaggttactcacctttgggagtaatactgaagagaggggtctgcagaaaggatgtgtatgaagcttagataataatggctgtttcgtaaactgtttgagacctattaatgaaaatgactatttcttgctgtttttatccaacgtctgcattttccccctttaaagctgcggtctcctgtttgataaaagaatattggccagtattgcagattttaactgatttggctgatcctccagggaccagtttctgtgggcgtgtattggagcaggtttgtctttaaatgttaaagatgcactatcctcttagagaaacaatcagttcaactattgttgtactgactgggacttcatattctaatggatgtggcaaaagaattgcaataagaagcagtgaacatttggaaccccaaaagaaagttacaggtattgcactgggtggggaaaggatagtgtgtctttaactcttaaattgtttggtcctattttttaaaaaggaaagggccctaagtagctcagatattaaagtagtattctcaattaccaaatgtttcatttgaaacaatttatcttaatgaaatatagaccaattctctgatctcgagttgtttttgtttggatacagcccttttttttttctttttttttcttccccttacctttcttcaccttggttatttggccaggaatacgtaaattcaaacttgtacatgctgatggtagcctttgtgaaattttcctaattgggccttttaaaaacatggctgggtggaacatttctgtaccctactggtttgaccagagccttagtaagtacgtgcctgaaactgaaaccatgtgcactttaatggaaggtaagctgaacttctttcttttcaaacctagatgtatcggcaagcagtgtaaacggaggacttggggaaaaaggaccacatagtccatcgaagaagagtccttggaacaagcaactggctattgaaaaggttattttgtaacatttgtctaactttttacttgtttaagctttgcctcagttggcaaacttcattttatgtgccattttgttgctgttattcaaatttcttgtaatttagtgaggtgaacgacttcagatttcattattggatttggatatttgaggtaaaatttcattttgttatatagtgctgactttttttgtttgaaattaaacagattggtaacctaatttgtggcctcctgacttttaaggaaaacgtgtgcagccattacacacagcctaaagctgtcaagagattgactcagcattgccttcattccttaaaattaaaaacctacaaaagttggtgtaaatttgtatatgttatttaccttcagatctaaatggtaatctgaacccaaatttgtataaagacttttcaggtgaaaagacttgattttttgaaaggattgtttatcaaacacaattctaatctcttctcttatgtatttttgtgcactaggcgcagttgtgtagcagttgagtaatgctggttagctgttaaggtggcgtgttgcagtgcagagtgcttggctgtttcctgttttctcccgattgctcctgtgtaaagatgccttgtcgtgcagaaacaaatggctgtccagtttattaaaatgcctgacaactgcacttccagtcacccgggccttgcatataaataacggagcatacagtgagcacatctagctgatgataaatacacctttttttccctcttccccctaaaaatggtaaatctgatcatatctacatgtatgaacttaacatggaaaatgttaaggaagcaaatggttgtaactttgtaagtacttataacatggtgtatctttttgcttatgaatattctgtattataaccattgtttctgtagtttaattaaaacattttcttggtgttagcttttctcagaa

SEQ ID NO: 7549 - DNA, 2899 bp, Homo sapiens
tcactgttctcccctgtgattcccacccctctgaccgcccctgctcacttgctgccccctccactggaaggggcctggcctggtgccctgtctctgtctgtctccaccgtgcagggaggtttcacaaggactggctgatgtctcgcctcgagctggcctggccgcagctgctgctgagcggaagtctctgaggggcgaggctgagaggaaaccacactctcactggggttcccgcagctctggcctctggggaggggtgtggagatgtgtgggcgtgagatggctttgagggagggacagcatgaagcttttcgctgggtctgtcttttcagtctccaggacaaaactaggccactgtgctccaggagaagggaaaacccacgtccccccaggctgggcccaccggcaaatcgggctcccaggcccttctcagcccatgcttctgtctctgccttgtcaggcttattctttggggctttgaagcagcctttggtgggcaaacggcatctcagggaaccctggcctgtctcctccagagcttgtgccttggccctgggcaggggccaccatgggctgttgatgtaaatggcatccccagagttgtgcagtgtgggggcaaccctgaggtatcagcccagccccctgtctgcagcttttgctacccagcccagctccagctctgtctttgtcactgggggtggtgggggaggctggagctcagggacggggcactcctggcagattctccctgccccaggtggaaggggaggggggaagtacccatcctccatcctcctatcctgccagcggggtgggcgctactatgctggggagggtctggctgaataatgatgctgagctcgggacaccagccttctccgtgcacctactgtgtgccaagtaccatcccaagagcattatgggtggtaacttatacaatgactcagagaggcaccgctataatcacccccagtttctgtctggttccagtcctggccacacagctaataagcagcaaatggatttgatctgattttatctgaacccaggcaggctggcccagagcccactgtctaatcattgggccgtccagcctgtcaagactccaggctcgctggcgtcgtacccctctgtcatttcccagggaaacaagctctagcagcacctgccctgtgggtactttggccctgcctccctgcctccctgcctccctgcctccctgcctctcatgataggagccaaagaatggtctcctttgcaggaaaggagctcgacgggggtcttctcttgcaggctctgtcttgcatgtgggtcctgagctttctcattgagtaaggggagggggcagctggttcagtccagcgcagagtggatggaggccagttgaggctttcttgaaaccctaagcccagctgggatcctcggggaaggatccttcgctgggatctgactggctcttccagaggtcagtggggcatgtggctggagcccaagtaggagggaggaagaaatggtggtctgagtcctggggtgaccaggccctgaacctgccctgctgggaccccattccctgactctaggccccctttccccaccacacaggacaccaggctcttgccttaagacaggaaaggaaatgccttatggtgaacaattctccaggtccctattgtggctccaacagatgccagagggacatggcaggtgaccctggtctcctacgaccctgactttacttgctgtcatgaggccaatctcttaccttgacccacctcctgcctctgctttcagaagggcagaagagcgggcctcctctagcttcccagccgcctcccgcctcctgccgcccggcagcgctgggccccccagcagcgaggttcaggaggggaagaacctctcgcaggtgaacaaattgctgcacatcagacacattcttttcaagcctcattttctctccttttcatgctaactttcccactattaaagagcatttttaaaaagaagatgaaaaaaggcagagagaaaagaaggatgaaagtgtgagcgggtatccggaagtccttttcaattgcctgctgctgtgcagggtctgaactaagagcaagaaattggaggatgctggaggggcgaggtttcgtttcagtcctgcctattgggccaagtctggggcggggaaggagaggtgatggaggtgggcctggctgggccctgcggccctggaggctgcccctctgcctgccacccagcccctggcctgtgcctggcacaggaagcccgtcaataatttcttgttgaatgaatgaaagaaaagaaatcagtggatggagaagggctggattcttttgtggggaccttccacgccaccttctctgtggggctctagggctgagaaagaaaggacagatttggcaaaggtcaggcaggggctgggaaagcattaggtggaccaggcatgctacagcaaggccacgcctgcactgttgtcccactggtgacacccatgggtgcagccatggcgggtgggcgcagtttcacatgggattgggggtgagcctgggttgggtgggcgacccccaccccttccctacccctctccccaccagcaggtactactgggtctgcgtgaagataaaagctcaggaacatgccaggaaggtgtgaccatgatgatacctctgagatgaacccaagaagaaacagcagagtattacaaaggggaacaggactcagggtggacttcaagtatcattaaacataatcaaatatttaaaaagttattattgactgggtgcagtggctcacggctttaatcccagcacttagagaggccaaggtaggaagattgctttagcctaggagtttgagaccagcatgggcaacatagtgagaccccatctct

SEQ ID NO: 7550 - DNA, 230 bp, Homo sapiens
ggggacggcgatgggcctcacgggcccgcccagcaccctgagaccacactgttgcctcccagtgaccctgctgggacaccaggacaaggaagacagtttcgcctctcgaaagccgcagctgcgcctaggctggagctggaagggtgggtgaatccggcttgggcatccccaatgaactctgccctgcctgggactctatttattctgattaaaggggttttgcaaatggg

SEQ ID NO: 7551 - DNA, 680 bp, Homo sapiens
gggacctgcgagggccgcccgctcccttcctgccactgccgcctactggacgctgccctgcatgctgcccagccactccaggaggaagtcgggaggcgtggagggtgaccacaccttggccttctgggaactctcctttgtgtggctgccccacctgccgcatgctccctcctctcctacccactggtctgcttaaagcttccctctcagctgctgggacgatcgcccaggctggagctggccccgcttggtggcctgggatctggcacactccctctccttggggtgagggacagagccccacgctgttgacatcagcctgcttcttcccctctgcggctttcactgctgagtttctgttctccctgggaagcctgtgccagcacctttgagccttggcccacactgaggcttaggcctctctgcctgggatgggctcccaccctcccctgaggatggcctggattcacgccctcttgtttccttttgggctcaaagcccttcctacctctggtgatggtttccacaggaacaacagcatctttcaccaagatgggtggcaccaaccttgctgggacttggatcccaggggcttatctcttcaagtgtggagagggcagggtccacgcctctgctgtagcttatgaaattaactaattgaaaattcactggttggtgga

SEQ ID NO: 7552 - DNA, 1635 bp, Homo sapiens
ggggtaaagggcgcaaagggcatgggtcgggagaggggacgcaggcccctctcctccgtggcacatggcacaagcacaagaagccaaccaggagagagtcctgtagctctggggggaaagagggcggacaggcccctccctctgccctctccctgcagaatgtggcaggcggacctggaatgtgttggagggaagggggagtaccacctgagtctccagcttctccggaggagccagctgtcctggtgggacgatagcaaccacaagtggattctccttcaattcctcagcttcccctctgcctccaaacaggggacacttcgggaatgctgaactaatgagaactgccagggaatcttcaaactttccaacggaacttgtttgctctttgatttggtttaaacctgagctggttgtggagcctgggaaaggtggaagagagagaggtcctgagggccccagggctgcgggctggcgaaggaaatggtcacaccccccgcccaccccaggcgaggatcctggtgacatgctcctctccctggctccggggagaagggcttggggtgacctgaagggaaccatcctggtaccccacatcctctcctccgggacagtcaccgaaaacacaggttccaaagtctacctggtgcctgagagcccagggcccttcctccgttttaagggggaagcaacatttggaggggatggatgggctggtcagctggtctccttttcctactcatactataccttcctgtacctgggtggatggagcgggaggatggaggagacgggacatctttcacctcaggctcctggtagagaagacaggggattctactctgtgcctcctgactatgtctggctaagagattcgccttaaatgctccctgtcccatggagagggacccagcataggaaagccacatactcagcctggatgggtggagaggctgagggactcactggagggcaccaagccagcccacagccagggaagtggggagggggggcggaaacccatgcctcccagctgagcactgggaatgtcagcccagtaagtattggccagtcaggcgcctcgtggtcagagcagagccaccaggtcccactgccccgagccctgcacagccctccctcctgcctgggtgggggaggctggaggtcattggagaggctggactgctgccaccccgggtgctcccgctctgccatagcactgatcagtgacaatttacaggaatgtagcagcgatggaattacctggaacagttttttgtttttgtttttgtttttgtttttgtgggggggggcaactaaacaaacacaaagtattctgtgtcaggtattgggctggacagggcagttgtgtgttggggtggtttttttctctatttttttgtttgtttcttgttttttaataatgtttacaatctgcctcaatcactctgtcttttataaagattccacctccagtcctctctcctcccccctactcaggcccttgaggctattaggagatgcttgaagaactcaacaaaatcccaatccaagtcaaactttgcacatatttatatttatattcagaaaagaaacatttcagtaatttataataaagagcactattttttaatg

SEQ ID NO: 7553 - DNA, 211 bp, Homo sapiens
ctcgctcctgcctcacagcccacactccctggggctggaccacaactcagcccttcacctgtgcacctgtgacttattctttacaggaactggtggtggtttttcgttctcttaaataatcaggtgctttgtaaccaagcacatcggaaccagagggtggaggttggtgtggaagaggtggggcagattaaagccagtggagccactcagc

SEQ ID NO: 7554 - DNA, 2042 bp, Homo sapiens
gcgtgcagccaagggcgttggtctgcgggggccttggagctcctgctcttctcccgcacctccatggatgcactgctgccgagcagagcgtcctctgccaggccccgccctggattcctagagactagcttcagcttttgctattttttttaagtgggagaagggtgggcagttatcactggggaagagaggaccggccacctgtccagcatgggctccagagccttcctctctcacagggcagagctcttgtcggcagggcagcctcctggccagtttctctgctcagtgttctggtagcagagctcagagccaactgtttacctcttggttgtccccgtgaagaagccttcaaaccctgcaccataaatacatgtgtccatatattattatatgttaagagaaaaaggtggaaaggaagagaagccacatactataaagatctatttttttttttttaagagagaacgtagggctgttcaggtgcattctgccctggctgcgctggggagcttctccctggagaagagcacctggggctgcggccaaggggcatcagcctgggcccgcggcagggcctggcctgcctctcctgtgctgtgggagctcgctgcctggtgcttgtctgggcgagatggacaggtgaggtcgaggacgcagagggcagaggcccagtggagcctcagacggcacagtcagagtcgggggcctgccctggccggggtcgcagtcggcagcagcgtgcagtccggcatctcccgcggatgcttttccatcccaagtgcctgcggagcgccgaggagaggagagagctgactggacgcttacgttattttcctccttcagaatccaagttcttgttgggctttaaagtagaaagtcagcattttccttgagctaaatacctaataaccaaaactgtgaggaaggttatcgggacagaggttccggataacctgtttcattttgggttttcttcctcttccccagactccagtcctcgttctagaggaaggagtaggacttccccgatccccgtagggcttcagctttttctgcctcaaaaccagccctaactggactactctggatgcattttgtggtgggccccctagaggggaagatgggcctttatctgctccgtggggtgcactggagtgaggggggtggccgggctgcctctcgcatctctgtcttcccctgcaggcgctgtgtgagctggccctgcccctcctcattacagtatgaagggagccgtgacacgcagcattttcctgccgttctctcagggactctcagggcagctcctgccactccgccagggccagcatgccagtccaggcagagcaggtggctggctgtctggccgtctcgccccgcccctccacaggaccctggaccagggcggtgcagggcgcagccctgaggaggcaggtggaggagctgcgggttttcacagggccgcgtcgccacggctcctctgatcctttagggttggcgagcatctctggaaatagcttttgcagaggagtggtgggaggaatagagggggacagtctgtcacctccctccccgccactttgtgtagatcctacctggagggaatggctttaggcacttttgtgccagagcttgtgagggtgacagaagagggtccaggctggaaacctgaactttctgggtgggagaaccaggtggtgcctgccgaggtctgggcgtgtttgggccggtgctggagcctgtccagctggcccgggccctggcctggttctcaagtgtttcctagacagagaggcacctgggtcagtattagtctatttatcagaggtgtaaataatctatgtatagtttttctccttttagattattttgtatttgtttaaaagaagttttgtcaaaatacaaaaatataaagaaatgactgaaagttgttgacagggtttttaagaaataattattctaattgtttttgtttgtttgtttttgccttgtaaactagcgccaaggaactgcagcaaataaactccaactctgcccaagcc

SEQ ID NO: 7555 - DNA, 1537 bp, Homo sapiens
ctgtgcccctgtggaaggaggtcggttccgagggggtgggtgtaagggtgaggtgggggtgtgtgtgccgtgtatgtgtgtaggggtgtggtggggtgtggcgtgtgtgtatgatgtatgtgggctgtgtatctggcacatgtgtgttgggtggtgtgtgtggtgtgggcgcgtctgtggtgtgtgtcctagtcacttggagaagggtgtgtgtgggatgcgtgtgtataagggggtgtgtgtgggatgcgtgtgtataagggggtgtgtgtagtgtgtgttgggtgtggggtgtgtacacctggcatctgtggcatgtgttctggtcacttggagaagggcatgtgtggggtgtgtgtgggatgtgggttgtgtgtatatctggcatgtgtcccagtcacttgcagaagggtgacttcttgccagccgcatcgagatgccatgcattgggttcctaggttggactcatacccgagggtggcagtgggaagattcgggtctcgtttctctctgtcaggactaccgtggtttgttctgcagcctcctggagacaaggcgtcccttcccgggagctgtcggtctggatctgagggagctctctgtgtgggctctgctgcgctgggagcctgtcacggtaggagctctcccggtaccagtgtccacagaccgcccaacacagaggctttgaggcttctctagatcggaacctctttggtgacattcccgaccagccctgcaagagaaacgacagtgtgtgtgtgagcagaggtggccgcacacctgctggacatctttgccaggctgtgccttctcatgtttcatagacagtggtctgtgctggcagaggctgctgcccctggttggggctatcaggagagtgggggatggtggccacatgtcccccaggtggtctcccggtgcatagctggtggctctgggcaagccatcccttgcttctcggggctgacgccaccgttgtgtccgagcccgccctcccctgcttcctcagcgggaccccttcatctgttggccttacctgtcctcagaaaggaagaggtgaccccacccagccacctctcccttttatggaactcgagagggtggccctactgtgcaccccttccttgtgagtagctctcaactgtcctggagagcagaggctatttggggtcggaggagccctcgatacctgcgaatacatctgctttccaggctgctgtttattctgagacgactgtgctgtagcttcccttgcagctgcaataacccgcaggtcttcactgaggtggaggctttggggtagaattctccatttattttactacttaatacaaaacatttatttttgaccagtcctgtggcttccattagcaatatgtttcctttcccaaatatgcaaatagtggctttgtttgctcaattttgtgagtgctttggaatttaaatgattgtataactcaagaagattacttttctatgttgctcaagctgtgcctgccaacttgtaacttaataaatacaggaaatcctcagagaa

SEQ ID NO: 7556 - DNA, 2686 bp, Homo sapiens
gcaggcctccaacgcccctgtggccaactgcaaaaaaagcctccaagggtttcgactggtccagctctgacatcccttcctggaaacagcatgaataaaacactcatcccatgggtccaaattaatatgattctgctccccccttctccttttagacatggttgtgggtctggagggagacgtgggtccaaggtcctcatcccatcctccctctgccaggcactatgtgtctggggcttcgatccttgggtgcaggcagggctgggacacgcggcttccctcccagtccctgccttggcaccgtcacagatgccaagcaggcagcacttagggatctcccagctgggttagggcagggcctggaaatgtgcattttgcagaaacttttgagggtcgttgcaagactgtgtagcaggcctaccaggtccctttcatcttgagagggacatggcccttgttttctgcagcttccacgcctctgcactccctgcccctggcaagtgctcccatcgccccggtgcccaccatgagctcccagcacctgactccccccacatccaagggcagcctggaaccagtggctagttcttgaaggagccccatcaatcctattaatcctcagaattccagtgggagcctccctctgagccttgtagaaatgggagcgagaaaccccagctgagctgcgttccagcctcagctgagtctttttggtctgcacccacccccccacccccccccccccgcccacatgctccccagcttgcaggaggaatcggtgaggtcctgtcctgaggctgctgtccggggccggtggctgccctcaaggtcccttccctagctgctgcggttgccattgcttcttgcctgttctggcatcaggcacctggattgagttgcacagctttgctttatccgggcttgtgtgcagggcccggctgggctccccatctgcacatcctgaggacagaaaaagctgggtcttgctgtgccctcccaggcttagtgttccctccctcaaagactgacagccatcgttctgcacggggctttctgcatgtgacgccagctaagcatagtaagaagtccagcctaggaagggaaggattttggaggtaggtggctttggtgacacactcacttctttctcagcctccaggacactatggcctgttttaagagacatcttatttttctaaaggtgaattctcagatgataggtgaacctgagttgcagatataccaacttctgcttgtatttcttaaatgacaaagattacctagctaagaaacttcctagggaactagggaacctatgtgttccctcagtgtggtttcctgaagccagtgatatgggggttaggataggaagaactttctcggtaatgataaggagaatctcttgtttcctcccacctgtgttgtaaagataaactgacgatatacaggcacattatgtaaacatacacacgcaatgaaaccgaagcttggcggcctgggcgtggtcttgcaaaatgcttccaaagccaccttagcctgttctattcagcggcaaccccaaagcacctgttaagactcctgacccccaagtggcatgcagcccccatgcccaccgggacctggtcagcacagatcttgatgacttccctttctagggcagactgggagggtatccaggaatcggcccctgccccacgggcgttttcatgctgtacagtgacctaaagttggtaagatgtcataatggaccagtccatgtgatttcagtatatacaactccaccagacccctccaacccatataacaccccacccctgttcgcttcctgtatggtgatatcatatgtaacatttactcctgtttctgctgattgtttttttaatgttttggtttgtttttgacatcagctgtaatcattcctgtgctgtgttttttattacccttggtaggtattagacttgcacttttttaaaaaaaggtttctgcatcgtggaagcatttgacccagagtggaacgcgtggcctatgcaggtggattccttcaggtctttcctttggttctttgagcatctttgctttcattcgtctcccgtctttggttctccagttcaaattattgcaaagtaaaggatctttgagtaggttcggtctgaaaggtgtggcctttatatttgatccacacacgttggtcttttaaccgtgctgagcagaaaacaaaacaggttaagaagagccgggtggcagctgacagaggaagccgctcaaataccttcacaataaatagtggcaatatatatatagtttaagaaggctctccatttggcatcgtttaatttatatgttatgttctaagcacagctctcttctcctattttcatcctgcaagcaactcaaaatatttaaaataaagtttacattgtagttattttcaaatctttgcttgataagtattaagaaatattggacttgctgccgtaatttaaagctctgttgattttgtttccgtttggatttttgggggaggggagcactgtgtttatgctggaatatgaagtctgagaccttccggtgctgggaacacacaagagttgttgaaagttgacaagcagactgcgcatgtctctgatgctttgtatcattcttgagcaatcgctcggtccgtggacaataaacagtattatcaaag

SEQ ID NO: 7557 - DNA, 320 bp, Homo sapiens
acggcgtggcccaagggtggtgagaaccggagaaccccaggacgccctcactgcaggctcccctcctcggcttccttcctctctgcaatgaccttcaacaaccggccaccagatgtcgccctactcacctgagcgctcagcttcaagaaattactggaaggcttccactagggtccaccaggagttctcccaccacctcaccagtttccaggtggtaagcaccaggacgccctcgaggttgctctgggatccccccacagcccctggtcagtctgcccttgtcactggtctgaggtcattaaaattacattgaggttcct

SEQ ID NO: 7558 - DNA, 1833 bp, Homo sapiens
ctcaaaacggaaacactgagcaaggccatcaggactcagcttttataaaaacaagaggagtgcacttttgttttgttttgttctttttggaactgtgcctgggttggaggtctggacagggagcccagtcccgggccccatagtggtgcgggcactggacccccgggccccacggaggccgcggtctgaactgctttccatgctgccatctggtggtgatttcggtcacttcaggcattgactcaaggcctgcctaactggctgggtcgtttcttccatccgacctcgtttcttttctttcctatgttcttttgttcagtgaatatccctagagctcctaccatatgtcaggccctatgcctcaccctgagaacgcagtgagcatgaggtggacctgtttgctgggaaccccaggtcacccccttttcttcctactctgtgcctggagcatcatgtccacccctgcagatccttggaaaagaaaatgtttatgttgcagggtattgcatggtcacgagtgagggcaggcccctggggacacatctgcccacagctgcacaggccagggcgcaggcacatctgttggttctcaggcctcagataaaaccatctccgcatcatatggccagtgaccgctttctcccttcaagaaaattctgtggctgtgcagtactttgaagttttaattattaacctgctttaattaaagcagtttcctttcttataaagtggaatcaccaaatcttatcacacagagcacagtcctgtagttacccagcccgctccagcagtgcgggagattgtaaggaagcggtggcggctggtgaagcaagtctcacatgtcggcgttcttggccaatggatacaaagataaagaaaatgttgcctttttctaggaactgtcagaaatcctcatgcctttcaagacttctgtgaatgacttgaattttttattccctgcctagggtctgtgaacgaggcctgtctcttccctggggtttctttccatggcctttatttctcctcttccagtgggagttttgcaggctcttctctgtggaaacttcacgagcgttggctgggcctcggcttcgctggagtgtactccagggtgaaggcagagtgggatttgagacccaggttaggcacgacccaggctgagaagggacgtttccatcattcacagtgccctccccacagcactacctcaccccgacccccaccctcactcctaccccaccccgcgatcgtcaggggtgccacggtgggccggagggtgccggctctggctgtccctgtgccggtccctcacaaacctctccccctttgaaactcaagcacagctgcgaggagggcagcgaggagggacccctctctcatggttgtctctttcccccgctatgtcataggtagtggaggaagcgaaggaagtgaacgctgaatgtgacgcatttctgaagagctcagctgtcaccgggcatagcctggaagccccaagtctgttctgactttgcctggctgtctccttgacccgcctcctagatcattgtccttgatgtccaggctgggtcatttaaaatagagatgcaatcaggaaggttgggggacttgggactgtggctgaattgagaccttgctgatgtattcatgtcagcacctgagtcacagcccaggtgcccggaagcagcctcttcgcataggcagtgatttgcgattactttaaagctcaccttttttcttcccctctctgttcgctgctgtcagcataatgattgtgttccttccctatgggatccatctgttttgtaaacaataaagcgtctgagggagtgt

SEQ ID NO: 7559 - DNA, 258 bp, Homo sapiens
atgctgggtgggtgtgtccaggaggagagcaggggagagagtgagcgtgagcttggcatagtgatttttatttctgggtgggatgtggccttttggctggtcccgtccctgatgtcacccccaccccaccagcccctttcatccctccttcctccccctcagtttttgttggaaagattatctctagagttatattttctattagatgtaaatatgttatttaagaaaaatatctaaatatatatatttcaactcgaa

SEQ ID NO: 7560 - DNA, 802 bp, Homo sapiens
ccggagggcgtcggaaggggaagcgccattcccgcgggggggcggggagctgagcacctggggcctcggggcgggctcccctctcgccaacccgccaaccgcgagagacccaggctggcccccagggtgaggacgcccggagcggaggtaaccatgttccccctgcggcggctgtcagacctgggcggaggccccttccacgcggtgccggcggggctcgccctctcctgcccttccccgctggagatggacccccggaacggacagggcagctctgcgcccggcctcagagttctagtattatattttaaccgtgctaacttgtcaagtgctgactctactcccgtttgtacgtggtgttattattgaaatgtattgtttgagctcaaaaggcccgaccaccccccttcgggctgctatatatatatttatttgtaggtatttatatattgaaatataaaaacctagatttatggagtttcctctagatcatgttatattctatatcagacaaactattttcttttgacctttcttcccctccatccagtatttcggttgatttcattttctcccctctcttccccttccacgaactgcaataccagtaaccttggtatatattttttgatactgtacacatggatgtcttgtttctatgtgcaaaaaaaaaaaaaaaaaaaagtttgttaaaaggctacacgagctctctagaaactgctgctactagaaatgtctaaactataagcttccaactattacctgcttgaatgtaaatattaaatggagatgttgaaggtgc

SEQ ID NO: 7561 - DNA, 837 bp, Homo sapiens
gtcgggcccccgacaccggacaggggttgaggggacctcctcagaggccctgggcacgggagggggtggggctgggcgtgaaggggacaggggacggtagaaacctaaggaaaatgcttttgggcaacatgagaggaaccttttcatattaatgacaaaattagagtctggaagtgacagaagtcagatctacagccacccagaggaaagtcagctcctgaaacgctgcagtggaacgcgcagccaccgcacctgagacgcaggctggctgggctctcctgctggctgccctggaggatttcaacatgtcccaggatttgctccaccctcgagggcagccagacagcgtcgccaggcaatgaggaaagcagagacaggagaggaaggcctcactcacccactgcgtcgagggctgcagaacacagcggggtcctgtccaggcccagggacatctttgcaagccagacacacttcctcttgagacctcgttctctcggagtgagccaaacacacttcccaaaacgtccccagccacagctgggatgccgatggaaaggcatctgccataaaagaaaagcaaaagataaaaagcccaaccgatgtggggatagagaggcggaagagcagtcaggcttgaggagctggcgcttgtaatgtttatccgtttaaacatttcgtcctcctggtacacgaagggaactgtctgcccaggagcctgagcctcaggctgttggagaagcatctgatgcctttttctttgctgggggtcttctacgtgaggttccttggcgttgtttaaggtcaactccaccaaatacagcaaccagctggggcttg

SEQ ID NO: 7562 - DNA, 270 bp, Homo sapiens
agcagcagatcagtgggatgagggagactgttcacctgctgtgtactcctgtttggaagtatttagatccagattctacttaatggggtttatatggactttcttctcataaatggcctgccgtctcccttcctttgaagaggatatggggattctgctctcttttcttatttacatgtaaataatacattgttctaagtctttttcattaaaaatttaaaacttttcccataaactctatacttctaaggtgccaccaccttctctagt

SEQ ID NO: 7563 - DNA, 1161 bp, Homo sapiens
ccatcccaggaggcctgtgcacacatcccaggcatgtcccagacacatcccacacgtgtccgtgtggccggccagcctggggagtagtggcaacagcccttccgtccacactcccatccaaggagggttcttccttcctgtggggtcactcttgccattgcctggagggggaccagagcatgtgaccagagcatgtgcccagcccctccaccaccaggggcactgccgtcatggcaggggacacagttgtccttgtgtctgaaccatgtcccagcacgggaattctagacatacgtggtctgcggacagggcagcgcccccagcccatgacaagggagtcttgttttctggcttggtttggggacctgcaaatgggaggcctgaggccctcttcaggctttggcagccacagatacttctgaacccttcacagagagcaggcaggggcttcggtgccgcgtgggcagtacgcaggtcccaccgacactcacctgggagcacggcgcctggctcttaccagcgtctggcctagaggaagcctttgagcgacctttgggcaggtttctgcttcttctgttttgccccatggtcaagtccctgttccccaggcaggtttcagctgattggcagcaggctccctgagtgatgagcttgaacctgtggtgtttctgggcagaagcttatcttttttgagagtgtccgaagatgaaggcatggcgatgcccgtcctctggcttgggttaattcttcggtgacactggcattgctgggtggtgatgcccgtcctctggcttgggttaattcttcggtgacactggcgttgctgggtggcaatgcccatcctctgccttgggttaattcttcggtgacactggcgttgctgggtggcgatgcccgtcctctggcttgggttaattcttggatgacgtcggcgttgctgggagaatgtgccgttcctgccctgcctccacccacctcgggagcagaagcccggcctggacacccctcggcctggacacccctcgaaggagagggcgcttccttgagtaggtgggctccccttgcccttccctccctatcactccatactggggtgggctggaggaggccacaggccagctattgtaaaagctttttattttagtaaaatatacagaagtt

SEQ ID NO: 7564 - DNA, 3980 bp, Homo sapiens
gcacggcaggccaggctgagcccgcccgccctcgccccctgcttgtgcggcgatgatctgttttgtgcgtctcttctctcccttttccccaggaatgaaccgaggccgtcgcccctgcacacgcacacgcacacagcctggttttgtcctcatgcacacgaagcagcccctgctcccatctgtccctgaggaagccccacttctctgtaggagcccggactctctcaggcatgccccattcacagctgaagtgggtgctgcaacgtcttgaacaaggcagaagttggtgagaggatctgtgtgtgcgtgtctacatgtgtgtgtctacgtgtgtgcgtgcgtggctgggggaggccttttctttgaggacgtacctcatttccttctttcttctggctttggaaaaatctcatgatgaaaattcatatttgccaactttgttagctgcgtgcgtgctttggggttggtgcaacctcagtacacgcatttgtctttgtttgcaaacctttctcagagcgacatatctttatattgatgtaataaatgtcttttagtggtttgtcaaaggccgggggcgggggctctctacagagaatttttattttgtaatagaagtgaactgtctctgaagggtgaaggcaggccgtcctgggatggtaccctgtgctctcccgtggaggagaggggatggctgaggacactggcccttaccccagggccagacagcatccatccctgctgtttgcatctgagagcagcatggggcctgggaggtcggcctgtgtgcccagctcagctagctctgccccaggacggccctgccctcgaccttcccacctcctcagatcctgcaaggctggggtctgcccctcccttctcacctctggagctgtgctgcactgcttcagcccagagggccctgagagaggagcgtgccacccacagcccgggaagccgggccccagcacccctctcctttggcctccggcagtgcagaccagaggggaccttttaaggaaagaagccgtgtttcgatgaagacctggccacatggggccactgggacttcaacccagcccatcggtgggaaggtcctttttgggggactttgacagccatatccctcccagcacaccaggcgccaggtgagctggttcagacccctccaggggtactccagagacctcacgtgtggagccaggcctggccagggcaggggcctgaaacccactcctccatctcatggggctcacggcctacagcagcccacaagctgccactggccggcgacactgacacctgagcagtgtccagaacctttttgcctttttttgttccccgtgaaaagcaacatggacatttccttctagtccttccaaggaggggagagaagtgtatgtgcatttgtgtgtgtgtgtgtgtgttgtgtgtgtgtgtgcgctaagtgagaaagagagcaggctcgggaggccctgcccagggtaggaggagcttcctgctttgcaccatctggtggtcgcacgccctgagggcaccccgactctgtctccaggagtctcatcagcaaaccgctgacaagtctttctagaaattctactgcactgcctggctcagctgcagctgcagacatttctgcaggaggagcaggtgtttctgtcttctgttccttctagggccacctgtccccttaaacacaggtccacgttgtgtcaagaacctagtgcatctgtgtgtgtctgtcagtgtctctgtgtcagtgttctcgtgggtgtctgcacggtacccggccgccgttctgcaatgcatcactcccgcagaggggggtgcagatcaggcgccgtgctgcgcgttgttgttcaacagtggctttttcttagataatcgtgcttcctcagcgcccgtcgggttgtggcatccttggatctgcagggatcttctccgtttgcatgttcctcggggtggcgtgttccttgctccctgggtccgacatgtgttcccgcacctgcatggactgccccggttctgtgttgtgtgccgagtgccgcccagtgttctgtgaccacccgtgtagctactgaaaatggctgggtaagcaagtcaagggtgttggaggaggtcaagagagagctcagtttccctctccccctccccaaacacaccaagaagcatttttaacgtgtaggttgagaacaagcctaaaggattcccacagctgggagccagcaagagagcttggagtcgcctctctagaccagatctagccccaccctcactccagccatctcggagcccttgtgtaggcaacgcccggtgcgggctgtgtggggtgctcccctgccagcacctccggccagccccgcccctgccgatctactggaccgcagaccaccttctgcccccgtgggccaggtgggagctgtccgttcaggaccatgagccatcctctgccctgactagcgaggggcagagcacaccccagtgcttacgcctccacccctgcagcctcctggcccgctcaccttcctcacccctcctctgacccacccatggtgccagggccgaagctgacctttagctccctcctgccccttgctagggtctgagccaagcccctcgactccctcactgtgttgacacttggcactttgctggccccgagaaaggtcgatgacacagccgcaaatctaatccacgtagttcccatttactccttaatctgattgatgttccctcttgcactgaataatacatgcctctctcaggtaagccattttataaaacaagaagataaaaagcactgttgaggcagtgtttgcttttgccgagctggtgtccgacagctccctgggtgtccggggtgggagagctgttgacagaagctctccgggccctcaggggcttagatcccacttgagtcgtaagccttcttgcttttgataacacagtattatttctcttactgtagaagaaaaagtttattaccaaacaagagtatttttatgaaagaaaaggacaaacctataaattaactcaacctatatctcccttgaaaatactttcaggctccaccaaaacgtagaactgaaagcatgtattttggaagaaagagatacattttgtatgctttcttttccttttgtagattcccagtttattttctaagactgcaaagatcactttgtcaccagccctgggacctgagaccaagggggtgtcttgtgggcagtgagggggtgaggagaggctggcatgaggttcagtcattccagtgagctccaaagaggggccacctgttctcaaaagcatgttggggaccaggaggtaaaactggccatttatggtgaacctgtgtcttggagctgacttactaagtggaatgagccgaggatttgaatatcagttctaaccttgatagaagaaccttgggttacatgtggttcacattaagaggatagaatcctttggaatcttatggcaaccaaatgtggcttgacgaagtcgtggtttcatctcttaaacacagtgtgtaaatttattcaactaacgatgggaaatgtattacttctgtacacagtggactgaagtgcaatttgttgaaagggaacaagtcattgaagagaaaaaaaaagcccaatacttagagtcccaattttgtctcatttgccaaaaaaaaaaaaaaaaaaaaagcaaaccccctatggttgatattgttataatgtatatactgtataatatgaaagagaatcgatgtatctcactttttcattatttgctaaccaaagctgtacatttttcatatgatctgcagccttttgggtatcaaatgggtcaaaaccatgggacctgccacctcccatcagcaattctggaaatgcactatttctactggtattcttgctttttttttttttttcattttcttgctgaaatgacatgaattgttgagtttatttttacacagtaaagagtggagaaagact

SEQ ID NO: 7565 - DNA, 176 bp, Homo sapiens
ccagggatgccgggaacactgtcgaagaacggaaggcagaggacagaggctggacgtgggcccagaggcccacagggacgcccacctgccccccacagaggctggtggttgagatgcccacggctaagcacctgtggctgcattttaacagtaaaggaggccgttgttttcagcgc

SEQ ID NO: 7566 - DNA, 649 bp, Homo sapiens
cccgatggcctggccctggagtcttcagcttcagctgctgtctggggcggtctgtgcttcctgagcagcctcaaccgtagctgctacagtctccaggcagcttgacttgagaggacgaccctagggctacctcagtttcccccatctcctctgccagaggctctggctatttggacttgaatccctacgagggatggcaggtggcagggcttcagaaatgtcgatctcagggctctcagggggcagtccctgcctgtcttgctctcagacatgaggtttcttgtatgaatgcggaagcgactaccaggttccttatttcattttgatctcagctccctccttccccaggaggtcatgagcagcaacaagccactgctcccccgtcccatcggggtgggctaggtgctgaggctgggtttggtgcatgtgggttgagggtgtcttgtccgggctgccttgtgctgtctggcctgaggccatttcaagtctcagatccctacgtgatccttccctggctctcacctgctcctttaggctgtaattgcttcctacacacgaagcctctgattggagcctctggtccatctcagaaaaaccttccaagagcgctggggtttatgctttctgaataaacactactgtttacatg

SEQ ID NO: 7567 - DNA, 557 bp, Homo sapiens
cacctgctggccatgagggccacgccagccactgccctcctcggccagcagcaggtctgtctcagccgcatcccagccaaactctggaggtcacactcgcctctccccagggtttcatgtctgaggccctcaccaagtgtgagtgacagtataaaagattcactgtggcatcgtttccagaatgttcttgctgtcgttctgttgcagctcttagtctgaggtcctctgacctctagactctgagctcactccagcctgtgaggagaaacggcctccgctgcgagctggctggtgcactcccaggctcaggctggggagctgctgcgtctgtggtcaggcctcctgctcctgccagggagcacgcgtggtcttcgggttgagctcggccgtgcgtggaggtgcgcatggctgctcatggtcccaacacaggctactgtgagagccagcatccaaccccacgcttgcagtgactcagaatgataattattatgactgtttatcgatgcttcccacagtgtggtagaaagtcttgaataaacacttttgccttcacccag

SEQ ID NO: 7568 - DNA, 342 bp, Homo sapiens
aacacctgcggcattgtcacttggcttgtgattaccatttcgtctttaaagcaggtttgttaacagttttaacactcggagtatttaaagccagccaggtgtgggcgtgcctgcacccagatgtggaggtttattttaaggctgtgccccaaggggacccagtttgggggtggctgtgcccgccctggtcctagcatagccctggcccagagcactgctcccacaccctcgggcctcggagctcggctgtgttcatctacagggatctgtcacctgtccctccaggaaagctccttacgcctttgctctcctgagaataaaacttgctctgaatcctcctcc

SEQ ID NO: 7569 - DNA, 1746 bp, Homo sapiens
gctgggctccgtgagagtgtgcgggtggctgggggcagcaagggagcagcaaggcctcaaacccgggcggcggcctggcctgcgcgccaggatgtgcggtgtgagtttcccgagctgcaggaacaaggtccacagactggggagcttcacacaacagaaactgcctcgcagttcccgaggccagagcccatcggggtggctccctgaggccgtgagcccggactgtcctgggccgccccctcttccacaggctgagatcatccttggcgtctgttggcctgcggccgcctcgcccaacctctgccctcatgtccacacgggtcctccctgtgtgcatgttggtgtctggatctgccctttctactgtggggcaactgtcgtcgaggatagggcccaccacacaacacggcctcatcgtaactaagtatagtcagcagtgatcctatttcccaataaggtcccattctgaggtcctggacttcaacatgtgaattttgggggccacaactctaccctggcatgcagagagagaaggggggcgtggagtccccctggggggaagtcccttgggaagtcacaggcccccttggtggggcaattgggacgtgggtgtgagggtcctgggtacagggagcctgcctaccaaggctctgccgacagctatttctaaattcctcgtggaaaataccctgtggccctcctcatctggagcgagcgacgggctggagggtgtctgagccaggctggtgccggggagcagatgtgggtggcccaacccagccccttgttcttgttccccacctcccaggaaagggggagggtgggcggagccggccctcctgggctctctccttgggtcccggagccacctggggaggggaggctcaaccccctaccttggccagctggctgcaggtctctcagggctggcacagaacagctgggctttgccaggtgtcccccatcctgatgcacggcccggtggtgcggtctccaggcctcccaggattctcagctgcgccgtctccccagtccccaaaccccagtggtggccgccaggggactggaccgtcagtctgtggagctggggctgcagctggtggtgtttccaacaagggtcttttggctgcctggctccagggagaggcctctggaggcaaggggtaacctaccgggaaagcctcaaaggcacccccatccccgccccgcacagactccaccggccccccatggttcctccaggccctcttcagtcatgacaggcagtgcctgggtgcccggcctgctcagcacaccctgggcctcagccccacccaagccttggcctagcatgggagccaccacgggaacacacacacgggctggagggtgtctgagccaggctggtgccggggagcagatgcgtcagatggaggagaaaagccctggggcagcggcttctggagctctggccaaggatgggctctgagcacacccctgcccggcccagagcaccaggccggggcagggtcaggaacagcttgaagccccctgcaaagtctgtccctcctcctggagcctcagctgcccctccaacacagccctctgtgggagcctagatggcccccgtgtggccatgagacatgggcgggcgctggtggattcctctgtgtcaggtgacatggtggcaccccggccgcaggctgtgccccggctgtggcgttaagaagggctatggatctaaataaaatccagtctctttgctgg

SEQ ID NO: 7570 - DNA, 2377 bp, Homo sapiens
ctgccatctcttcctcctcatcgtgtttttcacctcttaagtcaactttagattctcggactcagagttctctcctgacggtggcagggtcctcagatcaccggtgcagacagggccagacagggccaatgtggggacccactcagcctgtggcctctgcaggagggaggtcggaggcctcagcagccaccccggccacctcctgaaacagtgaatgtccttcattttcagctggcaagctctgatcttacaacgaggtatggaactgttcagaaaactttcagcagacgttcgagggaaaacagctcagcttcccatgccccccacctctgccaggagcgaccccatatcccccaaacagaattctggtagcccgggaccacagggtcttcctgtgcctcccctgccagctctgcatgactttgtcacgtacttgagtgctggctgagatgatgctaccgctaccaaacaggtgggaggccagccccagccccagccccagccccaccggggccggagctcccggtgaagaagcgtctgcctggttcgcaggtgtccaggacacaccagtcgcctgactcccggtcaggcaaacgcacacatcaagttcttgcaagccagggctctgctggcatcttcaagaggagggagggtcctggccctgaccacagggctcccttaacaggaggagttacaaactcggcttcctggggggcatcgtggggtgtgctgcctgccaggagaccccactcctggtcacggggttccgtcccacacagtggcaggagccatgcatgattcttggctgaagaagaacccgcacagctatgtggtctgccgcccagcagggaagcccccacatcagccctaagggaacttcccaaagctcagcaggtgcctcttcctgccatccgctaggtcttctcttggcccctctcccaagccttgacccatagctgacacttctagaaaagtctttaccgagaaacggaccggctgcatgggtggtgaggagggcagttgcccagggcctggcatcagaggggcctgtggctaaggctgtcctgaaattcttaatcattttacctctgaacttgcgggtttttgttgttgttttttgaggcagagtcttgctctgtcacccaggctggagtgcagtggtgcgatcttggcttactgcaacttccgactcccaggttcaagcgattctcctgcctcagcctcccgagtagctgggactacagaagtgcaccaccacacccggttaatttttgtatttttagtagagacggggtttcaccatgttggccaggctgatctcaaactcctgatacacccgcctcggcctctcaaagcactgggattacaggtgtgagccaccgcgcccggcccttttcctgcctcctaaacaagtggccaggaattctcctcctgcaccgggtccccagattgtgtggcaagccctgcagatggcacaggggactggttcttcctcgtggaaagccaggcccggacacctctcgggcatcgcctgttggggtgaccctcccacacccagcctggaaccctagccagctcagcctccgtccgctgagaaatcaaggtgaccttgtggctcagccctcagggggcactcaccacacaagagttccctttcaagaccccctgttcggggctggggcccccaggaacggttggggcaccttcctggggccctgtttttccccaggagcggggcctgggagctgagggcgtctcatctccccacaggcatctgctgctgctcctggctgccactcacccctgtgagatgctgagggcaggatacctgtctgtgcggggcgtgggaaaaagggagaaagcctggcagagggttgggggctaagaagcaaagggcgtggaagggccaccgtgcacttttgaagtctctacttgccagtggccaccccacctctccctgccctcatccaaggacggacaggcctggcaggtggaccggagctgtggggcagaagcatcccaggcctggcctcagaggagggaggccatggtgaaagtggaggctgtctgcatccacctccccagcctttgtcaccgggacctcagcctgaccccaggcccaccccaggctgctcaccgaggtgggtaccctgcccaccgccagctcagatgcggtgtgtggactcccttctctctgggggtgagcgggagttccctcccctccacatcaggagctgggggagagctggagggccctgggatccccttgaccctggtcatcagccccagccctgacaggccctgcgtgtgccatgtgtggcctgggtttggagctcagcaccctgcgggaattctattaaatctccgattttatctg

SEQ ID NO: 7571 - DNA, 717 bp, Homo sapiens
acggactcagcagatgcgtagcatttgctgcatgggttaattgagaatagaaatttgcccctggcaaatgcacacacctcatgctagcctcacgaaactggaataagccttcgaaaagaaattgtccttgaagcttgtatctgatatcagcactggattgtagaacttgttgctgattttgaccttgtattgaagttaactgttccccttggtatttgtttaataccctgtacatatctttgagttcaacctttagtacgtgtggcttggtcacttcgtggctaaggtaagaacgtgcttgtggaagacaagtctgtggcttggtgagtctgtgtggccagcagcctctgatctgtgcagggtattaacgtgtcagggctgagtgttctgggatttctctagaggctggcaagaaccagttgttttgtcttgcgggtctgtcagggttggaaagtccaagccgtaggacccagtttcctttcttagctgatgtctttggccagaacaccgtgggctgttacttgctttgagttggaagcggtttgcatttacgcctgtaaatgtattcattcttaatttatgtaaggttttttttgtacgcaattctcgattctttgaagagatgacaacaaattttggttttctactgttatgtgagaacattaggccccagcaacacgtcattgtgtaaggaaaaataaaagtgctgccgtaacc

SEQ ID NO: 7572 - DNA, 932 bp, Homo sapiens
ccaggcgggcctgcccctgggctctggccacgcttccagcctctgtcacagcccccccaggcctcatgggttagagggaaaccgagctggcctggccagagccgtcagggaaggtaggacctggccacgtaggagcagaacgctcatgaaagtgcttggaggccgtggagcacaaagcagattctgattgggagcaaccgaggcgggctctgaacctggccggtccagcttcgcgtcctctgctggtgtctctccttctctgaccgcggccgcagcccctgcactcgccttcctcactgctgggcagccttcccaccaccgcagcagcccctgaggccaggaggcagtgcagggcattctggacccggagggccagagaaacaggatttctggggtttggacttggggtgagtttgtaactgttgctgccacaccaccaggagcaccggctgcccctctgggtggcactaccaggtgccccacggtacccttgtcacactgttcacacctgcccggctgcccactctgggaccccgaggtaggagggtgctccctgagaccaaagcacaaaacagcatgcagggagctcctgcaagtgcccgtggtctcgtgccacaccaaggaagggccagcgggtggcctgtggccggaatgctcaacaactaggtgcctccggccggggcagtacccagcactgtgcactattttcagggccactcagggtggcgctgtggccgggggggggccctgagccccagcccccagcctcctccctcagcctgggctacggcccacctcctggtgctggtgttttcatctggggagggtgctcgcgccgctcccgctgcaggcactgtccgcgatgagtgcgggtaggagccgtgaggtgcttctctgctgtgacaaacgaccctgtctgtccgtgaaccttc

SEQ ID NO: 7573 - DNA, 2370 bp, Homo sapiens
ggcgcctgccctctgctggctaggaccgggcccagcccagcccttcctgaagccagaagcgttgctgagtgtgttccctgtaactgccccatagtgggcagccctggaggaacaaggggctggctgtcctgggctccctgacccactgaagcttctcagcacgttcctccctggagagcgggcgccacggctggtattctgcaggctgaatgcagtctccagactggaaacgcagagcggctcctcacgcctaatcctgttgacaagtcccccgccgtgttggaaagacctctcgcctctacgtggcacctggaattggggcgcacagggaggggccgatgctgccaccacccagccttctctttattttcagtgctttttgtttggcctccctgcccccatgtttttctggctgggagctcctggttacccccttgtctgactgcttggtggcaggcaccctgcctgtgagggccactttcctcttctagtagctgttgtctggtggggacgcagtggccctggacacggctcccctctgcaggtctgcaggtcggtttgctgcctgccctcctcctctcacccgatgtccaggtgggattttaaagtctgcattggttataataacagttatcagtaattcctgcccagaagacttttatttatttttttttaagataaaaactgcacaaaaggggagtgagagagactagtttccacatccttccctcctttagtgaagcccccgaggttgtgtccagggtgatgagtgtggacgggggcaccagtcagttctcccttgaagtaaacctcagtgcctgagacttttctaccaagccacacagctgcagcaactgcagatactgcgggctgagcaggagcagtggtggcgcctgccctgaggctgccctgcgatggcctgggtgggagagctgggtcaccggtgccgatgctctggccctccccaatacgctgcttcgtcccactgcaccgcctggctgagggcgttaggggctgtgcctcttgtgagggccatttgggacctccctggggcactgcacaattgatagtgtaccaatagagggagactgggcgatctggaacagcacgtggtggggtcctgcttgtgtgctctgcgttcctctgtggcgtggccaggccggggcctggctcttacccggggagtggtgggcatctcgatgcttctttgccttaatgatggccacatctgggctgctctgcacccacgggagaggctggcccagctgcagactgcttagggacttctgtgtccatcctggggggtaagcccacgtgacccacattcttggcactatgaacagagaacatttgcctgttggcttctgaagtggtcagggccatggctgacacctccaggtccgcctggcatgggacaccaagtggaaggcccaagcagctcatctgctcttgggaccaggggccagttgggttgggtctggtcacggcagagcttttgtggagggtcaggaagggtggagaggagctgggttgaagcggactgctgcggatgcaactcccagcttgcccaccgcgggctgtctgctctccctcctagcagctgtcacactgaagttttgtcctctgctgtctcctctggtcctgagatgagctgtgagcctaggtggccaaggcttcctgcattgcttccctgtgagtccaaggccttcccccaccactgggcagaggctggacagcacggacttctagagagagccgcgttgccagttcctctcccactcgctcgtccttatccaccacgctattatagtttccgttgtcctccaccagcatttcccttactctgaagttccggcattcacatcattcatgttttcttttgtcttttagctaaaggaaaagcattggcgatttgtctgattctggttttgagttactctttgttcagtaatgcactttattttattgtccaaagagagtcagagctaagcatacaggcttgggggtgagccctgctgtgagagttcaggccctgggaggctcagccacctcctcttgtgggaaggaggtctcagccccacctcgcatcttcacctgcccttggtgtggacacaccctctcatgctaccagcaccataatccagtgggggtgactgggtgcacacctgcccaggtgaacacagcggctgccagtctcctggtcccgagaggaggtggggcctggccctggctccctccaaccagctgctcctgggacacaggtgctcctgcttcggctctgtttcggctcacaggtgtgcatcactgggcttggatttgcattacattgaccccagccctgcagtggaacctaataaaagcgcctgaagc

SEQ ID NO: 7574 - DNA, 615 bp, Homo sapiens
cacgaggccctgctgaagtccagaccctccccctcctgcccactgtgctctaaaccctgctcaggattcctgttgaggagatgcctccctagcccagatggcacctggacaccaggatgggactgcaacctcaggtctccccctacatattaataccagtcaccaggagcccaccacctccctctaggatgccccctcaggggctggccaggccctgctcaacatctggagatacaggcccacccctcagtcctgcccacagagaggcttggtcggtctccactcccagggagaacgggaagtggaccccagcccgggagcctgctggaccccagatcgtcccctcctcccagctggaaagctagggcaggtctccccagagtgcttctgcaccccagccccctgtcctgcctgtaaggggatacagagaagctccccgtctctgcatcccttcccaggggggtgcccttagtttggacatgctgggtagcaggactccagggcgtgcacggtgagcagatgaggccccaagctcatcacaccagggggccatccttctcaatacagcctgcccttgcagtccctatttcaaaataaaattagtgtgtccttgcc

SEQ ID NO: 7575 - DNA, 237 bp, Homo sapiens
gccagctttgcccgcccgcccccgcgcccagggccgcctccctggagaagccgcgcgtcgcccatgggccagcacgtgccccacccgtgggccaggggcggccggacccgtccctccacgaccccgccacccctcctaggcctggctttgtccccaggtgaattttttactgtgacactttttactttttcaataaacgtgactcccaggtgagggggcctgggtctacacacgtgg

SEQ ID NO: 7576 - DNA, 854 bp, Homo sapiens
tacgcaaagccagacccgggcgctgccgagacccctcgggggctgcacacccagcagcagcgcacgcctccgaagcctgcggcctcgcttgaaggagggcgtcgccggaaacccagggaacctctctgaagtgacacctcacccctacacaccgtccgttcacccccgtctcttccttctgcttttcggtttttggaaagggatccatctccaggcagcccaccctggtggggcttgtttcctgaaaccatgatgtactttttcatacatgagtctgtccagagtgcttgctaccgtgttcggagtctcgctgcctccctcccgcgggaggtttctcctctttttgaaaattccgtctgtgggatttttagacatttttcgacatcagggtatttgttccaccttggccaggcctcctcggagaagcttgtcccccgtgtgggagggacggagccggactggacatggtcactcagtaccgcctgcagtgtcgccatgactgatcatggctcttgcatttttgggtaaatggagacttccggatcctgtcagggtgtcccccatgcctggaagaggagctggtggctgccagccctggggcccggcacaggcctgggccttccccttccctcaagccagggctcctcctcctgtcgtgggctcattgtgaccactggcctctctacagcacggcctgtggcctgttcaaggcagaaccacgacccttgactcccgggtggggaggtggccaaggatgctggagctgaatcagacgctgacagttcttcaggcatttctatttcacaatcgaattgaacacattggccaaataaagttgaaattttaccacctgt

SEQ ID NO: 7577 - DNA, 1154 bp, Homo sapiens
gcccagccagaggcgggcagggcagactgacggacggacgacggacaggcggatgtgtcccccccagcccctcccctccccataccaaagtgctgacaggccctccgtgcccctcccaccctggtccgcctccctggcctggctcaaccgagtgcctccgacccccctcctcagccctcccccacccacaggcccagcctcctcggtctcctgtctcgttgctgcttctgcctgtgctgtgggggagagaggccgcagccaggcctctgctgccctttctgtgccccccaggttctatctccccgtcacacccgaggcctggcttcaggagggagcggagcagccattctccaggccccgtggttgcccctggacgtgtgcgtctgctgctccggggtggagctggggtgtgggatgcacggcctcgtgggggccgggccgtcctccagccccgctgctccctggccagcccccttgtcgctgtcggtcccgtctaaccatgatgccttaacatgtggagtgtaccgtggggcctcactagcctctaactccctgtgtctgcatgagcatgtggcctccccgtcccttccccggtggcgaacccagtgacccagggacacgtggggtgtgctgctgctgctccccagcccaccagtgcctggccagcctgcccccttccctggacagggctgtggagatggctccggcggcttggggaaagccaaattgccaaaactcaagtcacctcagtaccatccaggaggctgggtattgtcctgcctctgccttttctgtctcagcgggcagtgcccagagcccacgcccccccaagagccctcgatggacagcctcacccaccccacctgggcccagccaggagccccgcctggccatcagtatttattgcctccgtccgtgccgtccctgggccactggcctggcgcctgttcccccaggctctcagtgccaccacccccggcaggccttccctgacccagccaggaacaaacaagggaccaagtgcacacattgctgagagccgtctcctgtgcctcccccgccccatccccggtcttcgtgttgtgtctgccaggctcaggcagaggcgcctgtccctgcttcttttctgaccgggaaataaatgcccctgaagg

SEQ ID NO: 7578 - DNA, 286 bp, Homo sapiens
acagaccagcaaatccgcgtgcggaacaggacccaggcgtctcctcttgctccctggttggggggcggtggctggggctgtgcggccaatgatggatttgtttcttttatgttttaaaataggatttaaaaactcatgtaaaggttttttttttttctttttttttttttttaattctgaaacagacctgttttgtaccgagttatttttgggataaattttactggttgctgttgtggagaaggtggcgtttccaccttttccataataaaatagaaatgtgtgt

SEQ ID NO: 7579 - DNA, 617 bp, Homo sapiens
cctggcagaggccctggccggccctccccctgctctgcttctgcgccttctgcgtttggacataggactctgcagggctgccctctctaactggcctggctctggaagggctggtgaggactctgcctccttgcctgcctacaaggtgcctggtttgcagcaggctctccgctctttccagcaaagctgctcagagagggtgtccagcacagtggagaggccggaagtgagacgggcagacggcacctgcagcctgaaacgcaccgctcctgcgtgcgcccccacctggtccccggatgcccccaccacctggacagaggccacactgactgcccacccagctgtggcgggaggtgcagagcagagggctttagggagcagtgactgcggtcacccctttagttctctgggtgtagaccacaccacctcccactgggcaccccccaacacggtgtcctgccacccagcgcctggctccaggaaaacacgcttgccttccttcccggcagcttcgccactctccttatggactctgttctgtttgtacatggctgacggaaatctctttggtacaaccgaataaagcctggtggcagtgctgcgcggggctcccagcc

SEQ ID NO: 7580 - DNA, 477 bp, Homo sapiens
tcacgtgctcgatgaagaacagttggcactttgcagatggccagtgtcacggtgaaggctgggttgcccccacgggtctagggagaacgaactctttggggatgacattttcaccgtgacatttttagccatttgtccttgaggaagccccttgcactgctgcggttgtaccctgatacggcctggccatcgaggacacctgcccatccggcctctgtgtcaagaggtggcagccgcacctttctgtgagaacggaactcgggttatttcagccccggcctgcagagtggaagcgcccagcggcctttcctcgctcaccaggccagtctcagggcctcaccgtatttctactactacttaatgaaaaagtgtgaactttatagaatcctctctgtactggatgtgcggcagaggggtggctccgagcctcggctctatgcagacctttttatttctattaaacgtttctgcactggc

SEQ ID NO: 7581 - DNA, 4334 bp, Homo sapiens
ggacgcgcgtctgcccaggcgggtctttgcggggccactaggcacatggcgaatttggctgccctgtccctctgtttccttctcttctctttcctccctctcttccccacccttctctcttccctgcaaagcacaacctgtaccccaggggcgccgggctgagcccctttgatctcgtcattgtcgtcgtgtgttttgtatgttgggattggtcagttcggcggtgacgtggggtcgccccaaccccttttgtaccagggccatgcaggcttggagtccagagttggtgctgtgggaacggactagagagagttgcgggagagagaaggagcaggcacgctgggcctcgcgtgtccccgagcagtgagggtcccagtgttccctccactcccgagtggccacaggctcgcgggctgggaaggattcactctctttagccccaggggagcagctcagcttagcccagcatgaagagatgggctctgctctgagagtagggcgggcttgaaggccctgatgggtggaccaccagcctgggcgcagtggtgctgggggcgtgcagctgggcccaggggctgtgcactcaggcctgacccgttgcactgaacaagaccaaatcgctggttgtgcgcttaacgtgagggtgggtccagtgtgccctgcgatgggtcccgtgtcactgtttacatgacctatttgtgtggttatatagccctttatttaaaagagagaagttccttttacaaagttattaaattaattatatgtttaaaagttaaagaaaaaagagctgcagagtatttataaaactgtcttttagaaaaaaaacaagcaagaagaccatttgaccatatgaatggaaaagggaagaaagtataatagaaactttgctagttaaaaaaaaaagaaaaaaaaagaaaaaaaatccctttcttgtaaacttacggacacctctttgtggctgttggagtttagtttttatatacacagagttatcagacattatttataaaacttagtttaaaaaaaagacaaaaaaaaaaaagccaagccgtgagccgaccagaaggccgtcctctttgatatcttttgcaattgtaccgaaagtgacttactcctctgcccttcctgcttccgtctcttgccggtgccgtggtgtcgtccgtgcctggtgaggttttgtgcagcggtaaagtgctggtgcttctggtgacctttgacctgtgggtgtcacttcttgtgtctgttttcccgtgttcgttttttgggtttagttgtgcttttgcttctgctggcttgctggacctgggctggggtgccaagtggcgcctgctgcgtcagagctcaaggaatctgtgcccaccaccagctcctggtccgtaggaggtgagacatggggttctgtcatgcccccctccactgagccttggctacatctgtgtctagggcttgggctgatctagtggcggggtaggtgaaactggggtcccttggggcgccccacgctgcttccacacccaccacctctggccttgggtggtggcattacagggatgagggagtcactgtgggtggccacagggctatggccaagcgttccctggccgtcttcctctggcctcagctttgttcctataggctgcccgcgccgtgggctgcaggtctcgccgcccgcttgatccctgaggtgtttccatgctgcgggtggtgcttccaggcagagtgggtgggggcccaccgggcaccgccctttcttccttgtccctgcctcactctgagagccttgggggtctccaccagtgcagacaagggctacagtctccagggccgggtcttgtccctcttctccgctggtccacgctggcagctcttggcttcgggcctgccttctgcctccctttgggatctgtgtcttccagggatcagctgcttggcttctgctggaggtgcctccctgtgggggcgcagcctgcctcctgctctcagttcctcgccagaggctgctgcccttcctggctgggctcaggaggctccttgtaggcatatgatggggagggggtgcccctacccacctccaagaggctacagccctgtgtctggccatgtgagccctggcctttcaccgggttgctggtttcttttctgtggggcccagacttctgtaaagcacacagatgtgggtaagatgaaaaactgtggcccaacagggcttaaccctatggatggtgggatttttatccaatagtttggcctggtgtgcccacaggatgggaacagggaggcaccatcaacacttgtcatgttaatgagcttttctttgctcgaggtgttcagagacaagtcctgtgtctacctgcgtcagcctgaaaatggaaatattggctgttgactcttgtcatttagtgacttcatccccctcccctcagtctgatcttgtctaagtagaatccaggcgttagttggaatcatatcataagtatccatgaagaaaacgtcatgatctgcctcggagtggggagaaacaggccctccttgtccttgtgcagcccccacttttgtcctggctgtgggtggccatccattttgagcacctctgccaggctgcagacctggaggcgaagggagtgtggaagaggagggtgtaagggtcgacgcgtgctgaatgggaggtgcaggtcctcggtgcgttggcagaagaggcttctggagtttcgaggccatacctcctttcaagagctttggatttggggcgacttccctgggtctaggggagtgttcctgtcccctgtcaggtcagccctgcggagccactccacccctcttccccttcccctggatttcctgacatagatggtgtgttcatgtgcaggtgtgagtgtgctgtccttctgatctctgttgatcccgctttcctactgagagggtggtggagagggtggtggtctcttctcacctcagtttttctgacacagcgaatcgagggctttggccaaggccaggtctctcaaacttgtccgccaagtaaaccatgatatatgtcttcccttccaccttaactttgccccaactcctcttttatcctaacatggacgctcagatttcagaggaatacccagcagggacaggtcagctctcaccaggagagtgaggcccctggctgctgctcggggtggcactggtgttgctggctcagctcttggtgcatgtttcagatatgtgtgtacacttctgactggtgatcagggcccggcccacggccctgagcggctgcagcctgctttgggacgatggtcaggtcccatgttgtccctgctgcctccctctggagtggccacttggccaaagcgcccatccacatctggaaagtcggagccgcagcctgctgcaccgtttccgctctgggatcttgtgagttacttttttaggctgtggtttggtgaaaggaaccaacacattaacgatttttcccccagaagccactgaataattctttttggtgtatttttgccttcctgttggctgtctggccttggagcaggtcgggagagtagagtacataatcagtgccacacagaggcagggcgtgtctgagagactaatgcctgtcctgcctctggcctgtgtcctgggtgtgtaccatacctgctgggccagtcccacacatttccaccctgcccctggagcagcagctttgataccatgggtgtcccttgagtctgagctagagtgtgtccccgataaactgtgagacctccctgttcttggtgaccccagttgggctttggcccctccagcaaccttgtgtcccagccctgcccttcttcccaccccctcaatctgctagtccctgaagcctttaaccaaacgggagtgggcacagaaagccttctcctggcaacaggacaagggctgcccgcgtgtccagccctgttgctctcctggcgctgagaggtgggtccaagcagagttgatcagtccctgcctgccctgcctaggtctagccaggggaggttgtgtgtgtgggagaagaccccgggatctgctggggtgggatggaggttattaaagatctaagtgaggaggggctggggtttggatgcggggtgaggcccgagcgctcacacttcgtgtagggcgggcaggggcctgacctcttgcagggcagtggccttggtgccctacccctgccctgcgcagtatttattgctaaattattgtccaggaggggcagcactgggcctggccccccgggtatttattgctgtacatagtgtatgtttgtgatatataaggttttctttattttgtatatgatcaataaaccttttaaagag

SEQ ID NO: 7582 - DNA, 821 bp, Homo sapiens
cacgtcctgcctgaccaccatcctgccaccaccttctcttctcttgtcactagggggactagggggtccccaaagtggcccactttctgtggctctgatcagcgcaggggccagccagggacatagccagggaggggccacatcacttcccactggaaatctctgtggtctgcaagtgcttcccagcccagaacaggggtggattccccaacctcaacctcctttcttctctgctcccaaaccatgtcaggaccaccttcctctagagctcgggagcccggagggtcttcacccactcctactccagtatcagctggcacgggctccttcctgagagcaaaggtcaaggaccccctctgtgaaggctcagcagaggtgggatcccacgccccctcccggcccctccctgccctccattcagggagaaacctctccttcccgtgtgagaagggccagagggtccaggcatcccaagtccagcgtgaagggccacagcccctcttggctgccaagcacgcagatcccatggacatttggggaaagggctccttgggctgctggtgaacttctgtggccaccacctcctgctcctgacctccctgggagggtgctatcagttctgtcctggccctttcagttttataagttggtttccagcccccagtgtcctgacttctgtctgccacatgaggagggaggccctgcctgtgtgggagggtggttactgtgggtggaatagtggaggccttcaactgattagacaaggcccgcccacatcttggagggcatctgccttactgattaaaatgtcaatgtaatct

SEQ ID NO: 7583 - DNA, 449 bp, Homo sapiens
gcagactgtctggaggaggagccggcactgaggggcccagacacccgctgccccagtgccacctcaccccccaccagcaggccctcccgtctcttcgggacagggccccagccgtcccccctgtctgggtctgcccactgccctcctgccccggctttccctgcccctctcccacagcccagccagagacaagggacctgctgtcatccccatctgtggcctgggggtccttcctgacaacgagggggtagccagaagagaagcactggattcctcagtccaccagctcagacagcacccaccggccccacccatcaagcccttttatattattttataaagtgacttttttattactttaattttttaaaaaaaggaaaataagaatatatgatgaatgatattgttttgtaactttttaaaaatgattttaaagagacaaaaaagaa

SEQ ID NO: 7584 - DNA, 501 bp, Homo sapiens
ggatctcagccgtggctgaggccacccccagaggagcccctggtccacagaagcaggccttgtgtttccagcggcctctgataagaggcagggaaggacctgaaggatttggagttgattcaaacaagatctctgggagtctccagcctgtgcagaaggggcaggactgcagtgcactgcgggccttggagtgtccagtggggacactggtgtgggaaggggcagcacctggggagtccctgcctctcctccctgggacaatagtgtgcatgccacccggggtcctacaggcaggtgctgggaaaggcctggccagcaggtagcctgtgtgtttgacaaacagcagctggcagcgctgcctcctgcccacattcctgccacccgacatcaaagctggcgtgtgacctttccagccatgcgatattccccttggaagatgcttccccaggctataaatttgttctcacaaagcaacatcaataaatcaaaactgtctctccc

SEQ ID NO: 7585 - DNA, 78 bp, Homo sapiens
gctccctccacacacctcaagccccatgccgtgctcatcctacccccaatccctccaataaacctgattctgctgccc

SEQ ID NO: 7586 - DNA, 823 bp, Homo sapiens
caccaaccaccccgacccagggctgcctggctctgtcccaggcgcggggaaccagagccccctatgggctcagtgggctccctcaggtgccacggccacaccagtgagatgcaggcacctggcagaccctctggctagcctgcagccccccctctcccagcccctggtgggctgcggtgatgggtgttttgggagaacgaagacagccaggctgatggccagggccgcagtgcccctccccccgacccagccccaaggttgatcccacgggaacaggcttccaccccagcacttgcgcacctgggagggagctgccatccgggctccattacctgttgctgaaggcgggtgctaggctggctgggtgtcaaggagcaggctccaggccaaggtcctggcccagccacggccattgcaagggctcagcctggcaggctttgtgggggacgccgccctctctgccgcaggctgggtgcacggccgggcaccacagtgggactcaggcccgggaaggtcatgttctcgaccagagctttgctcccagtccaggcgcctcattcggaggcctcttgactgggaccacagagatgttttctccgctctgacttgtggctcaggactactttctgggtcgtgctcctgccccactgtgcctgggcccataaacaacaggagccttttgttccgctgacctgcccatcccagcagacccacctccccgcctggtgccttccatggagggaaatgggacaggggccgtcatctcccctctgcctcctgctttgctgttgccgagcacgagtaaagcttttgttcttacttc

SEQ ID NO: 7587 - DNA, 239 bp, Homo sapiens
aggcccacaacccccacccccaggactgctgctggagcctggacacgtcctacttaagaaaatgccttttactcagggaatctcctgctacttaatgtggaaagacacgcccatgtcccccttcggcccactctgggggcctggaaatgctgcagtggggagcaggccccaggctggacctgccctgtcctcagcacgcgtgtgcaaaagtgaacaataaatcatttcaaagatgcgag

SEQ ID NO: 7588 - DNA, 804 bp, Homo sapiens
gcccgtgcccccgcctgccaccggaggtcactccaccatccccaccccaccccaccccacccccgccatgcaacgggattgaagggtcctgccggtgggaccctgtccggcccagtgccactgccccccgaggctgctagatgtaggtgttaggcatgtcccacccacccgccgcctcccacggcacctcggggacaccagagctgccgacttggagactcctggtctgtgaagagccggtggtgcccgtgcccgcaggaactgggctgggcctcgtgcgcccgtggggtctgcgcttggtctttctgtgcttggatttgcatatttattgcattgctggtagagacccccaggcctgtccaccctgccaagactcctcaggcagcgtgtgggtcccgcactctgcccccatttccccgatgtcccctgcgggcgcgggcagccacccaagcctgctggctgcggccccctctcggccaggcattggctcagcccgctgagtggggggtcgtgggccagtccccgaggagctgggcccctgcacaggcacacagggcccggccacacccagcggccccccgcacagccacccgtggggtgctgcccttatgcccggcgccgggcaccaactccatgtttggtgtttgtctgtgtttgtttttcaagaaatgattcaaattgctgcttggattttgaaatttactgtaactgtcagtgtacacgtctggaccccgtttcatttttacaccaatttggtaaaaatgctgctctcagcctcccacaattaaaccgcatgtgatctcc

SEQ ID NO: 7589 - DNA, 212 bp, Homo sapiens
cttcctccccccaccccgccccactaaggggtgctcggggcctccgcatggtgcctgtgctttcacctacgtgttgtgggggggtgtgggcacagcgtgcagggtggaggcagggagctgcagggcaggctcccaaatgctgctgaggcgaccctgctgactgaaggcctccctgagcacagggcccattaaaaccaggttcctccctgggg

SEQ ID NO: 7590 - DNA, 466 bp, Homo sapiens
attcctggtcgggtggcttccagtggtcttcagtctgtcgtgcaccgatgagaactctccttattgctgtgaagggcagacaatgcatggctgatctactctgttaccaatggctttactagtgacacgtcccccggtctaggatcgaaatgttaacaccgggagctctccaggccactcacccagcgacgctcgtgggggaaacatactaaacggacagactccaagagctgccaccgctggggctgcactgcggccccccacgtgaactcggttgtaacggggctgggaagaaaagcagagagagaattgcagagaatcagactccttttccagggcctcagctccctccagtggtggccgccctgtactccctgacgattccactgtaactaccaatcttctacttggttaagacagttttgtatcattttgctaaaaattattggcttaaatctgtgtaaag

SEQ ID NO: 7591 - DNA, 451 bp, Homo sapiens
cccagtgggcccctgcacgtcccgcctgtggtccccccagcaccttccctgccccaccatgccccccaccctgccacacccctcaccctgctgtcctcccacggctgcagcagagtttgaagggcccagccgtgcccagctccaagcagacacacaggcagtggccaggccccacggtgcttctcagtggacaatgatgcctcctccgggaagccttccctgcccagcccacgccgccaccgggaggaagcctgactgtcctttggctgcatctcccgaccatggccaaggagggcttttctgtgggatgggcctgggcacgcggccctctcctgtcagtgccggcccacccaccagcaggcccccaacccccaggcagcccggcagaggacgggaggagaccagtcccccacccagccgtaccagaaataaaggcttctgtgcttccttt

SEQ ID NO: 7592 - DNA, 1136 bp, Homo sapiens
ccgcctgcaaggcagagaggacacaggagagccagccctgagtgccgaccttgggtggcggggcctgggtctctcgtcccacccggagggcacagacaccggcttgcttggcaggctgggcctctgtgtcacccactcctgggtgcgtgcagacccttcccctccaccccccaggtcttccaagctctgcttcctcagtttccaaaatggaaccacctcacctccgcagcacccgacttaccaggacgcatgcccctccctctgccctcatcaaacccacagacccggactccctttctgccaccccaggctggtccggccccaggtgtggggtccgctctctccactcccagggctccgcgcccaagtgagggggcccctgccggagcctcagacacactccagttcagggctgtggggggccttggccacatacctgtcccttggctatgagcaggctttgggggcccttccgcggcagccccgggggccgaggtagggtcgggggcttagaggctgggatggctcctggccccaccgccagggggcagcgcaggccgggctgggaggcggcggcggcggctcgggctggggggtcaggtggacgccgccctccggggctggacgcgcatccctcagtccctcggccacccgggggtcgctccctcgtgcccaccgcacctgccgagcctctttggacccagatctgttcatgcttttgtcttcgtcactgcggcggggccctttgatgtcttcatctgtatggggtggaaaaatcaccgggaatcccccttcagttctttgaaaaagttccatgactcgaatatctgaaatgaagaaaacaaaccgactcacaaacctccaagtagctccaaatgcaatttttaaaatggaaaacaaaaatctgaaagaaacgtctttagtggctttaagccccaaaacgtccctaaggcgtcctcgagatgaagacgggggggagcccccagccaggtggagaccccgcagggacgcggcggcgcccggtgaccgaggcctcgcacagccggccgccctgagggtcgggccggagccagggtccaagaggggcgcgtttgtgtctcgggttaaaataaggttccgtccgcgtgctgggtcag

SEQ ID NO: 7593 - DNA, 311 bp, Homo sapiens
gtcgcgtctccttcttcacctcggggtccgagaacctacaccgcgtggagaaggtccactggggcacccgttacgccatcaccatcgccttcagctgcaaccccgaccatggcatcgaggacccagcgttcccgtagccagcagccgggccaaggtaacttcaggagggcccgtgtggaggcagccgcgccagtcgtgcacccacccccacgtccacccgctcctgttgcacagagtgccttaggaattctctgattttgatttgctgacgtgttaatcttttcatctgtgagtaaatgaagggaaccagc

SEQ ID NO: 7594 - DNA, 1361 bp, Homo sapiens
cagccccactgtgcctgagcccgtgcaccgcccacaggacccatggcacattcccggtgtgcctgagcccgtgcaccgcccacaggacccgtggcacattcccggtgtgcctgagcccgtgcaccgcccacaggacccgtggcacattcccggtgtgcctgagcccgtgcaccgcccacaggacccgtggcacattcccggtgtgcctgagcccgtgcaccgcccacaggacccgtggccttggcttcagttggtgcctccagccgagttggcctattgcctgctcatgctgctgcttgcacactgcatgaaacagcaggccagaccaggacatccagactttctccatcgtgaggcctgggcctgcctttctgcagccggaggtctcgccagccctggactcctgctttgggccacagcaagacctcgggcgagtggagaggcggggccaggccgggcccttgtgggtgctgatgctgcatgttgtccccgacacagcgtcctctccctggtggacatccccagcggtcaggtgcttccccaagggcagtgaggggtgaacatccagggcctacctggctgtgcacgctgcagccacactgtggaagctgcccctccccgaggacccgcctcccttgctgatgccaggatctcggcgcatagaccactctgccccagcggtcgtcacagaaaggtctctctgttcctcacactcagcttcagcataagctgtgaggccagaaaaaaggtcagctcttctagtatcgtgcagtgcttaaaaaccgggagctccagccgggcgcagtggttcatgccagtaatcccagcactttcggaggccgaggtgggaggattgcttgaggccaggagttcaagaccagcctgggcaacacagcaagatcctgtctttgtaaaaaaactaaccaaacaggaaaaactgggagattttctgcagaaattgagttccagcctctctcgaacctgggaagacctggcaggagggggctgggctctcggctacagacttctccccaccccgtaggagctgaacgccaaccatcctgacccgccagtgctcttggtctcctgagtgtacccaggtcctcccaggtgcggtgtgcaccgagcgcgcctggcctgatgccctggcctgtgagctggggactcctgggccctgtgagcccctaggcggcaggcccaggaatggctgggtaggacagggaacacctttgccccacgtctggctgtgacctcggtgaaagccgacaggagagagatgggaccctcctcctcagtagtggctgccagtccctcgttgcaggacagggtcatcataaccataaataacccttcacgtgtca

SEQ ID NO: 7595 - DNA, 1357 bp, Homo sapiens
ctccagctgggggcgccacagcacccaccacctgccgccttcagactctcggggctggtgccagtgccccaggggcctcctgggccacgggctggaggggctgcccagggaccttggtctcgaagccatacgtggttgtctgctttcctaaggactcccatttccagtattaaagagagaatcatcatcaaggcaccgtaggtaactcagtggctgtgaccagctcgactggcggccactggctgttcccatgagttcagctgtgacgttagcttcagtggctccgccgcatcctcacactgacgggggctccatacggacctggggactgggctgagagggtggacgagttcaggtttgtttttgcagcagattccgtcgttcttactgagtctgcagcgggggagtgaacaagtgtgcagatgtaagttcttacatgataagcagattgaatacaacaccagcagcttgccttagaaaaggagaaaggaattccttttcccgcccgaacatgaagaaaaatgacctgaccctgtagagagaacacagtgtgaatgtttcccctcgtgtgagcccagcctgtggtcttctccgtacccgcaacgtggtcatctgtgcccgtgacgtcacctgtgcccgtgcgtggcgtccccgtctccgttggggccattagaatgaggcagacaccaggccactctagaagccgagccgtcacacctcaggcgtgtgcggggcggggacggggggtctcctggttacattttggattaaacctgtttcccggttatgtgtagggaacagcagagtgatgcacgaactttgaacattcgttatggggaaaacatcctttaacttcggggtcgtctgccagagcagggtctgggagggtccatgcagttcccgctggtgtggagggaaatgccctggtctggcctccgagcccccaggtccaccgtctcccctcccctcatttgtaagaatagctacacactaacattttgggaaggagaggcacataactttttttaacatttggtaactaggttatgggctctacattgtcagctacttgggatatatatttaattttcttaaattcccgttaaactctattttatggttttgatttcagattgcaaacatgtaaaacctgcatagcagcgagttctcggttttgccggtttctttagttctttactgtcactgtcatgtaatcagctaattctctgtggatgttgctgtaaagtatgcatgttcctttcatgtgtatttaatcatgatgtttaattttgcacacttatttgtaatgtttcttttaaataaaagtgactaattttgttgtagtctggacctgtaa

SEQ ID NO: 7596 - DNA, 790 bp, Homo sapiens
ggaaggcactgaaagaaacacggcggaatctctccaggagaagctcggcgttacccccggcagctggtggatgcatctcagatcccggttcctctcggcgaatgctgcttgcgaatgtgtgcgacgccttccgtgtgatggaaacacactaccccgtcggacttcgaatttctacgtggatgtgcatgaagctcttgttttcgatgtgtgtttgtaaagggaaaattagtactctgctcgactcttggtaacatgaaattctgaatgttactttatcatgattgcactgcaactttttccttaaaataactgcttttgtaagaacggtgatattggagtgattagtataaattcaatggaatttgagaagcaatggcagcgggataatttagagtcactgatattacgagaggggtctttttgtaaacctccttttcaatgtcaaagcgccaatttataaaacgctgcagatgtagaggttatgtgcaactgatctgtccagtttgtgtatgaaatggatttgataaagtttttgctagttatttactacattttgggattaataagtgatttatatgcatatttttctgtaaatctacagttttttgtacaagatattctacaagttatgaagctaagggaagaaaatgccaaagatacctctagttatgttgaacacagccagcacagtttcgacatgtcaaggaagagctgtttcagtaaagaatgaagtgaaaacacttatttaggaaaatgtttctcaacaataaaatgtatagttgtttctctc

SEQ ID NO: 7597 - DNA, 707 bp, Homo sapiens
cgccgggttcacacgtgtgttcacagagctacggccacacacacgccttccaaggtggcaagctacaacacctctgaactggcactttcacatttttacaaatgcagctgctgcttctcaaaaaaacaaacaaacaaacaaacaaaaaaccctccaattcagtttttataaatattaagcatgaatattaaaaggtgcttctacttttggttgtaaaaacacctgaatgactctaagactgatatgtattttcaagtctaagctgtcttacagaagatcttttataaatgtttccttataaatatctcaccattacaacaaattgttttaactgtttttctattagctctagctgcatatttgatgtaaatgacaattactgaaaaaatgtcagaaaaaacattttcagtactaacattaaagtgccatatgtaaaaaagaaaaatgtgatttgtataactaaataacacacaaacatcaagaggctatttatacaaataatttatttccactagggaaagtgcattactggtgaaggtattatcaatttattctacttgcttataatgttacagtgaatgttctggcttactctgcctcactttccattccccaaaatgatgtgtatgttgctaattttccaataaactcatatgaaccataaggaaacataaaatgcaaataaacataaatctatgttatccttt

SEQ ID NO: 7598 - DNA, 2455 bp, Homo sapiens
tcttcattttagtatttatgcttagatgtgaaaataaatgttatttgttgatcatttctataatccagagctttagaggaagacacataggtgggtttatgtttcacctcatttggaacaaaagaggacagaagcagaccactctgtgcaccaacctaaaaaattacagagaagagaaaattatctttggattgtgctgccctatataaaggtggcagaaagacatttttaaaaagcttattatttcttgcattattttaaaaagttcagagttgaaatgcctttcaaccatttccttctgtggtcatttttcttgctgcctttttcacccaagattcagcagtcagatgtttactgcacacctattacctattatttgctgttcttgcatggttcaaaccaccattctgtagccacccatcctttgccttatctaacaaacatttttccaggaaggtggaaaaggaagtgttgctctcattgtgtgactcagtgctgctgtccatcccatggaaacatgggcacaatcaagtatttgtccagcctattgcaggcttttcctgactttaaaataaattgtgatcaataatagtacctttgattatacatttattattgtgtctctctctgatgtactgtggattgtacatttaactttggaatggctttgtaataatcagtcttaagaaaatgttgacaagctctggttgcttatttttagaaaatgaggacatttaataataataaaaaaaaagggattaatagcttttgacctcaagtcttttgtcttctgagtgttggagcttggctgaagacatgtttaatactgtacaatttctgaagatggttattaacactgtgctgttaagcatccatttaaaaatatttgttatcttctttgcctgcctgtattttaaaaagaaatacaaagttgtaaaagtaatggatttctttggatgctgaatgcagtgatgttatcagtcagattctttccttggctcagttgtgtttgtatttcctttcttaattccccaaatcttggctgggcacggtggctcacgcctgtaatcccagcactttgggaggctgaggcaggtggttcactggaggttgagttcgagaccagcctggccacatggtgaaaccctgtctctactaaagatataaaaattagctggatgtggtggtgcacacctgtgatcccagctacttgggaggctgaggtgggagaattgcttgaacctggaaggcagaagttgcagtgagctgagatcacaccactgcactccagcctgggtgacagagagactctgtctcaaaaaaaaaaagaaaaaattcccaaatcttaatgtctgtttcagaattttagtgattttaaagtgatagtagaaaataccaagcatatgaggtatttcaatatgataggcttcttacattttaatagttactcatctttgttccaggacccttgactgatgctagggaaaggataaagcatagaataccagccagtttggctctgattttgagttatttataataaagtttggggattatcataacatctcatatctttgtgtatgttgttttaatgctcggcagagcacaacactgatgataactattaaaaatagaaaataacagccattttactttcaaatctgatgtgatgcaatctgtgaacactaggaggggataaaataagcattgcagggaaacttatttgtaaatagcttcctcacctaaactttgacttggcaatcaatactttctactttgtggaggggattaagaatagaatgggcaggatgagaccatgaaaattataatgattcatgtatatttgtatgatgcttgtaactttgcaaagtcttttttattcattgtctcatttggtcagaacaattttattgaggacatgaatttaacaattagaatttagattttctgactgtagctactaaatgttgtagctactagaccaggtgagctaggtttagagcaaagtatataagccttgtatggactatattagaattttaaaaattgtaattaattccttatcatcattataaaaagcttgatttttttatttgatctaaaaaagcattattccaaagaattttttcaagtagaaatgggagttagttataccagtgttgtttttaactaataaggctattttagaattcagccttgcctgtaaggtctttgagaagggagaggagtaggccaaaaaaaaaaaagtcttgattcctgaatgtgccttatatgctgtgccactcacaccgaggccatcatctcaacattagagttgtgctagattactgcttgactgactagctaggttaggcctaagagtgtttaccgaataatctgcactcactcagtagcccttcttcaggattaaaaacgatgatgacctcatcttagagccctaaagggaaatgcttat

SEQ ID NO: 7599 - DNA, 597 bp, Homo sapiens
agtcggttcagaagctaaagtgactctctgggttgcctgcttccattttgtgaaaccttagaggacagcggctgcctgtcccttcttcaccccctcacccccataatttgtctagatctatttccatatctctagttcaataatagaatttgaaagatgcttgtaatgtgagttttgggttttaattctcaagagtcaacctggagcacatgaggttaaacaaagggccctgaagtttgagtgcgccctccatttgccctgtgctgaacttgctgttcatctgttgatctggaggcaggacagcttctgggacacacaaaaatgtggttccctttgtcacttctttggtggtcttaaattatcttgcttcatatatcattccttaaattccagtcattgttccagcataatgagatggaatctgccagtagatttgcctagcctgtccacttagctgaataccagtttgaaggaaaacagggtggccacttacaaacttacggagctcaggacagataatcttataaagaatagacttgcttgggtggtagtacgttgtgcaattttgactattcactggctttatacctgcaaatg

SEQ ID NO: 7600 - DNA, 390 bp, Homo sapiens
gaagatctaatgcatcctatatccagtaagtagaattatctcttcatctgggacctggaaatcctgaaataaaaaaggataatgcaataaacacagttgcaggaaagtatgttagctatatactatgaagtactcttagtttacttatgttgaatggcttagctattaatactcaaattgagttaaaatgaaaattcctccttaaaaaatcaaacgtaatatgtattacatttcatggtacattagtagttctttgtatattgaataaatactaaatcacctaggtgtctatgttctatcacatctacaaacatgtcacttcctaattaacaaaatgttcttcctttagtttgcttttgcacttaaaatatatataattgacttttttgg

SEQ ID NO: 7601 - DNA, 495 bp, Homo sapiens
ggtgctttcaaaggagctcgaaggatattgtcagtctttaggggttgggctggatgccgaggtaaaagttctttttgctctaaaagaaaaaggaactaggtcaaaaatctgtccgtgacctatcagttattaatttttaaggatgttgccactggcaaatgtaactgtgccagttctttccataataaaaggctttgagttaactcactgagggtatctgacaatgctgaggttatgaacaaagtgaggagaatgaaatgtatgtgctcttagcaaaaacatgtatgtgcatttcaatcccacgtacttataaagaaggttggtgaatttcacaagctatttttggaatatttttagaatattttaagaatttcacaagctattccctcaaatctgagggagctgagtaacaccatcgatcatgatgtagagtgtggttatgaactttaaagttatagttgttttatatgttgctataataaagaagtgttctgc

SEQ ID NO: 7602 - DNA, 2537 bp, Homo sapiens
cgatgggttaccagctaccctgtgtatacagccctgacgcaatgaaaagtcgttttccaaactgactcaacagtcatcgctcgtgtgttctatccaaacatgtatttatgtaatgaagtaaagccattaaatgaatattttgataataatattgtttttctttctacaaagcactagagaatgcacagatatactttgtggaccaattattgatatatattataaatatatataaagaatatatatatatatatatatatatatatatataaagtatagagagaagttcatacaaagcgtgcacaaggattgaaaattcgcccgagctgtttatgtttttataaaaataaatagaaaagtagacaatcattgttttgaatattactcctatttttgtaaactggaattaaaaggatagtatttttatccatgacaggcctgaagatattactacttaccatttgctactgtacataaacaatgatgccctgctccagggagattttgaggtaaagatatggagaattgctgaagggcattctttcccagtgagtctctggggcaggctgcttcaatcccagcctaactcaactgggctctgtccccctggttgggtggcaattccaatatttctgctttctttgattctccttttatgtgtagttgtctctcttcagactctcagcccagaagaaaattctcctgataaaacaacagctcgatccaaattgtgcttctccccagaattcacgcctctccctaggagaagagttgaggaactgtacagaaaagggcggcttcgttagaccgctctcttttctgtacttcctgagtggccagggaatctaatatccccaaattagggcaattggaacaaagtgaaggacatagaggtatattggaagaggcagagcctgaggtggtaggaggaggaccctggaaatggactggtttgagattgccccaggtctgggaagctgagggcaaatccagtcccaatggtcctgactttgggcgctgggtattggaaatggatgcaaagtacaatgtgtttttctccagtgctgtccatgcttctcatcttgtgaaatggccaggatcctctcctttgaaacctgctctgtaggagctacccttttcctttgtggttttatggagacctctccttcctaccctcctgcactgtttaagtactgtttaccatttttcattcacttctcttaaacttgtgaatgcttctcactttttttttttgtttgatgcaggcacttattgtaaattttagaaacccctctgtagccactagtaagtaattatgcactaaatatgaaccctttgtttcttgtttattgagtttgtaggtaaaatgtatttttctacattattgcttattgcttagtaaaatttatttcataaaaccaacctttgtcatattagaatgtgtagtgttcacatgttgctcagttttgctaactgataaatcatttaatcctcttcttcatatgtatgagtactatcttatatctgtggtcaagagtgaggtaagcaagctccaacagaccctgagaacctacgcttgtatcctttctttggctaaagaaagcatgtctgtttcctgtcaattctttgaacatacagagtaatctttataaacaaaagaaccttcacccagcaatcagatcgagcagcaacagacaaaccagccagccaatctcccaaatttcaggcacaagtttatttatttatttttttatgttttgaaaaaagaagatgaagaagaagaaaaaaaaaagaacaaggaaagattaaacgttagcttgtaaagtttaaaggacctttccttttcctttacggatttgatcagtatgaagtcataaatcaaagaaaacagaattggatttgcattcccaggcgggatggatgctgccaggagatcacattgcaaatagtgaaaacagaggcattcggtctatgcctgagtcctgtgtataggatcaatcttcctttaattccgcagtctcctcaggcaatgtgacacgggatgcagtttgcagctttagtgcctttcttcgccttttaaattgccacgaatcacagatggctatttagtggccctacaatgctgcaacacatcagcttgcattttagtcttaattatttgtttcttggataatgggcagagttttctgtatttgtatcagctgttagtggtgaaatagggctctagttaaccttttatttatgaagtctaatttagtgttcccgtggctagttgcaagcattttacagtgatcacccagtttaatcttttgtatactttttagaaatgccaagagccttactaaactgaagcagatttatgatatagtgataatttaggtagatgttagtcttgaagctcttattttgtgtgcaactgattataaaaacaccttaaccaagtattattacacacatgatatctataactaggactttgataactgttatataaagtgtgtaaaatttgtatgaataaatttttgtaaacaatgcaa

SEQ ID NO: 7603 - DNA, 53 bp, Homo sapiens
agataaaatgttgatcatgtatatatatccatagtgaataaaattgtctcagt

SEQ ID NO: 7604 - DNA, 686 bp, Homo sapiens
ggtggctggggagatgtcaggggaaagatagatagttgtaaaaactctaaagctttaatatattcggtttgtatgtaatggaagcacggggctagagtttccacataggccccaacataaaggccttccctcgctgttgaggccaccatgccttactgcatccagccaggctgcagggagtgaggcacacggtgaacatggccactgacttttctgccactctaactggacaactggaagacttggaaaggcctccacctgtatctacactctgagggccctggactgggcctgagcttgccacagaggctccgtctgactgtgggctgggaggagggaggcaggggagagccggtcacggtggctggtctttactgcagggcagcactgtggccagctgtctgtctttacactgcatgcagaagtttaaacactgaagtgccgaagtggcccgtgccgccgcacagagaccccgactttagtttgggctgttccacgcttggctcaccattgccgcctgggacttaacctgctcaggcgggccttcgcccagctgcaaatagggatgcgttagagactgttcccaaagcttgttgggctccttaaatggcatgtacaatttaagtgcaaagacagggagtgtcaataaagatggaaagccatttccagttaacttttgttaattt

SEQ ID NO: 7605 - DNA, 312 bp, Homo sapiens
aataacttcaaattccagccaaacgttccttgttgccactttgggtattctgagattttctcttgcatgcccttagctttacagcttttgcatttcctgttgtatttattctcagccattttgggcatatgtatctttataatcagactggaaacgggactttctattaatatcattttcagaataaaaaataggataatttaacctaccagcccttctcccccaataactgtggtctatacagagtcaatatattttttcagagaaagttattcgctcgattttttctgaatcataattaaactttatgat

SEQ ID NO: 7606 - DNA, 244 bp, Homo sapiens
aagaactttagctaaaatcttccagttacattgtcttactctcttttacttctcagacacttcccccaccctcatagaacctgttgcatgcaacttagtttcacagctttgcctcttctttttgatgtatttattccagacctttctgccacttagcacttgtataatcagactggaaatggggatgagggtgtaaattgtattgaaaaagatcgcgaataaaaatcaacaaatgtgaaagccc

SEQ ID NO: 7607 - DNA, 466 bp, Homo sapiens
cccattttcaagcaaaacagttctcagaaatgtcatgattgccggggtgaaggcaagagatgaattgcattattttatatattttttattaatatttgcacatgggattgctaaaacagcttcctgttactgagatgtcttcaatggaatacagtcattccaagaactataaacttaaagctactgtagaaacaaagggttttcttttttaaatgtttcttggtagattattcataatgtgagatggttcccaatatcatgtgattttttttttcctccccttccctttttttgttattttttcagactgtgcaatacttagagaacctatagcatcttctcattcccatgtggaacaggatgcccacatactgtctaattaataaattttccattttttttcaaacaagtatgaatctagttggttgatgccttttttttcatgacataataaagtattttcttt

SEQ ID NO: 7608 - DNA, 3557 bp, Homo sapiens
aatatcctcgagagagctgctatcatgtattatatgccaaaaagatcctacattttggtagggaaaaaacaacactgtgtttgacgtatttgttcctacagcattctcagtatttctggccctcagcagtgggcattgtaagcatgaactatggaagaggcgccggttcaccaattcaactgaagctttctcatgacttttttttttataaaagtaaaggaaagatgatgtggtccttccagaagaaagaccaatctagaatatggaactctaatcacttctagtatttcaacttcctagcagaaatgaacttggccctagacctagggataagcaatgttctttatgtagccaatgctacgaaacaaaagaggtgaaagagacccttttttatacttaatgtacatatattgactttttgagcaagaatgccagaaatagccttcatttctaccctgcaaaataatccagatctgctttctaaaatgaatcagtttctaaagtgaaacatgcaatatttatgctctgactgactcctgaattggaagaggaagaacttctgtttacagaaaactgtattgttatatatgtcaggctgtgtattgtgactatcagcattctggtgcaaatgaacttttctccatcatcgactgtggaaaattgatacttttaaagcatattcttctatgagcacaggtcctcctagtgaagcttagtttgacaaagggtgtcatatgctttcctaacctgatttgtagttaacattcacagagcctacattttctcattacggttatgatgctcagtatctttccaagtgccaggcacgggcttccttttctgatcaaacataccattttttatatttcacaactatagacagtcacttctgcagtcccaatttaaaaatgcagaactgctttatccaagaatgctgaaaaatactgttctatccaggtttcctaaactataaaagcagattttgcttttgtttgttaatcataggcatggccgagcattgtggattagcctgaggcttaaaatcagatgcatgtctggtaagatgaccactgtctcactatcaagagcctgcagagccattttccagacctgtgattgcccagaacacatagtccccacgtttctaatttggagcaaatctaaaaggtgctgagggattggacagctctgactttcctcgagactatggatatagtccttctcagattagctggaaatggggacagagttctcatttatcccagatatatacattggcttttttggaatctatagattgagattttgatgaatttatattggttttaatgagacccaaatgactctctcttaacaattcaagcagtagacaaagttgctcacaaatacagaaaacatctttttgtctacttcgcaagtctcaaaacgtgataatatttaagcccatttgtagaagaaatcttgtatatactattattacaccttgatatctatacaaaacatcacttgtattaaaatatatagataactttctggcatttagaattttgttccattcatttaatttgttcatctgagaatttttttttttgcctgaaaacccattaaaagaaaacgtgccttctgtataagtttatgtttattcctacattttattcatttttaatgtatgggtaattggtggcacatgactttacataatgactttctagactctgaaaaaaatgcttttatcatttttgcaattcagacaagggtaaacattttactttatgtaattgccacatcccaagatgtaaaacggcagtaatttatgaccacgtatggaagaaattcttcaaatagctaccttacatttctgcgtatatatgaaaactgaatgatatttctcagtgtatttccttgcatttgaatggttcaattctgttgtgtttatgtagaaaattcacaaatctgttcatttaattttttaatttgagaatttttatttcttttgactgaaaacacattagaacctatgagtaaattctgaaggttttaagatttacttcagcttgtcaccagtttcaaataaatccctaataggtaacaagtaaaatacaaattcttgtctactttcatgtggttttaaatggcagggacttcgctgagtcagtaagtataatcactctagtttattcaaggatgtgtggcaactttcaacttccatacgtatatatgtatgtatggaaggccatgtcaatactagtatcattggatataactttgattcttaatcagagggcaaattcattagagaagaatttttagtagatacacagactaatatttgtgtggaggttcttttgaccaattttattcctaagaataaacaaacccctacagttaaaatgcaaagatgcctgtcatctaagtattgaaagaatttttgccttatcaagagttgttttttaaaaatttaataaattcataaaaaagactcatatctttgcaaacaaaagaagggcagatactgggcttctacatgctatccttaagagcttctccccctcacccattcctagtgctcttggtatacacttgggaaaataatgtcctccaggagaaagtgttagagggaactaacattttaggaatgcttattcagaaaaaaatcctagagttgattcattgttttcctccatcctgcaaaagaagatccctttgttaagcagctcacttggaaatatgattcttggagtcaatgatctctaaacaaactggattatcaactatttacaacgtctatacagtataaactacctcacttgcctttcttgggaaaaaaaaaatgaatggactttaacaattgttgttacaaactgtgcctgaatcttattatttaaatcacttcagttagctttcagtgtatgtttaataatatacatttaatgatgaaaaatattttcagcaaagctttaaaaccagaaatactgtgtaactgtgatctatgtggtatactctgagagaattctgtgtcctgctcattgtcttgagtttctaaccatgtgcagatgcaagcgttcaggagtaggaattaatgtccatcttttctttcaggcattttcatctgctgtccacgtatttcacttgactgaaagctcatatgagttaaaatgtcccttcttcctagcgagcatatttcaactgttcttcataaatgtttatgtgccttaaaagactttatgttaaaggattaaatagtttctctgacaggcagtttttaactgttttccacaaataaaaataatatgtcatgggattaaaatgtttgttttcaagcatttttaacagttttacacacttacatacaccttaattaaaaatttttttctgtcagacatttaccaactattttctaaaactaatttgacaaatcatgacactagaaaacgccaatgttttatgtctttgcccatctcaaaagctaatattgattcttctgttccatcagctttcattgttaagtagaatatgtatgttgcattttatccataagaaataaagagaaaaaaact

SEQ ID NO: 7609 - DNA, 145 bp, Homo sapiens
gcagtcatatagagacttgaaatatcattcaagggatttgggtatccagtagacttttagttacatatactacaaaactgactttgtactctcaagtagacctttcgtagaaagaaaatgtttctaataaaaatgtattagaact

SEQ ID NO: 7610 - DNA, 692 bp, Homo sapiens
tggtgtaaacagctctgcaaacaatccctttcataccacaaagccaagacgttccatggtatttgtgcaaaagagatgaagacttctcaatatgcttattttgctttgcataattggctctttttaagagcccaagaaagtgtttctaaaattgcttgcactgcccaatcccagtaatgctgctgcctgacagaaacacacacacagccacagttgccaaatcccgtactccttgccaccggcttcctagagcagcgtagacagctggtaaactgaagagcacaactatattcttatgaaggaatttgtacctttggggtattattttgtggcccgtgaccctcgttattgttacagctgagtgtatgtttttgttctgtggagaatgctatctggcattatggtaatatattattttaggtaatatttgtactttaacatgttgcataatatatgcttatgtagctttccaggactaacagataaatgtgtaatgaacaaagatatgttgtatgagtcgtcgtttctgtcagatttgtattgtttccaagggaaaagcttgggggaggactcagttcacaaaatgcaaaactcaacgatcagattcacggacccagagcttttccatgtgtttatattgtaaatatttttgatttcatcaaattatttattcattaaaagaaatttttgtg

SEQ ID NO: 7611 - DNA, 1119 bp, Homo sapiens
tttcctactttggagacaaagtggaaatgattcctggaaaggggaaaaaacgttctattctgcactacaatcattttgacaatttcctttcgcactttgtaatccaagtcagagctatacactaacttgtaaatatgcatatatgcaatcctgggtaagttttggttataagttacctatttccctccaaattattatatttcattcattaccccagtgtctagtgtacatacactgggaaacctagtacttctaatatgaagaatgggagaaatgaaaggtataatgtttcttgaaataaataatataattgtccttattaattatattatgaggacagaagatattctgataagagagaacgtggtgctttgcttaccgttttaaagaaaatttgtaaaactaaagactttttgaaaaaaagctatcttaagtgctttttctttatttacaagacatttcccccagtggtagcatctgaagtattggagtgtttctgccacgaagcaaagctccattcatggccgtcatggaaggttatttattaatgttacataatggtagaatattactagttagagggttggatttgacttggtcctaaggccacagaatctctctcatggcttcctaagggatgtacctttatgcttttaagaactacaaagattcaataaagaaagaaatgtttttgaaactatagaaaaagattttaaaacacgctgctgtcctaaacaaatcctgtttaaaggaattttaaagagatgcattttactatatcaaagaacatacgtgtatttgcctaaacactctgtacctttgtaatgataaaacttcccccttctttacggtgaagcttattctgattaagcctagactgtgttctttttttttttttttttttttttttttttttttttttttttttttggtctgatgatgaatttgtgaactctatctttggtatatcttttattaaactgcactgttttgtttagtcaaggtaattaagtaattatgtatttgaataacttggtgtgtcttgagtgttgtggtatgaaaagcattgtggtctttctacactaatgaagtgcaaataaaattttgtatttatgaatg

SEQ ID NO: 7612 - DNA, 470 bp, Homo sapiens
gaactaccttgttctgcactagctccatccctagagccctgcttctccaggcccgagagaccagcaaaccgtcgccctccgtcccgttgggccccacattcccccactgcctcacagcctcagtcacccggagacccgacgtccttggaggagcatggtggcgaggagccgcccgaggagcagccacaccgagatgcaagcttgcatggattatcacagtataattcactgtaatttgcataaccacaccatcaccatgaacaaaactctgcccaacaggagagatctagttttctcaaggtcaaagaatgttttttaaaaacacaaagctgctgaatgttcaacctgtgaaactgagatgtttctagaatgaaacagtaaatgtgcctgtaataacttaatttttttcatagctcagaaaactatttttgtctccatcttttttacacacagtatattaaacgaaaagg

SEQ ID NO: 7613 - DNA, 59 bp, Homo sapiens
tttatattgaactgtaaatatgtcactagagaaataaaatatggacttccaatctacgt

SEQ ID NO: 7614 - DNA, 4082 bp, Homo sapiens
cagtcagtacttcctgatggtattgtcctaaactggtgatgctcaagcattatactgtggaatactgccttttgacaaaaatactcatgcctttacaattgttagtaaagttcgattatagttggttatgtagtaaacactgtcattttataaaaaatgagaattattttggatcttagatccaaacacagtttctaatagaaaactattatttatattgggaaaggtaactattgcattagagcatgttggcagactggtaggtatttaaaaagttgagaatctgctaacagcgctggaagttgttagcgctctaagtaataagataaccactagtattcaaatctctttcaggttttattaaaaaatatatatcaataaactaaaaggttcaattcctaccaaatagtttctaatgtgggagaaaaacttggcacaaaatttcttcagtttattatctgtaaattgtacagttttctttttgaaagttttaatattgtcttcctttttaataacttattttatacatattgtgcagatgtaaatcttgtaattaatggtcaaactgtataaagggattggtagtcaaaacatgtacaaagaaatacctgtaaaactgttttgtctcatgttttattggaccaaagttgtggtttgtatggagtgtagtagtagtgtgtacaggtagaaaacttttaaatacagcatgcaggtgtttcagttagcttgttttcatcaccataactgcaaagatgtggcttagttgtattgcatgcttcctataatttaactctccataattgatgcctgcagtagtgtaaggcatttcatactagtctcctctagtagacctgtgacttactgtgttggacatattatttagacttagtcatacaaagaaacttagctcttttttcatctcacagtaaagcctatttccccaggaaaaaaataaatgcctttgaatgaaaattctgaaattgtaaatgtctattttaatattcacctatgaaagaatctgtgaatatatgtaaatacgtttaataaattttattggtcatgttaaatcattgtaaaacttttttacattgcttaatgttttaagcttaatagcctttgcacttttaaaataaaaaccaagtatgcaaatcaaagatatttggtagtcaaaataagtaaaagaaatataggaatattccagtcaatctctgaaatgtttatgaaaaacaggttaatatgttgtatttttttccttgtatcaagatgcaaaacataatttgcaaaattttataattgaaataaaacttggtatgctgttttataataaattagcaatatactttaaaaaaaatccagtttctcctataacatgatgtaaattaaatattcaggaatatttcaggtctgaaatctgctgctgaacttgttagacatttttgaaaggaaaattaggttagcgtacaatttatcataaatatatgaggtaaaatttgcaaaactttccacagtactttcttgaattataatactgaatgttttctgttccgatagagaaaagtgaagcaaatatgtgaggaatgaagtgatctagtgcaagttggtaattccagctaatgggagagaatgtaaatgtgcaaaggtacatattaagcttagggatttttgaatttttacgtcagtttatattttaattcttactgtacttggcatgcgcaataaagcagcacatgtaaaaaaaaaatacacagtgcaaggactttattataaaggttggatgtagttttccttagaaatttaggtgagagattttggccttttttattggataaattgggccagaaaggcagggtagatttcgaagcactggttctgttgaagttaagtttattaagcctgggaacattaaaagctaatttataaaagcaatactttttaatatgaaaacttactgcaaagtttgtttatacttttgcctaaaaaggaaattggatgggatactgtggcaaatcataaaaaaccagataattgaactttgaagttatagaaaatcagagaggggtaagtttatagggcattttgttctgatggttcaaccagaggtctgggaaatagcactgttggcccaaacagaacaggcttttagaagataaaagcgacaagaaggaatctggtgaattttagtcatcccagctttttagtcttaaccacagttctcactctcttaaatggtacctcaaaaagctggagcctctctgccatgattatgcttctacaaatttcttttataaagagactcaaagctaatgatagcttaaaagaaaagttaatgccttctcattggaaatgtataatcaaataagtagttaagggcttttggtattaaagatattctgaagctctgaaatgctagaaaaaaatttggaatggagtatatgcctgaaaaggttttggattcagaaagaaaaaggatggttagtttaatcagtgattctttttaaactcttcaaatatcatgaacaagatactaaattgtacctaaggatttgtatttctttacaatttgttctaaatatctgtttaatgactagttgatatttgtgcatgttatttaataaagagttatatttttatagaaaaaaagagtgaaatgtgtgctaactgtttttttacttaattttacttgggcagctagcaaaattgcagaaatatgcatcctgggaaaagaaacagcctttgaagaattagcctttcaagttcaaatctatttaataatgagaagtctcacaagtgaatttttaagtacaggcatacctcagacgtactttaggttccagaccatctcagtaaagcaaataccacaacaaagcgagtcaggaggaattttttggtttcccagtgcatataaaagttttgtttatactatattaagtgtgcaatagcattatgtctaaaaatatgtacataagtttaaaaatattttattgctaaaaatggtaacaaagtgagcacatgctgttggaaaaagagcaccaatagacttgcttgaagcagggttgccacaaaccttcaatttgtaaaaaacgccaatatgtacaaagcacaataaagcaaagcacaatagaacaggattgcctgtattagacatgctacaaacttcataactggaaacatctcaaagaccccatgaagctcatttgaatgggacttaacaattagacagttattttagaaattgagtgcagacctaaatacatagttttccaaaaagaaaattattgtctctgatatcttaaaacataaaaacccaaaattttatatagaagaaattgactctgtaaaacgcaatgaaatagtcctctttttaaacagtttaaaggaagcattttcaccgtttgtaaaaattatttttaaatatttagggcaaaatttttgttagataataatggaaaagcttgtgtgagtttagtggttaaaatatcttgtaattcatcattatttaagtgacttcttgggagccgtctttgtacctaaaatggagtttttttttaagcctccacagagatagtcacccaaagtatttccagtcagtaaaagtagaattcatagaaaaaactgaggcaaattaaaacaattccattaatcaaaatggctttaaacaaattaagtattagcataaaaatagcaaaaagtacaactaaaaaaatggttgggttttcccagtggttaaatgctatataataactgcaaataaaagtttttttgtacatggacagcgtcctcataaaagaaaataggccaggccaggcgcagtggctcgcgcctgtaatcccagcactttgggaggccaaggcgggcggatcacgaggtcaggagatcgagaccatcctggctaacacggtgaaaccccgtctctactaaacaaaatgcaaaaaatcagccgggtgtggccgcgggcgcctgtagttccagctactcgggaggctgaggcaggagaatggcgtgagcctgggaggcggagcttgcagtgagccgagatcgtgccactgcactccagcctgggcgacagagcgagactccgtctc

SEQ ID NO: 7615 - DNA, 2892 bp, Homo sapiens
agaagacaaatgcaaaccaaagcaacttagtaaaataataggtataaaaagttattctgtaagtctgttggttgtatcttgtatcagaatcccagtaagttaagttgtaaagactttggaataagtttcttttaaaaatatgacatagccagtgatgtgtttaattatataactgttcttactgattttattgccccctagcaataagccctttcctttgaatacatgtacaactttggtcatatgagaagcaggtgcgcagagaattccttgaaagatctgaggtttttaacatgaagtctgacgtggttttcctctagcattccaaaaggtttttgctttgaaagtgttagcagaagcatgttgatgtgaattatgatttcttcatgtgctactgttagcacactgagtttttatagttgcacatcattcctcattgtgccttgttttatccattttataaatagagtagatatttgatataccactctgataactcatataaaaatatcatcataaaaagcttaatttcatcccttttatgttggttttaaaaggtaaatgcttaccatattttataattgagaactcttacatagtagaatccattctataatacatgtgttgacaaagctttagagaaagtttcctattctcttccatttcccctgcccaaagtgctgacataggcagtgatgaagaatctttaccaagattttcagggtgtacctatgaaattgctttaaatgcactgctggtgtaaataattagcaagcaaagcgtttctgtgacttcaggtaccagcttaaagagcactagggatggggaacgaatgccaaatcagactccacctagagcaccaggaaacagcttgtaccctggtagggaaatggtgttgctgaaaggggaggctgagccagtgcgagactgaacttgtgcagccttagccaagacaaagcagtgtttttcagcagacggctgatgggacaggaattgaagaagagaattgactcgtatgaacaggacagggtgaaaatgctgggaattattatgggaaacaaaactatctatgttcatattttgtaatatttcatttgttaagtttatatctggatataatgttctttttaaacaagtataatcatatcgtcggaggttaagattatgaaattttagaatctctattcaagatgatgttcactccaaatacactacagaatttagtcaacattttatataatgtttcaataaatgtttctttcaataaagatactatgtgcccttcatagtaataaaatctcaatcttaaagcatgaatctaaaacataaatatttatattacagactcaattttacaaaattactaattgctctagtgcatatttgaactacaagcaactttttaggaatacctctttatacgtctacatattttagtatataaaaatagataatgctcttggacacattttgtattattcatgatctgaatagtagttagttaaaagatcatttgtaatattatgatcaactgttataaattaaggtcttaataccttttctgctctttcaaataactctaatgaatattcaagatattttagccttttaaaaagttgagatttagctcatggatatattttttggtagggaaacattagggtctccttttcttccttttacctagaatgcctcatttaaaagtgccttgaaaacatttagctccccttcttcatgagcatctgtagagctgaaagtattctggaactttagacagaaagctgaaaggaatctgcagtctcctgctgcagttcaactctgctgtttttcagtcatttcctactgtgagtggagtgatgtttgtgtgtgtgttggcaacatgcctaatgttttcttaatgatgacaacaaatattttaaaactgcatttatcattttttaggtcttcattaaattttaaaatgtaatatctgtttcccaccccctacattaggaggataatttcttaaaccacattgttttaattgatttttcttatcttgatttctttcattagaaactatccctaaatgtaaagatcttttgccttcaaatttggcttattttttctgatttatgagggtttgaaagaaagaattcacctaaaagattccatttccagttttataatgtatttcaggttctgaataacaatatttttccaaattgaaagtaaatattccagaagttgatagcctggttaaaagttagatcctctattaccattctaagcacattcacttctatattgaagttttggtaaaaattcttttttcttttttaataaaaaattaggttattactttttttataaccagatttttaaagcactaggttttaaatcagtgggtatcataaaagccatatataaaagatcctttcttatagtaagacttgtgcttgttagcaggtttttctgttagtttttcccccataacatttaattattactaaaattgtatttacaatagtggtgccaaatcaaatggtaatttaaataaaatctattctgtgtttatgtagggtggtataaaaaagaggtcttcatttagacatgtgatttctaaaattccagaaagcaaaattgataagatgttagaaatttggaccattatttataatcagggtagcattaaaatggagaaaagaaagttttctgaaaaaatgcagtaaatataagccacatttctaaagtttatttttatgaaagcttcttttaagattttgaaatctattctgcattcccaagagtttatgtttattgtattttatatgatctacaacatataaaattgtgtatttttctttggttgtccctattaacaaaaaagtattttaataaaaaattgaaatg

SEQ ID NO: 7616 - DNA, 2170 bp, Homo sapiens
gcagcctgcgtggccgtctggagtccgtgagactgaaaggacccgtgcatcttactgtaacccgggggccaggccggctctctcgctgtacattctgtaaaggtgtcttctcttctcagactcttcctctgtcacacgtctgactccttcacgtcaggctcaggttccatgggaggacgaagcagtggacgcattgtgggctttagggacagatgagttttccagatagtgtcagcttatttgaagattaattttctttgttaacttaaaataactattttaacccttgagtggcttctttttaaaccaaaaaccgtctttctttgcttttttatcacagcagaatcaggatctctttctcattcaaggggggaaccaccccaggtcagcgctgcgcctgctgtggccgccgcgagccacgccctctgggatctctggtaccgtcactcttgcttgtgccttccacaccttctcggtgcagatccctatgggggagctgcctcacgttctctgactggtcagagcagcgcctggtgggtgttccctggcccactctcctctctccttctgcagttctaaaccacagtctataagcccgagtcaccaggacggcctgtctggccacagacaggggctgcctgtggagcctgcccaccggcccccggcagtgcagtccagcggggaggaggctgcccgttcctgccagttcctcactgcggggaccagcaaaggccttctcactgggttggtcaaaggtagtcaccttggcctggtgcatccacagaggatgttgttcaaaccagaaatcttttaaacgactgaccttccttaaaaacagaatgactccgattgcttgcttgggctagaatgtacacgtctccttgcctgaataagccatatatatgctcttaaacaaaagtttgaaattatccatatcatctcagtgaacctactggtggactcccaattgacaagattgagcaatagaaaaaaattcctttcctttgaatgatagctgtgattcaccccaccccattttcttgtttctggtccatccgatgagacggatgctctgatgctctgaggcttctgggaggctgggccctggaggcaacgtgctgcaggcgcactctgtcagagtgaacagcaccgcgagacaggccaggctcgtggctcggaagacaaaccccacacacactcaaggggtcgaaaacaaaccccacacgagggctctcacctccttctcctaggtagtatttattttcagcacctgtttgatgcagtttttaatcctctacctattgcactgttgtgactcgttggccattatttgatttttgtacgaaaaaaagctttgttatagaaatcagcatactatttttttaaatctggagagaagatattctggtgactgaaagtatggtcgggtgtcagatataaatgtgcaaatgccttcttgctgtcctgtcggtctcagtacgttcactttatagctgctggcaatatcgaaggttccttttttgtttgtgtaaactctaatttctatcaaggtgtcatggatttttaaaattagtatttcattacaaatgtctcagcattggttaactaatttttgccaggaccattattgatcaagcaaataaattcaacagccatttgggaaaaagaaaagcttctagtttttttgtacacattctttctgtgaggagattgagtactctgcagctggcgaggagttggttgaggcacttcttcaaggccaagggggaacacagtgttttgtttccagctcactttgtacccctcacctctgcagacacggggagaaccccggacccctggcatgcatgctggcggcggcatgcctcccttccacaagcccatgctgctgcagagggagcctgtgtttgcaaaacccagtggactgggctgggtctgctgtctgagcagctcctggctccggtgggaactgcacacaagtccactggcctggcttggccccaggcattgcaattgacagacatttgcatttcatacggtaaatgaggactcagcacagccaaccataatcagcatgtctgggatagactggtctagaataaaaatgaagtttccattgctttgtttgctttaaaaattccacaattaaaatatctgtcattgaaagctt

SEQ ID NO: 7617 - DNA, 3225 bp, Homo sapiens
cccaagggccgtggtccacggtacttgaagaagccagagcccacatcctgtgcactgctgaaggaccctacgctcggtggcctggcacctcactttgagaagagtgagcacactggctttgcatcctggaagacctgcagggggcggggcaggaaatgtacctgaaaaggattttagaaaaccctgggaaaacccaccacaccaccacaaaatggcctttagtgtatgaaatgcacatggaggggatgtagttgcatttttgctaaaaaaaaaaaaaaacctttaaaaattgttggatgtgtacaaaagtcttactgccttattatgtgtatgggattctaaagtggcattccacttggatttcctgtgctacctatccaaattccagtaactacttcagtgtcattgcctttgttacctaaccaaccttcactgaaaggcaaatttagttcaggaggttagtttttagctagctttggaagtaagcctttatttattactttttggaggaaatcagagaagtgtcaatggaccgtcactcagactgagacttgagttattacagaagccaggaaaagtgtattagaaactgttgtctacaccacttttaattggtgaacaatttttctaagttatggtcatatatacccaaacaaaccaaatcaaactaaattactgcatataattttgggattgggtggcctagtttgaaagagtgatttaagtaatcactatgtaagtggtgagagatgcaggacatacacattattcaagagaccacctgacatgcatctcctccgcaggaatacattcgtcctctcttagagaagtttaacgcacatagtattattttactaagagaatatctcttggtgtcatatctaggggaagagaattaactagaattaaatttaatgtttgaatctaaatcattgggcaaacttctaataataacaattaataataggttacaggaaagccagccagaggaagtgtcagcactttaaaattctagaccccaaaaaactacaaaatcagaaaaagtatttttatgtttctagcttgaggagaagggctttagggctaaccagaggtctgaccctagaatgccaaggaactgagaatgggctccgatgaaaaccttccttttcagattccctgtctgctcaattaaagatgtttgaatccaaaggaagtcaaggaagaaaaagcatggaaaggaagagaactgattcctactgaaaattcaaattctattaccattctaactttcataaaaagttgggatcaagaagcagctgatttcctgccagggcttatattagggggtgattcttaaaggacattaggattggtgctcagaaatggttaatcatgctgtgtgctagccagggccagctggtaccttctttgccatgagcattcaagggacggctaacctttattgacaatctatatcgcaaaagtcaggaaagaggttgtgagctgattggattaaagacctggcacttcagtaactcagcacgcttccacttcactcaacttaagagagttcattgacagtgttaggatgtgaaggctgggaaacacttattttgcttcaagagttccacttggctctcccaaataggtacctcaaaaactgttagcaagcggcatttggatgtcttgacaggggctttgcagggatttttagggttttttccacattgtccacattaatggttggcatgattgtgcttgcaggccaagaaatgatcataccccttgccaaaggtaaaaaaaaaaaaaaaaaaatgagttgaaaattgaagtgacctctttccagctgagttgcaggcttattttgtaacctttcctcatccagttttccctgagaacctgggtttatctctagatagctgttcaggttttttagctgaggggtaagtatcctagctgagagttttgcatctttgggctgggtttgcagtggttgtgttttgcataaaatgtctagtctttgccacagatagtgagctacccactaatgagcccatggttttatttcagaagcacatgagggtgtgaaaccactctgttacctttctgtattgtcttagctattcaagccagtcagaggataatatatatattctcatcagcactcagagtagtcagtgaagagagtagatcacacttgggcacaccaggattcacataaacattgtatcttctctgtggatgctcaggccttgtctacaatgaggctttacaaccttcctttgttttggctcgggattacttcctggctgtctaataattgaaccataaccatgtaatattatgtaaaggcctggaaattactgttgctaaaaaaagtcatgtagtttcatgtagtgtagcatccttggcatcgttttccaaaatttgttccttctcccttttttttttctttcgtgtgtggcatgagtgtgtatctgtgtaaatatgattgtatatgtgttactccgatatgtaatccatttcactggctgagtttggcccctagccatgtgttaatataaagtaggcatggcttcccaatggaaatctctgagaatgacagtggagttgtgcaagcattttacattgccacataattgacttgccattttatggttaaaaacggcacattaggcagttgaatatgacgttaccttgcagactaaaaggttgaaggcccgaaactaacttttagctaacaataagggctgtgccccaatggaaactgagttcattttctgagaaaggtttggatgactgaaatatttcctctacagtcaaggactttggcatgtggtggctgaaactgagcttttttgtgtgggctccagttctcactgttctgcaatgctcatggcaagttgaatggtgagctagcttataaattaaagagctctgaactgtattcagaccgactgggtatctagcttactgttttaacatcattgttgaaaccagaccctgtagtccagtggtgctgccctgttgtgcaaactgctcctttttctcgtgtttttgtaaagagcttccatctgggctggacccagttcttgcacatacaagacaccgctgcagtcagctaggacctttccgccatgtattctattctgtagtaaagcatttccatcaacaatgcctaattgtatctgttatttttggtttaacacacactgattcatactaataaatattttcagtttt

SEQ ID NO: 7618 - DNA, 18 bp, Homo sapiens
acatgtattctgaaaaca

SEQ ID NO: 7619 - DNA, 5809 bp, Homo sapiens
agtgaagcatgcagagtgctgtttctttttttttttttctcttgaccagaaaaagatttgtttacctaccatttcattggtagtatggcccacggtgaccatttttttgtgtgtacagcgtcatataggctttgcctttaatgatctcttacggttagaaaacacaataaaaacaaactgttcggctactggacaggttgtatattaccagatcatcactagcagatgtcagttgcacattgagtcctttatgaaattcataaataaagaattgttctttctttgtggttttaataagagttcaagaattgttcagagtcttgtaaatgttattttaataatccctttaaattttatctgttgctgttacctcttgaaatatgatttatttagattgctaatcccactcattcaggaaatgccaagaggtattccttggggaaatggtgcctcttacagtgtaaatttttcctcctttacctttgctaatatcatggcagaatttttcttatcccttgtgaggcagttgttgactgagtttttcatccttacaatcctgtcccatggtatttaacataaaaaaaaataaaactgttaacagattcttgctcgatagcttgtttgtgtctgtcgtgttattagagggaactccactatatatggtcacttgaaattatgatgcaaaggtttctcttgcattgaaaccctcttggatattacagtatttttaattgaaagtcctaattctgttaaggaaaggagttgattaaattttaaggtaccactggtattttgggagattataatcagtttgttttcaagataatagaaaataaggtccatgagaatagaagttatgtgatttcagtgagttgatgtgtacagcatggctgtgctccatctgatttaccccattcttaagttctgagagtatgttctcaaggaagatttaactctctttggttttaaattactttttaaccagcctaataaataagtcttactacttttcataatatttcataatagttaaaagtaggtgtttttttcgtgctcaatttggcactcaaaataatgttcattatggaagtttggtaatactgagcaagcctgtggaattttctttatgaaaaatgattttagcctttgcaaatgttaaccatgtgaaacacattttcagtataagtatgcgttacagggtttgatactttcctgcacttaggtttgtcctattcttcatttattcatactaggatagaaaattttggaatcagaaaatagatccagtgtttagctacatacaatctagtacaagtgaatttttattcttaaacataggtgtgttggctctttttttaaaagatgcgctctacctgaaaaggaaattggattttagaactggatgtggtgcagtgaagtattttaggcccaggtctgtgtacacattttatagaagaatgaagtactctgaagtattttggttgccttttcatttcaactgtgttttgaatttgtcagatcacacatatattgtgttattgggcgctgtggtatcttttataaaacctcttgcttgtgtgcaaaagttcctaaaaggaaacacaagtaatgcctatccattactagcatgctatgctgcatgctttactgccattgctgtatgctttactgtctttgtaaaaatccccctctccccttttctggtaactggaaaagcatgctaaaaatagtcttatattttcaccccataaatgcagaatcagtaattccttggcttaaagctcttatataatcaatattattggtggtaaataccaagtttggtatctcatagctatctttttttaaagaaattaagttcttgaaaatttagccaaatcccgttttatgggaatgctctttagaattcattttgttcagcccctttgttctatggttgagaaatctgaggccttacgaaggttaagagaactttccccgtgtctcacaggtaggtagaggcagagctggaactagatatctggtctgttgactctagctcagtgtcttctggtaactgttgaaaattgtcttagtttgagagatggctgaaataatgaacataaaatgctatttataataacaagtatatgtgaaatttcttattgtaagactactaccggcttactgttgaatagtttggttatagtgtttaggctagaaatgcctcccacattggtaataaacattacaaaatacaatgtatttttaggtaggcattttataaaatgcattatgccatggttgcttttgagatagattgtagtctgggtagcatctttaaaatgtatgtgggcttaactgttgttcatatcaggagatgctctgattgtataggtgagactctgtttctgttatttttaattgctgtatgaaatgtgatcagattattttactaccaacagttatagtttgaaagtccaactgtattaattgactgataatatgataatatagagattaaattgtttgtcttcattccttatatgtttagaagtttttgctttgtctgcctgcttacttgtatatgtaagcatgagggaaatacactgttgctaatactgaaattacaatcaagtaactaaggccttgagttcatatgtgacactgaatgcactagcttccttcgttctataactaatgtaccttaacttcccccattcttatatttacaagaagctaagtcattatgttctgagtgtgtggtatgttcccttaaaaaaaaatgacacttggaagaaaaatgtatgaaattcagaaattccgatcaaagaaaagtaattctttctttttttttttgagacagagtcttgctttgttgcccaggctggagggcagtggtgtgatctcacctcactgcagcttccgcctcctgggttcaagtgattctcatggctcagccgcctgagtagctgggattacaggtgtgagccaacaagcccggctaatttttgtatttttagtagagacaaggtttcaccatgttggtcaggctgggctcaaactcctgaatccgcctgcctcggcctcccaaagtgctgggattacaggtgtgagctgccgcacccagccaagaaaaataatactcttaaatacttagatgttcacctaaagttgatattatttggtatgggaattacttttgaactgtaatctttcagattacaccactttgaaaacaagttttaacagtagggtaaaaatatagtttttgagggtattcccaacttgtgatcttctaccactttagagacattcaagtaatagttttcttagagctttgcacattcctattcactgagattttaaaaatttcacctttattcgagggaaggatcaatgcttattaccatttggaaaaacgaagatcagaaggtaaatgatctttattttctagctttaaagggaaattaaaccattcatgaataaactttaaaaatgtgaagtgtccttttccttttcacaatacaaaaaaaatttcaacagattgtgtggtttgtgcatttatatcctgttaagcattaatagctaatcactgggacttgaattctgatggcagatagtctcttgcttagtgagatggagttaactattttttagtaggaagtgagaacagctgattttcatgccacgtttcatagccccacttttggtagactaccaccacgcttcttcgcgtaagcagtggcatcttgggaatgaatgcccagccgctcgtgggttggtgcaaagaagtataaacatatatcactaaggaaaaagaaagtttgtcttgcccttctgacacagtgtgtgcacttcaggcaatttttggaaaatataaaaaattccaaattctgcctttcagcagcatcaattgctaggaacatttcattcatttccctgtaatattaatgttctttaagcataatcactaattataagttgtatcctatttttttccagcttaatttctgtggtttattgaaaaccaagtataaatgtgactaaaagcattttgctttgtttttatagttaactttcttaaggttatggacattttataatgtaacatttgattggcctggcctcttgacaattcccttctagttatgcatatcctcctgttgccacatttcttgttttaaaactcagtttcttgttttccagttgttgctatgtataacacccatcttgaaagagagtatataggaagttattcagataacttttgtagtagtgatattcaactatagcagtaccttaactcatgatgagcttaggaacataaaagataattgttgcttgaatagcacccccagagatactgacctaattggtctggggtggagatctggcatggtagtttttttcaagctccaatcatcggccagacagttgctttatgtaggtttttaaatgccaaaggcagatatgaagtagatttaattaagacttgacttcagcaatacaggggaacttaaaatacttatttttctttaaactgcaggagtcactgttaggtattgcttaaaaaaaattgcataaaagctttgcttgtcaagttaggattgctggaataccactaaagatttttgacttgtgaataaatgagctgtcatcgcaaaaaggcgatttgagaaatgtgggcttcagtattaattgccattttgctgacacccagtgtacctacctacctgagaaatttattttgtccatcatgtatttctcaaagcaaaaggtggttttcaagtataatgtcgttttcaacatgcttattacttagttttacgtcagctcatttcatcatcattgataacttgtgaaatacttatctccatcctatggaataggggagacgggtttagacaggttcaattagctcaagtctacacagctgaagtagcagagaaagtgggatctagatggtctgatcctagtgatctaccatatgaaggacatagtttgtgtcctggtccaagtcaaatattgactcctcacaaacagtaagtatggcaattttgtgatgcctttgattccactttacatggagtactattatttgtgaaatgtctttaagatttttggtcttaaatttttgaagactgctttccccctttatctcccagaaaattgagaagaagtaaactcctgcccactaacaatctcagtccgtgaacaaaaccaacatgaacattcctaaacaagagtgtgtgttactctaagaagaaggctatagaatttatggaaatggcttatgtaacctacaagactggagaacagaatgtgactggccttttctaatggtcctttaagatttaatgattaaagcaagagttttttataattgactttgtggtctaaattcttgatactgtttataattctacaaagaacaaaaattgttatgtactataggcacttaagaaccctgaggaaaaataatacaatgtgtgtgtgtgagagagagagtgagttactgacattgttccaaaaaaaaaaaaaaaaaaaaaaaaaatgtggagggttgaaatggtaaggaattggaatcttttgtattttcgagcaataagaattcctattcttgtttcaaatagaggtttgttaggaattacagttgtggggagcaaactttcttttttgtgctgttttaattcaaaatgtatatccttaattgtatataatatgtagataaatatatgagggtattaagctactttgaattaaatttaaggatatatttcacatgaaaacaaatacaaacgagaatcaaaataaagttttgcaaagt

SEQ ID NO: 7620 - DNA, 657 bp, Homo sapiens
aagttttagaaagttctatttttccaaaccaggattccttactattgacagatttgctttaccaaaagaaaagacatttattcttttgatgcacttgaatgccagagaactgtccttctttttctcctctccctccctcccagcccctgagtcatgaacagcaaggagtgtttgaagtttctgctttgaactccgtccagcctgatccctggcctgagcaacttcacaacagtaattgcactttaagacagcctagagttctggacgagcgtgtttggtagcagggatgaaagctagggcctcttatttttttctcttaattattattatatttctgagttaaacttagaagaaacaactatcaagctacaacttttcctgccattttcctgtggttgcagcctgtcttcctttgaaattgttttactctctgagttttatatgctggaatccaatgcagagttggtttgggactgtgatcaagacaccttttattaataaagaagagacacaggtgtagatatgtatatacaaaaagatgtacggtctggccaaaccaccttcccagcctttatgcaaaaaaaggggagaatcaaagctttcatttcagaaatgttgcgtggaaaagtatctgtaattaaagtttcgaagtaattt

SEQ ID NO: 7621 - DNA, 154 bp, Homo sapiens
tattttgcttgctgaaaagaaaagggaaacaaaggtaaaatcctgacatgccatttcaaggacttgggaatagattagggatatccgtacttcattacagtcatgattttggatcctaataaagactagtttttagttaccatcttcccaaatc

SEQ ID NO: 7622 - DNA, 785 bp, Homo sapiens
ggatgctgccgccaccctgcgacggagcggcgccccggactgcctgactgccagccccatgccatggtaggaggcagagtctctagttccatctcgctgccgtctgtcccgttctgtgtcgaccaccaagcctctggctacctctgtcccctcaggtttggttgtgtagcttctgttgtcattgaatacggcctcccgcagcatcccacccccaaaccaccgactctcattgccgacactgcagcagaatctctccgggtgggagccccattattcattctccctttattgattcatcgaggagaacttggtagatggggagaaaacacagttggtttttttttccacgttatcaaccgtgactgcaagagcgttcgtgcagtgccctgagccacggccgtctctgattctccctttatgaagctgcaggctgacgagagatggtcccttcccattggccttagcccaagacttggagtcgaccccaagcgacagagtgaccagaaacccttttacagtcacattcagagtcgctgctggcctcaggcatttgaattagagctactttgagcctcttaggcagaaaacctaccacattcactactgcaaaatgtgtcctgtctaaaaatgattctctaaactttccctatacttaggcatagtcttctttcttagattctctttgttgttgtccctattgctggtttattacactgtacagaccacaaaatgtaatattcttttgtataactactaaagaaaaatccttgtagatctttgtgcct

SEQ ID NO: 7623 - DNA, 586 bp, Homo sapiens
cggcagaacccgctctgaggtttcctggccatagccaccctttgaaatgctctctgtgtgttagagagatactataccctagaaactctgaacacgccagaatgctgaaatgcccttctacctttgggtttacagccccctccacataaattaagaaattcagtatttctgcactcttagctggattctaaagttctgtatagctcgtaatgatggtatttttatagcagccttttaacagaactagttaatttcgtgtatatgaatctttctcgaagatctggtcaaaactgtattcagtttcctgcccagaatgatcagattgaaggtggttggtttttattattatttagtgtgattgatagtatctagaatggcaggtggtgcataaaagttaaagagaggggaaagattacttagtttggttatacagttataaacaccatgcagtgtattcggtggactgtgctatttctgtttatcctttgggttttggtttttgttttttttttttttgccttcacagtgagactgcaaatgattgttctcataacgtatattattaataaatgtggtcctataattt

SEQ ID NO: 7624 - DNA, 419 bp, Homo sapiens
ctgcggctgaggcaaagctgctcccaaggcctccctgggctgctgtgggctcctggggaggtggccctcgtggcccacgctccatgccagtggctcacgctctgctcctggctaccccagagggagttgtcacgctacagtgagtggctggccttttaaatcgacgtctctctcaccaggatttggtgtttagctgtttctctctttaatctcacgtagcctttttcaggttagtacgtgttcttctgtcagggccaaaactcaaatctcctgtgaaatacgtattgataatccaatcttgatttttccccccagaatataaatctcaggtaataaggctttagaactgctgataaagcggatcgttctcaggccctccccccggagtacttcagaatgcaataaatcaaaataatggc

SEQ ID NO: 7625 - DNA, 323 bp, Homo sapiens
ggatgcaggctgtcgccggctcttgagccaaacactgtgtttcgtttggctcaatgacgaatgttgaagatgcttttatgttctgagccacatgcacttggaggccgctggtcacgctgctcaggagtggtgcccagaaaaggaaagggcttggtggtacatgaagtgggggcagtgggcagggtgccctgggggggaggcatagagggccctgggggtcatgggaagcgagcacgcagcaggcgtgcccaggagcgtgtgcatgtgtcagagccatttggtccatcatctcctgcaataaacccatcgcaagaatgaccttc

SEQ ID NO: 7626 - DNA, 438 bp, Homo sapiens
tcggaatagagccgccccaactcagatcctacaacacgcaagttccttcttgaaccctggtgcctcctaccctatggccctgaatggtgcactggtttaattgtgttggtgtcggcccctcacaaatgcagccaagtcatgtaattagtcatctggaacaaagactaaaaacagcagagaattgcgggttctacccagtcagaagatcacaccatggagactttctactagaggacttgaaagagaactgaggggccacaaaataaacttcaccttccattaagtgttcaagcatgtctgcaaattaggagggagttagaaacagtctttttcatcctttgtgatgaagcctgaaattgtgccgtgttgccttatatgaatatgcagtatgggactttgaaataatgattcataataaaatactaaacgtgtgtcttc

SEQ ID NO: 7627 - DNA, 1086 bp, Homo sapiens
atgcttcccagaagaaaggaaagaaggaggtgaggagaggacgagcaaggacgggacggaaaagcacgtctggctgcgagggcacacagggccggggaggaggattaggctggactgatcgcgggtcgcaggtgaccccgggaccagatgtccctcccctcatgagcgtgcaacagggagcagccccagccagccccaccgccgccgtctgcgtggatggagggctcgaggccctcgcccgtgtcccttaggggcggcgcccatcgtcctgcctgccgcagtggcccagccccttctctccctgcaggtgacccgcgccgcccccgcccgcccgcccacgctgtcctccacttaggctcctccacaaacgctggcgggtgtgccgccctccagcctctccgcccccgtcccctcggtcctgcagatcaccaagcagctctcctgggcccgcggctgctccgggcctcacatctgctgctggcctcggtgggctctgactgcggggctcacggggcctggggccatggctttcttctcggcccccaaatgcctttcctggagtggctaagcctctcctgacgaggctcctcatgcggggagagggctggggtccaggggtttcccggccctttctgcaggctgtgccagccccctccagtctgccactgccgtgcccgggggacatcctgcgcccaggctggaggccctgcctcgctgcttgccagcctcacctgctggggctggaggccatggatccctcatagtatccaaggtttgagttcctgtttttcgccttatagttttgtgagtgtttgagggacaacgaccaaaggtcttttccccaccatctttaaatcaaagttgtttaaaacaacattaattttaaaaaatacataaaagcaacccatgcttatggttaaaaaagagtacaggagtctggagtccgttgaagggtaaaggcctcccgcaagctgccagtcggctctttttcgcaaagccttccagaagttttctgtgcttatgaaagcgtatgtgtggcctttctcttcccttcttttattaaacacagataggtttatgctggat

SEQ ID NO: 7628 - DNA, 207 bp, Homo sapiens
tctaatttctgttttataccttatacccaaaacacttactaccaacacagctgttaaacattctatacaaaaaaattgtatgatctggtattaggaaattactttcacagtaaatatcaaagaaaaaagattaagggtctctttgccatgcttttcatcatatgcaccaaatgtaaattttgtacaataaaattttatttcctaagt

SEQ ID NO: 7629 - DNA, 2282 bp, Homo sapiens
gtacaagctaactggagtaactttgctgttttgctgcttgttgcatgcacacaggaatggaaagcgagctccttttccccttccccagcgccgtttgacctctcccaagatacaccagcagcctgcttactactaaacgcaatccaaaaggcctttaaaaatacagtgtatattttttgtactagtcagtttattgacactatttgaaacttttgaaatataaacggagaggctttctgttgagacattgtcaccaaaacaattttttgaaatgttcctgaaactaatttgggtttaaagattaaaagggttgttaccattcttatctgagtagttgggaggaggggaataccactttagttcatttggaaaatatagacatatttcttttgctttcttaaaacagcttaaaatgatgaacttttataattttaatttgaagattgaataaatattttttataaagattgttttgagtgctgatttgtttactttttgtagatttgctttatccatgatattcagtacaactctgtcatttctttgtaatatttaaaaaatattagtaaaggagtgaattaataaagtagtaatagtaaaatgaaaggaacttgactgtacagtttgtagccaggttaagcatttggtattgtttcatttacaatttgggactaagatggaaacactttttttataagtttttaattcatagtcactaaagagataaatgtttcttatatacatttgtgtatttttatggtgttatttattccatggcttagcttccttcaaatcaaaatttggacacacactattaagagaagccattaaaattttactaaaattgtgcatgtaaattaattgtcagcattccatgtctcaagattttcttaatttagttcgctgtttaaattaattcatgtcctgtaaagttctgaccttgataacaaagctataaatatttaagtttgctaatatgcgtaagtattatcggtaagttacaagatggaagaagaataacagtagggcacagtcattctgtgaatccttttacttatcaaaatttggtagctattctaaggcttttgcagaaaaataagtgttcaatgtttgtagttcttcaaaagcatgttgcagtagccagccatactatgtgtattcccagtatcatgtacgcactaaaaaaaatgtgtgcttgctgctgctgtgagtgaaccattgcttaagataaaaaacttaactagatctgtaaatgtacagaatagcatcagatgtttctgagagattagaaaatgttttgaatttataaaattaatgtttttctttgtaacatttatatatattttttaacattttaagtttaacagattgtattcctttcaagtttctatacttgcttaagcaatcttgatttgagtaagggtcttgatttgtgctattatgttctgttagttttggcatgaatatactaaagcttttttttttttttctagcatgtgttttctcctctttggttctctttgtatttactacttttctctttttcttgtgttttttttttcctgtttttgttttgtttggtgttttgttcctgtcttcattgtttcaggtatttctttacccctctggattccccacgggctggatcgagatggtccagttatgcccagctccttcctcctcctcctcctcctctggtagagcactcttgcgatgctgacactgccaacctccagtatcctcaccctcgcagacgatatctctctcggcctcttaatcccttacctgagaatgaagggatttaaaacactgatttaacattgaaaggccttattcaagtgcttgtaaatgctttcatttctggctgctttttgtttttcattttctttcagaagatttttctaacttagggtctgtcttgcatgtattacaaccagaatacagtgtttggaacctaaatctgtttgtgcgtctgcatcaaaggaacatttgcttcactgggtgataacctttgatgaaatgagatatgtccaagtaacgttaactgtgaagttacacacagtagctgacttcaaagtgcctgttctgtaaattttattttaaactgttaccatagtcttaagttgtttatgctttatcagactggctaatgtgaaagcataatattatgaagtttattctgccttatgagaccttaaaaaatggatttcattttacaggctaatgttgtaactgactagtatgtaaaataaatcattcctgtgtataaagcagcaaaacct

SEQ ID NO: 7630 - DNA, 280 bp, Homo sapiens
ctagaatacatttttgtgtaaagtaaattacataagttgtattttgttaactttatctttctacactacaattatgcttttgtatatatattttgtatgatggatatctataattgtagattttgtttttacaagctaatactgaagactcgactgaaatattatgtatctagcccatagtattgtacttaacttttacaggtgagaagagagttctgtgtttgcattgattatgatattctgaataaatatggaatatattttaatgtggtatatccag

SEQ ID NO: 7631 - DNA, 7097 bp, Homo sapiens
ttccttccaacgtgcacttcagctggagaaagaaaccaagaagggaagcggccgctgggcccctcctgcgcacagtgttgttcagtttcacatggtacaaataagtaaaaccaaatgagcaaacacggtctttgtttctgattccttttaggggaattgcatgcaaactagactgaaatgatacaaacttccatctggtctgaccgcaaacagtgtttatttggggacaggggttgggatgggggtgtgggcaggggaaaacagagaacgggatgctttgaagataccatgaaataaaacccacagaggtatttgatgtatttaattgtgaaaggagactttgcagataaatgaggccagaatggcatgttttataattaactgaataaagaaggaagcattattatatattattgtggggaagaaccagccagttcgctttttctcctaaggtgtggaacttttattttgttttaaaaatatgaatcaaaattcctgtgttgtgtgccaaggtataaagtggagaagttagatgagtgcaaggagctcctttgtgttgtgatgatgtgttttaaaagttgcactatcttaatgttgaaaatatttacaagggaactgttttacgtgaagttctgtatgttgtcttttcacctgtggattgtaatcaggcccaaggaatatcctggagtggtccccagaagcatccaagaaaagatatttggggacgtagcctaacattttaccaacttacgtaaatcaaaaaagtcattattgttgcaggagtttgcatcaaatagcagtgcatcgctgaagcttttggagacttttggatggaagataagatagggaagattaagttccagcatttctgacttgttattttgagttactctgctactcttaggctgcatagtttatgagaaaatgaacacatgcatttatggatccagtatcatgcagtgctgccctcatcctccagcagtgcaatttcttcagtaatttagatttttttcactatagcatgaaatatattcaaatacataccttattttatgcaataaattgtttaaaatgcaaggtggttattctgcatactgttgaaatatgtgactcctcagtatattcccattgcctctccccctttcctcgacagcttagttcagttctgcagggctgctcagttcacaggaggctcccagcagccaccccacatccagcctacacagaacttcgtgtgggagtggtgtgggtggtggtttcttatgctttggaagcccctagaaataatgacggaagaatgccatgttgctgatcgtggtaataagccattgtgggttattgtatgtcactagtattagcatagcattcttaaaggaatgcagtgctcaaaacctacccaaattcccgcaggattctaccaaacccttccccaggccagcttttgtactgaaggcaagaactggacagtcagagaacagtggagggggcaagtgactgaagagcaccgggtaaaaagcacaacatgcagttaaaatgcaactagaaaactaattttaaatattgttagttttaatattcctgatatttacaaatattcattcttatatacaatgaaaaaaataactttcttctgcagatgtaagcactggcttttataagagcagcagccaacacgtttagcagacactgcgcgtggagaagggcttatctgcagtacactctgccatgtggagggtgggcctctgtggcctcttcacataacaagatgagctggaatgatgattccatgactcccacctatgcagccttaaagccaaatccgcgtgtgtgtgtttgtgtctgtctgtgggtctcgaaggtgatccgtcggtgcggtggctctgtgctgtaactggagagactgttccaaaccccaagagttgtctgatcctagtctgttcccttctgcttcttacctctgtagataggtcactggtttttgtttgtttgttttgaggattggaatttccattacattcatcctttgcacacagtaacatccacagaactagtccaactcttaaaaggagagaggaaaaacacaggcaccagttgtcagctcatgcttacaacctgtgtggaagtatatacagttgagagtcacagtggaggttctgagactggattcagtcttgttccagtgacagttggaaggcctctgctggagagacaccagctctcagggcagagattggcttggggccagaaggaccctccccaaccctggagacaccctgaaggttcactggctctccagattagcctctcttcctctgtcaggcaaagatgaggagcccgtgttcccatcgggccctgctggcagggacttgcagtggattcttggtcaggtgtgcccacagatgcggaggcgaggtgagtgattccatcatttcagttctcacctgcagttttggtgaagcaggagatgcaccccacagctctagctctcaaatggcttcacagtccttacttctctacctgcctcaagaaggggctcagagcagagacttgtgaattccttagtaactgtgagtatatgaatgtgttgcacatgtccacagtattggcgagataattacataattcagatacctttaatcatctttcaagaaagaggctcctcccattcaaccaccctagagaactgcctttgttaaatagttatttaaagactcatacatatcaaaccatgactttgaaaggtcttcgaggctggggctctgtaatgaattagtttaaaagccaaggtcataacatgaattgatggtcaatttcccttcagcagaaggaaaaggtgatttagatcagtagctcttttgaaggttgtggctgacctgttcataccgtgtcgcctcatggctagtgtggcgttgaaagagtagcgactgggaagatacaacttacacagtggggcctattgttctttcaagaaccctttttttagcttatagaacccatgggtccagtttagtaacgagtgatttaggcaatcaatgataggtttataatcttagattattccagcaaagtgtggattgcattgttaggaagaacatttggtgggaatgaacactcctgggcataccgctgacttttgtcccttgttcccggtgtaggagacccaaggcatcttgaatcccatctataagaacacaatcttccagcatacgtttgctttttcagaaactctagcattctctttaaatactgacgcaatccttaatggaaaagagatttcatgaagcaaattatgtatttcaatagttcttctatttttagtgtccaaaatttactaatacagaagcttgacaagcatgtcctcaccctccccaccacataaacacatggacacacacccaagccacaagaaatcccaagagagcagaagcgaatttttaaaagatttatcgtgaggactgcatttccattcactaattttggctcaaacttatgaggcaggaaataggggccaacagtaaatgggggaggcctcctgacaccagcagaggaattttgtacccaggcgaggacttcttgaacttctgcgtatctccgtttgatctctttcacctttatttcatcttcataagaatgagaaaggctcaaaaggaagcacttttagaaatcttctctgacctagaagaatccatccaaatccctgccttcctctctgaaccaacagttcccttctctgacaggggccatcctctatcttccatccagcggctcttctttttaggaaggctctggtgcagagcacttcaaatatgtcctcaggccagatactgattgctagtagagagacacccggcacccagtccgaagccctccctcaaaggaccggctcatggcgttggtcactggcaggctcagagacattctgctgtgggcgcagggagcccggccccccatgcagccatgactggatgcgcccccatctcgggggcttgctgcactgcttgtttattgaattttgctacttagaatggcaacattaactttgtgtaccattcattttttaaaaattttccaaagctcggcagtgtatgaaagaaaaaactgggaaagatacttggtttctgttaacttttgtgttgcttgcttaagtgattaaagccagtgcttggagccaagccttcatgccacgaacatgctccacagcctgccctttgctctcctgctcacactgaccaagaatgccgcgtgcttggcctactgaggtgaaaggacaattgaatgacaggtgggcaaagggagaacttccccttcttggtgcgaggaaagtcacaaatttaaaaatgttgcttccagcccagatcctaaatgctagttctcagcagctgcgtggcttaccgttcgccatttccaccaccgccagctgccagcaccgctacagatcacagagatgtgaacagacaatggaaagcactcttagccttgcagtggtctacattttttaggaaccaatatttcagcattctttattacccggcacgctgtgtcctttgcagagttcaagtttatgttactgccagggtcagacagtcatttgctgctgctgctgctgctgctgcttctcgaactggatgcattaggaagctgctgtctgagtgtaggaatgtcttgctaagaaagcaatgtcttccttcatccttttctttcttccctctgcgtgtccttgtttttgtgtaatgcgggagagggttagagctatagagattatatatacactatccgtgcacattatatatatgtagatatacccctatcatgtcagagatctgcatgtcagtttttcagcaactaaggtgcctcatgttctgagttcagcagatataggaaccaagccgccccctcctgcacttgatgctcccacctttgttgtgcctcacttaaaatggtgcttttttcagttgtctgtcttttcttatgtttttatttgtaaggtgctgtatataagttgaatatattatgcacatatcctacccaatgggtagaacaaaaagttgttaatactgtaatataatgtatagatgataccaattttaacagaaatggcatagaatttgtgaatgcctatgtgctttgtcctcttttgtaaggaaatttgcaaatggatgcatacagattaaagtctatgtagtttattttcctattaaatatcaatattataacacaagagaaagaagtgtgaacaaacaagcaacagtttatgaccagcgtatatatagcaatggaaagttgcatctttgctgtgaaaacactttaaagaaaatactttttaaaaaatcccacagctttttggttgccactagacgcttcttattttaatcattttagtaatgctcagctggaccagtgttagttatatttgagtcagaaaaatgttgtttttcaacttgctttataatctcctgcatctatctcctgctgtagcatcacgaaggtgtcaggcaacagtgaaaagtgcacatttttgttgttgcagaaactgtgtcagaggaataagtaaatcagcctgcagcagaagactttgttcagctccagaggcatctgtgaccgtctgtgtccaagtctctctgtgcctttttcttttacaaactgaagctgtggagccaatgaagtaacagtagagattgtagggaaagaatacctcaggaaaaacaaatacacttacaagaagaccctgttcttagaaaatgtgtttagttatgggttagcactagaagagacttggctgtcagccagccaagtgaaggacctctcatccattcccattcatgtcccatcataatacggacccaaaaagcaaactcggttttgccatcagttagaaattacgttttggattgtatattgttacatctctcttccggcttagtttttagtgtctgattgtgacctctgcatttatcttcaaataccctaattttaaaacaaaagaacaagaaaagtttataacaccatgttcactaaaaccacggttgaatcttgggtgtgggcatcctttcgagtgttgtccataagagcagttcgtggaattttgcccatctgacccatattatcagcttattctgccaccagagtagagtctaataaattccaaagtttttatttgctccatggtgtatgttctgactttgaaaatgtcagattctataatcatacccctaacatccaggaaacaaatgacagattatctttaaactgaaattgactctacaatgcaacccttaatgctgaatggattaaaaaagtcagcccttttagtatctgtttgaaagggccgtaaaaagttgacacttttgttgttgtggatcctgcgtgtctagacccacgtgttgtttccatcgtatactgtagggtgcaccccttgggattcatcattaagaactgaggctcactgttgtcagaaacaaagctcccaccccccaggttcaaccttgtgggagaactgttgagcatgagaatgttctagactcagaggtactaaaatttgttaccacatcattgcttcctttctacaggacgaattgaggcttaaactttactgttaatgatactggttcattttaatgtgcttgttggtatgttgctatttttcatttcatagctttcaaaaatcatgctaattgtatacttgtctagtttaaggctattttaaaatatgtacaatactattcacagcatttagttcgtttaatttttattataaagcaatctactaaaaaagtacaactgtatttgaacttttcaatagttgtttgtgagctatgataatcaaaagtcattaaagtcttttttaacaaacattcgtgcttacttttcaacataattcccagttatatacagaaaaagatttccacctgtcacgtatctgcctcttttacctgagcaatggtgtagttcttagacctaaggtctgtaattgcaatacttttaaagaaagatgttgctctaagtgctgtttgttagttatgaaatcagatttttctgcttgttcttaatgctgtggtcaaaccatagcacaaaatcattaaaaataatcagcggcatac

SEQ ID NO: 7632 - DNA, 4576 bp, Homo sapiens
gcacataggcagtagtcccagaggggccgtgttctgtcctgcacaaatttgaacaactcatctcgatatatttgatatttctctgtctgttgattttaattctaaatgtgcaggatgctgccagaaactccaatgtagaaattcaacatttgctgtctgtgacagatgaacttttgcatgtgtatataagaatgagttgggacctctgtctttaaaaatctatttttaggtaatgttctaagaattccatttgcctctatgatcttagctcataaaaatataatatgacttgataaagcaactaaactctttccacagtgttcagatttgtcctgtgtgtgtttacagtattcaatttattgcagttatagaattggtcagagagcattttcatagtgtgctcatttctatggttttgttatatagcatttttcaacatttaatggtctgtacagttgaatgtaagtgttcaatatgtattgctgaagttataagtttaaaactcaatttcagatgctcataaaagttacttagctaaaattttagcaatttattgcattttgaaataatcattaacatgctgcaattcaggagctggttagaacattttaagtggcagcatagaattttggaattttggggctttcttttcagaaattgctaccatagtaattaatgtttccagttatcaagattgtgattagacacatttacctttcttcattgaacaaatggtgccatagttatttttctcaaaatttagtgaaaatccctcccatgtagacatgttgcacattttttccaaatttatacatggaactgcagtaggaatattctcaccatctgatgccatgtacccacttcagaaataagcaatacttgttcctctgttacaacctcagcactttgcaccgtaggagccattgttaaagttgtcacttgtgtaactgactgcttttccaaaactggtacttatgtgaactgttgtccttgctttacaccaccatttggaaaacttaccagtttttagatgtagatgtagtgaaaaacttcaagaatgaagcagagcaattgagtattcttttttaaattattaagccatgatttacaaaaacattactttctgtaattcacaatacttgttttaaaaacatagtgtcttcattagtgtgcatctattaactgttcatggtgttagagttgcaaactttttagcaagaaaatatggatttcctcatttcagttccttctgcagcctgtgaatctccacaaagtgttaccagtttacaaaaataagtctttttgccttaagtcattttggaaataagtaatactgcatctgactctggtggctgtattagctaggaaaggtttgtaaatggtgtcagtgaggtggggaaaggaagtcttcctgtcacatatgcaggttcgttttcattctagggcagtgccaggaagtatattgatagctttgtaggtacaggaaaaacatcatcattatttcctctgttcacatttactggtcttaattaacaggtaataataatacatgtacttttagcctgaaacctcttccacgccatgggtaacttgggggagagaagaatcctccaaacgatggagtagccagtggtaatacaaagcagggagaacagaaaggtagagttactaaggccttcagtgaacagaaaggagcagagagcaagattagatctgagaagatgctctggggactgagcccactgttgttggtgtcagggaggcttactggagccacacctgcaggcgctgtgttcaggcaccaccttcctccttgagctttgcctgtctcttgccttatcagttcttcctccaccaccctacacccccctccccccggccccaagcccctgtgtctccttgttacaattaagtttctggatattgacttaagaactgttaggaagaggactagaaaaggcttcccctgcctatcctctccgatcaccaaggtggaagggagctagtaggactcttccttgacacaccttgtcgtctaaatgttcggtattctattcaggacttacggtaactattatgagggaggcatggctttccaccgtcgggccaggaagagcacctgttgctgcaagctcagtgaagtggggcactcccagacctgccatgcagtttatcctctgagaatggaattggaaatgaagacctaaccagctattggtgggaatgacggaactggggattgcgatgattgatctgggaacatggctggattgtgatttaaccaagaatgctgatgttgaattctttgggcctagaatatacttgagaaagcactagtggcttgtgttcagggagaggagctggcagtttttaaccacttctgtgggagccgtgttctaacctgtggaaagtattgcaattctgtgagagtgactctgcagagtcactgcaccatcaggcttggccctgctgtgccttcagtacccagccaggttctctgggtccagggtgactctccaaagaaattggccttcagctggagaaaacattgggtggagactctcacttatgttaatgcaatcttgaaatgactgaaaggtagattgccagcacagtgagtttcccagcctgctcccccatccacacttggaaattgagggagcatgaccgctctctgacttcacatgttaatagaggatcagagcagagttgggagtatattggtcaggatcatagaaaagaagacaaagcttgctcagccatgagatggccaggtatccagttttgttaactctctttgggaatttctttttcagcctgttttttagcttagtgccattatgtcattttgatttgtattcaagtactcttcaagtatctttgtaatgaaggtttggctacttgtataggtctgcctgcagggtgaaaatgccagtgtgaatattctagctaccaaacattgttttttgttgaaaaactgactttctgttgtctacctcaggccttgtgcatttgggttatctcaagccagtcaccacagagggtctctagggtctgcaaaatagaggccaaatccagggaccaggccctaataatagaagttgtaccaaaatgcctgtggtacttgatggcctgttggtcaaataggaagtacaagtgtgtgatgttagaacctccctagttgctgctatatcaaacactgcacacttgacaagtgttttcattccccgccctctgacagaacaacattcctaattctttgaaggcaaccagtgcaaaggctactacacttgtgtaatgatatttagcagatgcatacaggactggatcccagggcactgtcagttcttccctccctctcgtgctgctcagtttgtcctctgctcccatgtaggcctaaagtcaccccactccttagtgcctgcacctcaccacgatattgaggaagcacaggacatccaagggtactctccagtttggctgtggagacttgagcaagccctaaagtcccctgctccctggacttctcctgggttgtgcttttttgggggcaacataccttggacaaagctgagctgacagctaatgtttattagcctcctacctaagtcagtcactttgctaaattcttcacctgtggtaactcattttgattgttataacatctcagcaccgttattcccattttaatgatgaggaaactgagtcatagaggatacagacttgcccaaaggagagccaggattttcacaccccctcctcaagctgggcctgccctccaagtgcttgttatatacctccacgggtgtcagcccagatgactcctcacccatccaccacctgcagcttgagatgttaactattagagctccattcttttggttcaaaacgttgatacttacttagatgttccctgagaggagtgtttatttctgagtaaggggctttgttgaaagagggggttagagagagcaagacagcacttgagtgcactggcaggaagcagagataagacttgaatttcagtttggtagaccaccttctttagcagcccaacctgtagcaaatctagtttagcctgcatggcagggagagggattctcttcccaccctcaccatttgcaagtggcaggagctgagaatgccagtacgagagtgtagccaaagtgagaggctgagagcaaaggagacatttttttcagttttgagtcgagtatccagacagaggcaaatcattttgtttaactttttattaaagtgtaactatagaaacacatcaatgatttttcacaagtggagcacgtgcatacaatcggcaccccagaagccccccgtcagattcccttccagttaactacctctccaagggaaaccactatcctgagttctaagcgcatagattagttctgtctggtttggggagatatataaatggaattatgcattcttcgtatctggtttcttttcaccaatattatgtttgtgagatttttgttgcatgtatttgtacatggattttcattctcatggttgtataatatttcattgtgtgaataaaccacatactgtttatctg

SEQ ID NO: 7633 - DNA, 1279 bp, Homo sapiens
atcaatcaactttctttccaaaatatttgttttaacattgacataggtaagggtcaattttttatatttggaagctcaaccattccctgaatgcaaatgcaaataattttgaaataattgtctaagattttattttaaatattgatacttttaaaggagcattaaagggtacagctttataaaacgcactttggaaaatatttgtgaatttgttaaaggtaaaaccttttcaactttttttctatgcagggttatctttcctttttttccccgtaattagcgtaaaacaacacaggaaagaaaatatgccctggaaataggctttatcttaaaactcaaacaaaactaaagcaacttacaataagtggacatgttgctgctgctgataattttctgaaaaactgatgtatcatctctcagtggcacaaggcttaagagggaaaaatgggaagggaaaaggagagcaatcagaaatatgcaggtcacttggaaattaggtaatgagggaaaatgctatgaagagttttttttttctcttagtttgttgttgttccagtttatgtgttgagacaaggcactccttagctttgggtctaataattttttgtttgaaaatgagagtgagttgaaactcgcctagagatgaattttaggaagactttgaggaaaccagattggcagtgaatatgtggtggtgaagtgagaaacacttcagcagaaggtggaacaaattattaactgacttattgcccatcctggcagaaacagccacttagataagagtctaaagactcctctcaaacctagaatgtcttggtgggaaggtgggagataaggagcttgtaaatagcaaaatcaagtgggattttgagtttacttgtttgtgttctacccatacccaggaaacttaactggagctttaataaatgacactatctcttactcttttctctttttggccacatgtccaactgataaagggaactagccatgcgggtgagagatgagactgaagtgattgctgcactaattctcagaattgtgcattacagtgacctgaggacattttgttaaaaatctacaaatgtaggctttcccctgaggattttgatgtaatagaccttataaggcctgaacatttttaaaaacattttcttgaagctgggcacagtgacatgttcctgtagtcccaggttgagcctgagtttaagttcagcttgagcaacatagtgagactcttgcctctaacaacaataacaccaaaaaaaacaaaaaacaa

SEQ ID NO: 7634 - DNA, 1109 bp, Homo sapiens
tgtctctcaagatttcaaagtcatatgagatttgggatattttttgtacaggttgtgtttgtttatgtcagtttttaataaacataaatgtgggacagagctgtctatttagtatatcaaagttttagtagtttcctccacattcacgaaattaccacagtgagagctaagcatttctactgggcagtttcatttttagttgatcaggttttaagtttttgaactaaaatttttctttttctttttatgatgaataaggttaaaataaaagccttagacaaattaaatttggcagagtttaattgagcaaaggacaattcacaaatcaggtagcccctgaaccataataggctcagaggcttcagcccagctgcatagttgaagatttatggacagaaggaaagtgatgtatggaaaatggaagtgagatacagcaacagccggattagttacagttcagcgtttgccttatttgaatatggtttgaacagttcgctgtctttggttggctgaaacttagtgattgccacaagagtagggtaccgtctgtttacacgtccagttaggctacagttctatgtactgagaaacctttaagctgaacttgagatatgtaaagagactttaggctaaacttaacaatatatataggatatatacccttctacttcacatgcactgaatatgcattttattgctttactcttcattctgtggcacctacccacaggggaagtaagaagtttgttttggtatttcggaaactaaagtccttatgggatggggtctagaattgattctcctttcctgagttttactccacggagtcttaggtacctggtaaaaagttgtcttctaaattaagggtcattgctttgttgtctagctgctaatgtcttacttttgtttcttttgctttttaatcagttcttaataggatatagttttatgttttccaagttataacttggagttaatggtcactagattatcagttatgagcagtgttaaaatctcctattaatgtgtaatgtacctgtcagtgcctcctttattaaggggttctttgagaataaaagagaaaagacctactttatttgacagcaaaa

SEQ ID NO: 7635 - DNA, 6283 bp, Homo sapiens
ctaagacacatggtgtattttgttagctaatgtatctagtcatgagatcttaataggcttttgatctagttggaagttctgatgagttaatttctaatatcatagtttctttactagagtataattgggctgtaaatgtaccagaacaaaaaaccctacaaaatggtgttggaaattgtgttttttgtttttgttttaaatttgaaacatcaaattcatgtaactcataggataatttacctttggcttctaagaggaaagtcctttaaggatatccttttttaaaaaattgcatttttctcttataatttgtaaatttgttggatctcaaaagacataattctttgtgatcagttatccttcatttcatcgtggttttacacagtgagttgataacaggttctctgagaagtcatgcatcaaataaaagaggcaggtcaaacaattatgtcacatggtaaattataaaatgacagtacaagttccagatagttaagggaataccgaagggatgattctttttttaagataacaggaagttacccacatgtttgtttctgaattcttagagtaaatggaagcatagaatgagggaataatgactttgcatttctcttgttttctagattcaaaaggaacattgtttaacttgaatcagattaccagtttcaaggtgactgatagacaagaaaaggaaaaataagcaataatagtgggcaactgaagagaaaaaaaaaacgagtatctattaactggccactaacagttgcctttcttacattaatttatacactattttgttcagccagtgtttttaaaaaaaatctatgaaaagtgtacttccggttttctgtgattacttatctgggcttgatctgaccagtgaaatgacattgccctatttggacctctgaggttctatttagctttgcagatgtacatagtatcccagtgatctgcaaaattaatgccttttccaagaaaaaatcttttcttctctgtatcagttaattctgacagtgttagtgattctgtcttcattataggccttatttccattatctctttctttatagtattttttgttataaagaaaacagtctttctgtgtatacctacggatgagggtattatttaaactgccaacaatatccaagacatggtcaataacctaattataaatactttagaaagagtgaccaggacatgtatagaaatgtctgcttacctgtagactttaaaaacaaacaaaatttttggagcatttaatcattttttttctccttttatctcctttgtaatcttattgtctcctgagtaaatatacacataaatgtttggggattcattgctgctagattatatcaggtgtttacatagtgtctactatatgctgttgataagctttttcctaaaaatagttatcctcttttgtagtttttttccctcctttaaatctggctagcttttcttacttcagtttttatagaacaccaactaaatttgaaagtatgaagtctctagccctcttacactgtttctggctgtttaatccttgctgcctttgcaagtcctggtgaaagcaatggggagctttgctggctggttttgtagtctcaacaattccatgtctgtgtttagctgagtaactgctatcatttagaacagtaaaatttttatagatttcaaatttgaaaattcatgtacactcagttatctaataaggggccaccgacgctgtttttaaaactattttgaagttataaaaaggtagaacatctgactgatgatgttcacataaagagacagacagactatcatgttgcagacatgaaaacagcatgtcaggtttttcctttccttccatgccatgggctacccatctcttcccactagatcacctggtgaggagggagcacctggctgactcatgcagagtttggccaatcagagaattgtgtggtctccagctctactttccttaaacaaatcctttctgttttctgagctgcagtgctaaaacagatccctaaaaggtaatagcatcttccagactagtttaattatttcctttataagaatatgacataaatttttattatagaaataatgtcattataattttagtgctagtacttgtgggttttctgtatttgtatcaccttgaaatttgttccatgaatagaaaatacttctttattcatgttttcaatcacttagaattattttaaatttattttgggtttgtgagagataataagattaagaacttcatcatttcagtgactttcctccaactctctgaatctgctacctcttattatatgtcccttagcagtacttttccagttaggttcgttaccctgctcattagctaaacctctttatcttgtgcctcaaaagagcttttacttttcttagaaacatttataaaaaagaaaaaaactgacacgcattcattcaaaaaagtatttattgggctttagggattagatacacaacagtggaaaaatggcatcttagcacactcagaatttattgtgcagcagttgtgtattttaaggaatctgtagttaaaaggaagagatccaaaggtcctgataacatttcctaacgtttcagaagagttgtcattgagtagtgtttggatttcctctctgtatccctcaccctaccattttctcctttattcttctaagattgttagcgttgttactcaaaacatacacatacaacataccagatggtgctgttctaatggtatttgttcacgtaatttaacgttcttactgcttatactatatacatatttaattttgttgggagcaagaaggttttcaagaaaagataattttgtattagtgtaggaatatattagacaaatgtttagttggtcaaattatgcataagatatttgtaactttaaacattgcaaattgaccagctagctatggaagcataaaattaattgataattaatgttggaaatacatttctaaaatttatatttttatggtgttagcctgtaagagcattttagcatattgaaatgcatgctgcttaagatgtgtctggttcaaatatcaaaacttgctgggtcatttttacatagtagaaacatactgtctatgtgttgcccaattgctgtttgtccactctgaattctggaccctttttggactaagaattagttaaattcatgaactaagagaattagagatggggtagagtaggatcaggacagtggggttacaacagataggaaaggaaagtcagcatttgagtgtagagaaaaaaagaggatcatacagatgtcatcaaattataggctttaatacaggttgctttttttaatccaaaaggaaaagcacttatcctatcagaatgtctaccatgttttatagtaataatttgtgtaaaaaattgaatttttgaatagttttttgtattttttgtgatgaaaaactcataacataaaatttaccatattaactgtttctaaagaatacagttcagccatgtgaagtacatttacactgttgtgaagcagatctccagaactttttcatcttgcaaaactgaaactccatacccattaaacaactcccctttttgttttctcctcagtggaatagaattttgactccatataaatcaagaaacacctaaattctttagttgtttgtgtttgcaagatctaaggtcatggtaaacattaagttcttaaaatttttgggagggacagtgcacctctcctctgaattgttagcaattaaattgagtaggttttaaatgtctattcattggaagggtttgttatttcattttgagccagaggggagaggcacattttaaatatcagaattagattagctttgagtttgtacaattgggaacataatagattttcataaattatgtgtgccttgttggaagtgtcaactgtctttatgtctgcttgtaaaagtttcaaaatatgttttccctcaaaaaggcaacgttacttcatttgcttgaatattatgataggaatgcttactgatattacttgatagtcatatatagcctaggaaatttaacatatatataactatagcagtattaataatgatagttgtacttctttaaaacattaaatttgaggaaactttaatgctgtctcgtgtacattgctttactacagtgagggggaatatcctttagattgagcctcaatttactggttagtagtatgtgaaactctggtataaaaacgtaaactagacagtagagccgatgaattaaaattgtaaattgctacattggcattttctacctccttttctgtcagagtattactttttccagcatttattcttatttgtgagtaaagaggaaatgggaacctgaggttaaaattgacatttttgtttcattgagaatttaagcagtaggtacaggagaagtgacttgtcacattaatttggtgcctaaatctgtaactacaagttgtgatcgacatgtacaaaatgtctaagaaaggtcatatgctgaatattttacttttcctgtatagtctgcatgatttgtttcataaacccagcttatttcctccaaaaagcaaaatggtcctgtaatttttaaagtaaaataaacgtgccattttgtctgcaatctataatttcaggaagttattgaaagttctgactcagggctttttaacagttcaagcaattgtcagttatattttggaaactccatctgtgtaattctccagtgccttgaaagaattattaacttggcaacactattaaaactttataaaagatggtctttagtgcacgtgtatcattatatacacgttttaaagtcatattgcttagcttgttaataatgattctgcatgtgtgctgggtttgggtaattctttaaaggaagttttctagatttgcacttgatgtttgttttttaaaaactgattatttatggccgtgacactgttaccagaaaagtaattctaattaagttattatgcaaagtcatctataagtagcatctgggaagaggagatcgaggccacagtttgctattttagtatgaaaggaggatctgtttgggaaacatagattgtcttcccctcaaatgaggggaaaaaaaaaagaccctttgttcaaatggattctgttgtaaaaaattatttttaaaggaaatcacaaattgtatgtcattcttaatgctagtcttatagaataaatccataaaattgtttttatgttcagtatgtttatgtcattctaaatgcagcaaattcaatgatagcagttcaattgactcatagcagtgttttgtattttttctaattctttagctttcaatattggattaaagtcttgtttgtgaatatagtttccgtatggcaaatgatttcttgcttattagcttttgttaaagaatgcttagtaagagctaagcttttaaaagtaatgcaaacatttatcgttaataaaacctatggtgtaatatcatataatgcttttctttgatctttggagaattattcttttatagtagtatacatgaattttgatttttaaagcatttaaaaacaaatctcaatacattaaaaaacctgttattgttaaaaaggaaattaccatgcctttaagaaacaaggatgtacatcttcaattcagcataagtgtccacatctagaaggctctcattgcagttgtttacagttaaggtacctctatctaaagggccaaagaagcatttcatattttaacacctcacattctttcaggattaagacatatgaaaatagtctgaataggataaatttgataggaagtaacttaaccagtctggaagattcagctttttctataaaaagcttattcctcttcacaactcagatgtagatttcattttcaagaggtagatattttaaagcaatgatctatttgggttttagttttatgagtaaatcattaattgtatggtttgggggttattttattttccatgttaatataagcacttatttctgaagttattgagaggtcatctagctccagttcaaaagattatgtatatctgatgtttaagaggaaaaacatctgaaaaaatatcttttgtttatttgaaaaaagcatatatattccaactttaaaattgtgaatttattttgagtaacctctaattaactgtatttttttgtttctgttgctgtatagttagaaatttcatggcaatattttttactaaattgaaactataggttttaaaaataaagacattttag

SEQ ID NO: 7636 - DNA, 1441 bp, Homo sapiens
gcccacgccgccaggaggcagggagggctccgccgcgggcctcactccactcgtgtctgcttttgtgcagcggtccagacagtggcgactgcgctgacagaacgtgattctcgtgcctttattttgaaagagatgtttttcccaagaggcttgctgaaagagtgagagaagatggaagggaagggccagtgcaactgggcgcttgggccactccagccagcccgcctccggggcggaccctgctccacttccagaagccaggactaggacctgggccttgcctgctatggaatattgagagagattttttaaaaaagattttgcattttgtccaaaatcatgtgcttcttctgatcaattttggttgttccagaatttcttcataccttttccacatccagatttcatgtgcgttcatggagaagatcacttgaggccatttggtacacatctctggaggctgagtcggttcatgaggtctcttatcaaaaatattactcagtttgcaagactgcattgtaactttaacatacactgtgactgacgtttctcaaagttcatattgtgtggctgatctgaagtcagtcggaatttgtaaacagggtagcaaacaagatatttttcttccatgtatacaataatttttttaaaaagtgcaatttgcgttgcagcaatcagtgttaaatcatttgcataagatttaacagcattttttataatgaatgtaaacattttaacttaatggtacttaaaataatttaaaagaaaaatgttaacttagacattcttatgcttcttttacaactacatcccattttatatttccaattgttaaagaaaaatatttcaagaacaaatcttctctcaggaaaattgcctttctctatttgttaagaatttttatacaagaacaccaatataccccctttattttactgtggaatatgtgctggaaaaattgcaacaacactttactacctaacggatagcatttgtaaatactctaggtatctgtaaacactctgatgaagtctgtatagtgtgactaacccacaggcaggttggtttacattaatttttttttttgaatgggatgtcctatggaaacctatttcaccagagttttaaaaataaaaagggtattgttttgtcttctgtacagtgagttccttcccttttcaaagctttctttttatgctgtatgtgactatagatattcatataaaacaagtgcacgtgaagtttgcaaaatgctttaaggccttcctttcaaagcatagtccttttggagccgttttgtaccttttataccttggcttatttgaagttgacacatggggttagttactactctccatgtgcattggggacagtttttataagtgggaaggactcagtattattatatttgagatgataagcattttgtttgggaacaatg

SEQ ID NO: 7637 - DNA, 242 bp, Homo sapiens
acgttgaaacagaaacagaaggatgaaggacagttttttccttcttagttatttatagttaaagttggtactaaacattgatttttttgatcttctgtaaatggatttataaatcagttttctattgaaaatgtttgtgatattttgcttttgcacctttaaaacaataaggcgctttcattttgcactctaacttaagagtttttactttatgtagtgatacctaatacaattttgaaaat

SEQ ID NO: 7638 - DNA, 1285 bp, Homo sapiens
cactggccccgaggacagccaagggccatttcttctcagcttggtggagcagcacttacttactactggaaatgaaaaaaagtagaactcagaataccagacttttcttcctctcgacatagtttggggagaagcagtactagaaactttccaaggagtcttgggtgtgtagccaagaggagccatgagctatggactcctcaagcacgggaagaggaggtgtgtgctgagaacagagaggccctgccctctgtccactagcgagaatccctagctgccccagcccagtctttctccccggcattcacaaactttgcaagcgtggtccagggccttctccagatctgttccaacttggagtgtgaagggcttgagcatacgggggaagagagtctgcagaagttgggggaaaacttttaaaagataccctcattgtgtcaaagagtgtgccaatctatttttgtatcagcattggaagtgcactttcccctggggcgtgtgggtgtgtgaatgtgcaagtgtctgagagatactgcatcagccctagacccccagagccagtcccgccctttacagagcagcccttagcctggggccatgggtcaggctgaccttcaacaattatttctagatgatttctggataagaattgctctctcggtaccagacagtttgacatcctccacccttagaaaatgactgacattgttttgttactgctcctacccaccaaggggataaagaaggcgagttctgagtgttggatgagtcagtcgcgtggaaggacgtggagcgtggcgctctgtaacttcctgccgtctgccaccccgccacgtgtatttaaccctcgcactttctccactgtggagatggctggggcggcgccccacagtgtgtattcctgtcctctatgttagagtgcatcagaagcacatttactgtgctatctatatcgctatataaaagtgttttataaaaacccagaataggagcacgacgcatgattggtgtttgaggcgtttgccagctgggacaaactgcgtttggagctgtggttaagctgactaaggaggcggtggctctttcttaacattcccacgtgcccagggctgttcatgcaagattttaatggtgacttgtcctggcttactgggacagtctgtatgaggcatgtcaccacactgtcgcctcatagctgcaagagagaggcaccagctgaagttcccctgactgaagagagcctgtggccatgtaaaaagagaattaaactcttgttgctttttgt

SEQ ID NO: 7639 - DNA, 1856 bp, Homo sapiens
cactaatacccactgcttcagtgttaacacagcagtgattgtcagctgccaatagcaaatgaagttatgggtgacttgaaataccaaaacctgaggagtgggcaatggtgcttctgtgcttttcccccttgtaacccatgtgccagatgtgtggaatttttagctcagcattgagagaataaaatgtcactacctctcatcttatgaacaggataatataattctttaacagctataggttatctggctgaagtagacctaattttatgtgacttgtggtgtaaaatgtcttgatgataatttttaaaacttgggtaacacttccaaatatgggaggaaaggacagatgtgtttacaagggaggattttacaacatacttgctttattcacctccctgttttgtgttgcgtctttccttgaatattttattggcccagagttagcctttctcaattatgtttccagactgtggccgtgattctaaaggaaaatgtgtgctctttagtgggtagaacaaatggaaatttggtttcagaatggctgacagaaatcgacataagtcatgtaatttttgttgatatatcatgaaaatgaacagaattctttttccatacttatatctaagaaaaggcatcataggtttctgaaagagataactatataacagctttttaactatccagtcaactttcagcttttctacatttaggtaaaatggttaggatataactcatggtgtggctaatctacatttatcaataaaatgtaaattatctgaaaggacagaatataagatttaaccatgtttgacgtattttaatttagttaatgaagcaaaattcagtttatatttcactagaactgtgtacttgattgattttcagagaaatatcacaaattagaaatattaaatctaaggatgaaaggtatatataaaacaatttgggggccaggcacgatggctcaaacctgtaatcccagcactttgggagaccaaggcgggtggatcacttgaggtcaggagttcaagaccagcctgggcaacatggcgaaaccctgtctctactaaaaatacaaaaattagccgggtgtggtggcacttctctgtaatctcagcttctcaggaggctgagacaggagaatcgcttgaacccgggaggcagaggttgcagtgagctgagatcatgccactgcactccggcctaggtgacagagggaaactccatctccaggaaaaaaaaaaaaaaacccaatttggataccaaattaatcaactaatttgagctatctggccttactcttagtagtttttagtacgtgctggacaccacttttaaaaagcaatcactgtgctagaaaagtatattggctttgttaggattaaagttcattaacttcaatgtaatcatgcctcctattactgaagtcagattggaaccactaaagatccaaactttctgtctggtaatagaaagtaaaaatctagacatcatttacatttgagaaagctgtttttaacattattttaaaatgccaaatatgttctttctagaaaaatatttatttttgtttttgttggatagcttttaattacatttcagagaggtgtaattttgggtagatgctcattacatttttgaaaggtttatgattccaaaataaagatttatatgactggtgatactggctttacagaaatttcagagaactaatttttaaaatctttagcatttaaaactttttttgttttgttttctgacatattctgacaaagagcagcaaaccactgctgtgtggcattcttggagtgtgctgtgaatgtgctttttaagaaattaaaaagagatcattttaa

SEQ ID NO: 7640 - DNA, 74 bp, Homo sapiens
aatcacttgctgtttttttatataaaaatgtgtacaaagttaatttattgcattaataaagctctttaaactat

SEQ ID NO: 7641 - DNA, 415 bp, Homo sapiens
cccaagcctatttcacagcaaggaaattcaccttcaaaagcactgattacccaatgcacctccctccccagctcgagatcattcttcactcaggacacaaaccagacaggtttaatagcgaatctaattttgaattctgaccatggatacccatcactttggcattcagtgctacatgtgtattttatataaaaatcccatttcttgaagataaaaaaattgttattcaaattgttatgcacagaatgtttttggtaatattaatttccactaaaaaattaaatgtcttttaagaaacattcttttccacttgttaaaaaaattaaatatattttaaagcactttaagaatatgaaactttcatatatgttaaaggattataatttatggaattaaaaaatgcagtgtagtcctt

SEQ ID NO: 7642 - DNA, 453 bp, Homo sapiens
cagacccggaacacccgctccgtccctccccacccagggtccgcactttaaaataaaagcagaggacaaagctcttgtgaagatgggcttttcttctgaaaaccacctgtgccagggacacattttcccagttaagctgacatattaaagatctcctcttttaaacatgtagctgaaaagtaataatgatgttgaggaggatgatgatggtaataataactaaccacctggggagagggttaagtgaccttgctcaaacgttttagttttgtgatttattatttttaaaataaaatcaaacggaacatccaacccaagatcctgtaggaacacctaccttaagcacatatctgaatgggtaacatgatgaggtacctgtaaaattattaacaatatcatgacatagcatttatatttgtgttttgaaaaaataaaagtgctttctagtgtttt

SEQ ID NO: 7643 - DNA, 84 bp, Homo sapiens
atccagaaatgacgctgtctgggtcaacatttcagggaggagtctgccaccagtgtaatgtatcaataaacttcatgcaagcat

SEQ ID NO: 7644 - DNA, 2671 bp, Homo sapiens
tacctgaaactataggaaaggttaatttgcctataattatatatacattccatagtcatcaaggaatatattgtgcagagagagtatccttgactgcttaagtcagccagttcagcatggataccaacattagcttttcttcttggttatatcatctgccaaaaatagagaacttatgatctattcatgtgtgtttcaggcttatttgggagaactaatttgaacttaatcaccacttcatctaattttagcaaggtaacagttgcccagggcagtacctgaattaactgtccatttcagtacatgtcaagtgcctttgttaggtggagaagaaatgtctctagaggaatataaatacctgatttcttgtcatcgagattcttgtactgttaaatgaatattgccttttactgctctttatggcttattggaataggagctcatttaagattgatcttggagagtttcttcttgtgattttagttcataagtatgtcacctttcattttatagtgttcatcattgagtaatggattaagtgaaaatccaggagtatccatctgcagttatgtgctgaggtgataattcatccaacatatttgttagcataaatattatgcttcagtttctgttgcaaattggtgattgtgaaattacagaaagtgattttctagtctgctttttttgtttaattcttgtaatgtaagcaataaatatggagtgtcagtagtctccttccaccccagaaatgtgttggtgtaacattctcgtttcttttaacaacctggaagtacctttcttgtgatcttcactgaggaattagaactatgatagaagttaggctgtggcaaatgggacattcgtagagtgggatagaggtggcagaatgaacctggtgtagggcaggagtatgttgtgtagttacatcaatttgatgcatgctttccatctgcactccagacggctttctcagttccaagattttgcagagagaaggagcaaaccttttcattggaaaaacagaaacaaccctcccccccattttttcccctctattcatcaaacctttatgtatctttcatcttccagttacctctaggcatttagatagtgaaatttacctttgagatataacaataagtgattaactgttcactttcagatgtaatggcaaacaattgttaaaagttattaactgatcacagatttgcctggacttcccttcccagggagggaacagaagttaggaggcaactttgggatggtgctagagcatggaaagcacagagaattggacaaacaggtctttttctcttttctctgatgttttacctttaaaagatccaacatccttaccgttggtatttttagtaaggttatagtaaatagctttacaccaggatggattctgaaatataaattctaaattatatttgttataactatattttatgttgtatgttatcaggagccatcagagaatgacctttttgtgtttggaacacttggttccatgaaaagtatgctttgtgttttaactgttaaaataatttaaaaattaattattttacataattaaagaagttaaaaactattaacattaaataatttcacaatttcaacatgtcaaacctatgaagggagataggaaacaatgagaaacttacttttgctcctttatacagaattattaactatattttactaactaaaaaactctagtattctttacctaaagtcaattggctggtaagagggagagatgcaaaattctccagctctgaacttggagctacttcacactctactcttaatggaaacttgaactaatgatagatagtatttttttcctctatttaaaatttttgtcttgattaggagatttttcagttctccatataataattttctacaatcagatctatgctgtggcatattttgctttatttaaaaatttttttttagagatgagttcttgctctgtcacctaggctggagtgcagtggcatgatcatggctcactgcagccttgaccttccagcctgccaagtagctgggattacagacaggcatgtgctattacacctggctaatttttaaagttttttttgtaaagatagggtctttctatgttgcccaggctcgtcttgagctcctggcctcaatcgatcttcctgccaaggttttggaattacaggtgtgagccaccatgcctggcctgctttgacatattttatagtgtgttaattacaaatagtcttcatatgccagaatataagagcaagtgttatctactttttagatgggaattgcagaagctgcatcaaaagtatgctttgaggtatatatagtgaaacagagcctttctgaagagaattatatcaaactaattacaaccaagaaataatagtatgaagcggatgctgtttggaggacaggaaaatttatcgggaaaattacataatccctctgattccactatccagagatagccattattattaatatttggtatgtacatccttatattatttttttcttatgcatgattttgtatatatggttatttttctttccataaaaatggtattaaactgtatatactgttttgtagcctacatatttcatatagaagtatattgttaacattttccatgtcaataaatattct

SEQ ID NO: 7645 - DNA, 2394 bp, Homo sapiens
agacaattttctcacctctgtaaattttagtctcaatctcacctaaatgaatcaggtctgccctttatcttgcccttttcattctaccaacagatctgcactttgaagtcaatggtaaattactccagtgaataatagcagtataatatgacttgataatatttttgtaaacttgtagtcataatagtactatattcttcttagtcctcacctcttccttgtcttttagatcttaatttcatgctgattacaaaaatccagttttgttttctttctatgttccatgcataatacagtcttaagtgaatttctcttttttaattttatcgtaatagaaacttatccagtttgaaaatcattccctaaagcatgcaataggaaaaagaacctcctggctgggactgcccaactctgttctgatcagtgggtgggtgaggtagggtttgagttggcaagagcagggaacgggcatgtgcccaggtgagctcctgtgtgtgtccagattttatattcctaatcccagtaaggaagaaagcgtagtgtgggagaggagagagctgatgactgcagttctcaaaggtcctcagtgaagttattttggaggccctggtggtcacaggatcagaaggcaagggataggcagtggtcaccaatggttgaaagtatggcttgtcccatttcttcctgttctctttttctagcttccacatcagcttccttttttgagaacatatagaagaagaaggctaagagatggtgaagagactgcatgattaaactagatagacctggtatacagtcactgaactagtagatgtcaataattattatttttaaaaatttttatttgttggccgggcatggtggctcacgcctgaaatcccagcactttgggaggccaaggtgggcggatcatgaggtcaggagatcgagaccatcctggccaacatggtgaaaccccatctgtactaaaatacaaacaagtagctggttgtggcgccgcatgcctgtagtcccagctactcgggaggctgaggcaggggaattgcttgaacccgggaggcggagtttgccagcctggcaacagaacaagactctgtctaaaaagaaaaaaaaatttttttgtttaagacagcatcttgctctgtctcccaggctggagcgtagtaatgcaatcatagctcactgcagcctggaactccttggctcaagcaatcctgctgccttggcctcccaagtatgtaggactacaggtactcgccaccacacctggataattaaaaaattatttctgtagagatgaagtctcactgtgttgcccagcctgggtgtcaataattattttttaaaaaaaatttttaaaaaggttttttgagacagattcttgctctgtcacccaggctggagtgcagtagcatgatcagggatcactgcaacctctgcctcctgggttcaagcgattcttgtgcctaagccacctgagcagctgggattacaggtgcatgccaccatgcctggctaattttggtatttttagtagagatgaggttttgccattttggtcaggctggaatttttttttttttaattttgataagacagggtattgccgtgttggccagactggtctcaaactcctgggctgaaacaatcctcccgccttggcctcccaaagtgctgggattataggcacaagacaccacaataattattgcctgtatgtcaattattattttaaaatattgttgtatttacttaatgtctttaatgcatttgcccaatattttacattgtactgctcagaggtattcctttattatgtggttagcataggttatactttgctgacgattcacattttattagtttggttatgttttgtccttttaaaacattttcttttgagatgggggtcttgctctgttgcccacgcaggagtgcagtggcatgctctcagctcactgcagccctgactgcctaggctccagcaatcttcttacgtcagcctccagagtagctgggaccgcaggcacttgccaccacgccccactaaaaattttttaaattgttgcctttcttgaagtgttctctgcctgtctttgtcacaaaatttcatttttctcatagttaatttcatctctccggtaagattttattggtgtttcttttataactttgcagttcttacaccgtttggtgattttcatgtttcttagaaactttaaacctttaacttcaaacattaaaatacaagtcttttaagtacatgagtgcttagaaatgtacataatgtttatatacacttatgccttacattaaagtccaatatgagaaatacatgtttaacattcaataataattttaaaaatttgagaaataaactctcataaatgc

SEQ ID NO: 7646 - DNA, 944 bp, Homo sapiens
ttcttaggatgaccactgggaggtcttaatgttttgttttattgtactgcctgaggttgtttagtgaaattttagaggaaaacagttattttgcagcattacatgcagtacttgtgtgatgttttgagaatgccagatctgtggctgtcttcattctattacatagtcaaacataggtttatgtgaagattttctttgaaaggggatttcagtaattgttgagagcagtcataattccacataagcctgagactctataatttgtccagtgtcttacttaccttcatatatgcaaatataattttaaaaaattttttaattaaaaaaatttaataatttggtgatgtttgaatattgactgtcagttaaggacatagctattccaaataaactaaatataatattgagctgcatttctcaaagaatgacaaaagcatccttatactgatgagttcttaaaattttgtcagagccttcttcattttacaatattttgttatttttattttacctttttcattttacaatatttcgttatttttattttacctttttcattttacaagttgcaatatattgtttcgttcatggaacaaatataggctgaattcaaacatgcaattaaagcatgggaagagcttctaagggcatcttaacaggatgctacatgaaaataaggaaagaaattaatacatatcacttttagtttagatttttattttatctcaagtatgtccagtgtgttcggtttgttacatattccatgaaatatctgagtgtgtattttatgattggtattatggaaggcttattgggggaacaagaaaaatataaaaagtgatctctgcccacggaaaggatttaatccaaatggtccacaagaggaatgtgcttaattcctacagtgagtttatatttttgaaaataaaagctagtaaatattc

SEQ ID NO: 7647 - DNA, 2084 bp, Homo sapiens
tcaggaccccagctcactttttcatagtcattgtggtttagatccaattcccaccactaaaaaaccaacaatgtgatttataacgcacaacttcgtgctcaggtcatctaggagcaaggtgagaaatcacaatgagaaaaataaatggaaacaccactgctaggggagagctctccttagcattcataaacttttctcttatattaggactaaggaactaaaacttgaggcagagtcttctttgtgcctgagtggcctgtagtccatctccagcatgtaactggccttacgatggcaattggcatcattctccttgctctgttttgcttttccatatagctcgagcaaaattcaaaaagaactaaatatgcaatatatgttcatatctatgggaaaaatctaaaatgtgtgccagatgccctgttggtttcacagataacataaataaaaattcaaccacagatttatacaagggttaaccattttttttaagtttgactacatagtcaagtccacaagccatcaagcactcctaccttaattattgcactagagaaaataaattccaaattaggaagtgtttcctaggaggaaaattccattagagagtggcaataggatgaggtttcttcagggtaaactagcaatgcctgagcctgaaccttaatgtggggcctcagttaaatctcctgtggagtcaaggattcttctgattctagtgtgtgtttagtgatagatgtagtcttgacgaatattgcttactggtgaggttgaggaatatcacactcgtctttccctttaccactgtggttttgacttaagaaagcaaaactcactaagtttacttctcgaattgaagcaagtgaggcctgacatggttgtcatcactagtggcaaatgaccttccaagtaagcagatgggaactgaattgtgttttcaggttttgtttttagtaggtgatattcattcgtatccagctctttattacatagctctgaagttaaaatgatttacataggccgagctgtggacaaaaaaaaaagaagcagcagcttgtagtatgcttaagctttggggaatttttttttaaggggatctaaaaaaatgtttttagaacatgtaaaatgtttaatggtgaaagttggaaaagaattcttctgtaaagtaataccatgctaattattcgcttttagtaagtaaagtagtggttgctttagcaaacctctgctgccattttgcaggaatcaaccaggaacctttagcagaattgacaatatggtgttgataagcatgaaataataatagaaacctattctgctagtttatctcaccctctaatttttctcactagcataaattttaaattcctgatttgatttgtcaataagatcttggcttatatatgctgatttataggtagtgtccaaattatatagtataacatatttttctagtttcaaaatttagtaatgtcctatttatgatatatcatttctgtgtgtttgctatgtagtattacccaattaaaaatctctaaaaagaattaaagcattctaagaaaaaggtaaatttactattgcatggtacagaaattttttctttcttaaatacaatgttactataagctcactaaaatgaaactctatatgacaaaataaaattagaaaaaaatttgccctggagttgtgaattatatacaacttttaaagaatttaccccaattactcaaatttcccaggaaattacaaagccaaagaatattcaacttcctccactggtcaaaagaggataggagtgaattactgaacctagagctattttgctctgtaacaacagataaggctaatattttaaaagccacagtatacatcttcttttaactctgtagaatatgtaaaattttgatagtctgtagtatgctaaatgcagaagtataaataaagtcattcaaagggagtcttttctttttctgacacttagggggccacattaaggatgggtaatctttccaggaataaagtcaaaaggtatttattaagacatacttgagtatgcctgggtccaggagttttaaggaatagaa

SEQ ID NO: 7648 - DNA, 321 bp, Homo sapiens
gtgctttatggtcagtattctatgtggagaccttgcaccttgtaatcatcaatacatccaccaaaaatatataatgtaccatatatattaatagtcaacaaatactcagatattctaaggtcaatgccattatttgattataccattttgagggtgaatatggctaggcactttagataagcctttttaaaattctttctgattttaaataatgcgtcaaaaaatgtgcagaaaatgtattgcatcccttgatactgtctaacgaatagcacataactcatattgtgaatcctatgggtcttgaggcctgtagaaccaatc

SEQ ID NO: 7649 - DNA, 2442 bp, Homo sapiens
ccagaatgagctggaataccacactgaccaaatctggatctttggactaaagtattcaaaatagcatagcaaagctcactgtattgggctaataatttggcacttattagcttctctcataaactgatcacgattataaattaaatgtttgggttcataccccaaaagcaatatgttgtcactcctaattctcaagtactattcaaattgtagtaaatcttaaagtttttcaaaaccctaaaatcatattcgccaggaaattttcctaaacattcttaagcttctatttttcccctgccaaaggaaggtgtttatcattttaaaatgcaatgtgatttagtggattaagcaggagcgctggttcttgtctccattgccttttcttatatcattgataatgatgtaagaatcacaaggggccgggcgcggtggctcacgcctgtaatcccagcactttgggaggccgaggcaggtggatcatgaggtcaggagatcgagaccatcctggctaacaaggtgaaaccccgtctctactaaaaatacaaaaaattagccgggcgcagtggcgggcgcctgtagtcccagctactcgggaggctgaggcaggagaatggcatgaacccgggaagcggagcttgcagtgagccgagattgcgccactgcagtccgcagtccggcctgggcgacagagcgagactccgtctcaaaaaaaaaaaaaaaaaaagaatcacaaggtatttgctaaagcattttgagctgcttggaaaaagggaagtagttgcagtagagtttcttccatcttcttggtgctgggaagccatatatgtgtcttttactcaagctaaggggtataagcttatgtgttgaatttgctacatctatatttcacatattctcacaataagagaattttgaaatagaaatatcatagaacatttaagaaagtttagtataaataatattttgtgtgttttaatccctttgaagggatctatccaaagaaaatattttacactgagctccttcctacacgtctcagtaacagatcctgtgttagtctttgaaaatagctcattttttaaatgtcagtgagtagatgtagcatacatatgatgtataatgacgtgtattatgttaacaatgtctgcagattttgtaggaatacaaaacatggccttttttataagcaaaacgggccaatgactagaataacacatagggcaatctgtgaatatgtattataagcagcattccagaaaagtagttggtgaaataattttcaagtcaaaaagggatatggaaagggaattatgagtaacctctattttttaagccttgcttttaaattaaacagctacagccatttaagccttgaggataataaagcttgagagtaataatgttaggttagcaaaggtttagatgtatcacttcatgcatgctaccatgatagtaatgcagctcttcgagtcatttctggtcattcaagatattcacccttttgcccatagaaagcaccctacctcacctgcttactgacattgtcttagctgatcacaagatcattatcagcctccattattccttactgtatataaaatacagagttttatattttcctttcttcgtttttcaccatattcaaaacctaaatttgtttttgcagatggaatgcaaagtaatcaagtgtttgtgctttcacctagaagggtgtggtcctgaaggaaagaggtcccctaaatatcccccaccctggtgctcctccctctccctggtaccctgactaccaggaagtcaggtgctagagcagctggagaagtgcaggcagcctgtgcttccacagatgggggtgctgctgcaacaaggctttcaatgtgcccatcttaggtgggagaagctagatcctgtgcagcagcctggtaagtcctgaggaggttccattgctcttcctgctgctgtcctttgcttctcaacggtggctcgctctacagtctagagcacatgcagctaacttgtgcctctgcttatgcatgagggttaaattaacaaccataaccttcatttgaagttcaaaggtgtattcaggatcctcaaagcattttaaccttgccgcttaaaacccaatttaccgtgaaatgggaattttgctgcattgttaaactgtagtggaaaccatgctatagtaataaaggttatataagagagaaattgaaattaaatgtgtttttaaatttcaaaaaaaaatcaatctttaggatgacttaaaaattgatttgccatgtaaaatgtatctgcattttttacacaaaacttgttttaagcataaaattttaaaactgtactacttgatgtattatacattttgaaccatatgtattaaaccataaacagtataatgttgttataataaaacaggcaataaatttataaataaaagctgaa

SEQ ID NO: 7650 - DNA, 50 bp, Homo sapiens
acagcagtcagccacaaactgacccagagtttaattagcagtgactaatt

SEQ ID NO: 7651 - DNA, 145 bp, Homo sapiens
gggacttctcctccagtggacctgaaggacgagggatgggatttcatgtaaccaagagtattccatttttactaaagcagtgttttcacctcatatgctatgttagaagtccaggcagagacaataaaacattcctgtgaaaggc

SEQ ID NO: 7652 - DNA, 4807 bp, Homo sapiens
ttttattaaaacgaagggaaaagggaccactgaattgcaccatttaagatgctgcttgaacaaatgggagggaagttgtcaatgattgatgggcaaaaatgtacaacacagttatgtgtttgtccatgtttattgttatagtgcatttaaaaactgctttaattttaatggtttaaatctgttttacatccttgagattcttacacatctaacaacaaaaaaaattatctacatcagtcattgttacatggaaaagacaggtggtaggcaagtaggtggaggatctcggtttgcaaattagataatactctgtgtataatgctacatatcaataactaccatcatggttaggcacgataactaatctttgttctgtgtaaaaaaatatggagagtgaaacaaagtgcagacattcaaagaaataagaaatctgctccaatgctcttgttctaatctctaataggttaacgttaataatcttgtatgggagttggaaaggaaaattttggaagtcaagaaagtccatttaggccggacgcggtggcttacgcttgtaatcccagcactttgggaggctgaagcaggcggatcacaaggtcaggagttcgagaccagcctggccaacactggtctctgtgaaactccgtctctactaaaaatacaaaaattagctggacgtgttggcgggcatctgtaataccagctacttgggaggctgaggcagaagaatcacttgaacccgggaggcagaggttacagtgagctgagatcgcaccagtacactccagcctgggtaacagagctagactccatctcaaaaaaaaaaaaaaaaaaaatccatttaaccaaattgtcttacataatactgtaacaaaacaaattttgtgttagaaaagtatacttaattctttgactttttataactgcatacataagaattcaatatttttcaaatatttatagcttatttagaaatatttctataatataagcaatttcttaaaaaccatcagatgatacttacagtataagtattcacatccagactttttagtagaaaaccctaagggctttgatatcttttttgattgtaacattttaaaaattatgaaataaaagtactgaaaaccagacacaaaatttatagctgaatgccttattataaggaaatactcttttaggactcagccagtcaccccacgtgtcctttttgtgtcctgtcacaattacaaccccacaaaagtaactgctagactgatttaaatggtaatcactttgttgcatttgattactgctgccacacctaaatgcatatatctatattttaatattatcaatttaaagttgttattaaatgtatattttattttacatctcttttttaatctagaagttcctccttctttccagttccttaaaatttacctggtgaagaacctgatcctaggacctatagagtttcccatactttgtattttgctgattgcacactcatggcacggttcagcacattgccctgtcctctcgatattagcacacagtgcaggttcaggcacattgaatttgagaagacttaggttcagtcctttggcaagactgtaaatcacggtgtctttctttccttcctccttcttctctctctctctctctctctctttccttttctttctctttttttcagagttgcactctgttgcccaggctggagtacagtggcacgatctcgactcactgcaacctccatctcccgggttcaagcagttctcctgtttcagcctcccaagtagctgggactacaggtgcacgccaccatgcccggctaatttttgtatttttagtagaggggtttcaccataatggtcaggctggtcttgaactcctgaactcaagtgatccaccagccttggcctcccaaaatgctgggattacaggcatgagccaccatgcccagctaatttttgtatttttagtagagacagggtttcaccataatagccaggctggtctcaaactccttaccttgtgatccgcccacctcagccttccaaagtgctgggattataggcgtgagccactgtgcccggcctacagggtttttatctaacctttctgttacaactgtacctctccttctgtactgaaagtcctggttttcaagaacacagggcacgatagaattagaacatcccacaattactcatttcttttatttatcttacacttacagctgtctcagaataacaatagaaatacaaccacaaataatatggcaattgaaacaattaaaaagttttcatttgcttttctcattctttcccaatttttttttttttttgagatggagtctcgcgctcttgttgcccaggctggagtgcaatggcacgatctcggctcactgcaacctctgcctcctggattcaagcaattctcctgcctcagcttcccgagtagctgggattataggcatgcgccaccacgccctgctaattttgtatttttagtagagtcaggatttctccacattggtcaggctggcctcaaactctcgacctcaggtgatccgcctgcctcggcctcccaaagtgctgggattacaggtgtgagccactgcgcccgacatcccaatttttaaaatagttatactatgtcaacattttcagaacatactggtatagcatactgtactttcttccttttatcccccatttattcttagttcttcaactatatatttaacacttgcccccagttttgttttgttttgttttgaggaggaatcttgctctgttgcccaggctggagtgcagtggtgtgatcttggctcactgcaacctccgcctcccgggttcaagtgattctcctgcctcagcctctcgagtagctgggattacaagtgggcaccaccacacccggctaattgttgtatttttagtagagatgggttttgccatgttggccaggctggttttgaactcctgacctcaagtgatccacctgtgttggcctcctaaagtactgggattacaggtgtgtgccaccgcgccaggcaattgcccccagtttttatttgatggctctgactgtttctcatatctgactctttaattatgaatccagggcatagattagtatctccatcttgtaaggatgcaaagaagccatgaaaataagtaatatcaactcctgaggataaaacgttacttgactagagttagctttttaattgtaatcatttataaacttctttgttccttacatataagcatagtcataaccatggtacccaaaattttctataagttattgtaactccttaaaggtcttgctacagttcttttatccagtacaaataattgggaaaatgtaaagctgaatgaaatctagtgagcctcatatcctcccttttagatattgattttaagtttgcttttcacagctgctaaaaagtaacaactgatttttagttccacaacctctctttcttcaatttagatggatcatacaataaagcaaaatctggctggttacagtggctcacacctataatcccagcactttgggaggctgaggtggagggtctcatgagcccaggagttcaagaccaacctgggcaatatagtgagactctttctatttaaacaaaaacaaaaacaaacaaacaaacaaacaaaaagctgggcatgatgcacacctttagtttcagctactaaggaggctgaggttggaggatcacttgagcctaggaggtcaacactgcagtgagctatgatcatgctactgccctccagcctgggcaacagagcaagaccctgtctccaaaaacataaataattaaatataaataaaaataaagcaaaatctgttgggaaacgagaaaaaggagaggaatttttcaggaataatcataaaaagaaatgatcatcagactgaaagtccagagcctgagaaatgaaaacatatttttaagcattggtgttgaccatgcagacaaacttttgttaattcagagcgatacaaaaggcactttgaatctataaaacttgaaaaagttaaaaattgtatgtcggataaagctttaagtcatctgtcactattaacctcagtgcagcaattctgactcctgtgcctggattccttttatgataattttgccacctacaggacagattaggtgctggtcgcctgaattattttgtgttctgaattattttgagctctaaaatggtaaagtacaaatactcattgttttactgtgcctttggccttttataaaaaggtatttataattcgttgataaaaaccaatatttgaagctgttgattaccaacaaaaaagtttcactctctttatagtgcttcaggatacaactttttcagggccttattagagaaaaactgattcacatgttattcttctaaagctaaattattaaaatgtaggttgaaagattggattgattgtgaatctacactaaagatatggttccaggcagacctccttagagacctccaggcagacctccttactgtcttcagtgatgtttaatttcattactgttactgggtgccaagtgtctttcatttggaagtgaacttactccagttattgaatgtttatcatatcataatttgcatttttccaacattgaaggtattttaaaaagtcactaagagattcattcttttattattcaactacaaaaaaatagtgtaatgatcagaatttaaaatgtgtgattctttttcttctgtaagtatgtattgctatgataaataaaaaatggcaggaccattgtttttattaaaat

SEQ ID NO: 7653 - DNA, 2373 bp, Homo sapiens
aggctgtagacatctctgcatctttgtacctgcaagtgccatctttaagggggaaactacatgaagtcaccgttacagtaacttgatgtgtatattaataaaagtaattcagtcattttagtttttgattgaaaataaaggtagggcttctaaaaacttcatcatcttgataagttaaaaaatgaaagttatgacattagctttaaaggtgtaaaaaagatgtttcactaatgtaacggtgaaagagaatccctgttgtactttatctttttgtaatattatttttgaatttttcattattatgttgcttttgaaatttgatgcattcctcccatttactttattattgtacacatttaacacacagtagcaaattttgaacgatgtgattgatataacctaacaaatctgagccagttattattagagttgcagaatagaaacttgaagtgctaaatggaataatccaaaggaaattttttaaatgcaggttctagctgaaaaattcaactataagaaaattgtatttatataacatttactatttttgaagactagtgagatttctgtaataattttaattctttaaaaagtgaaagcttgttgtaaagatattttctttttgttattagaaggaaatacaaagagaaaaatttctttctttcatgggcatttgataatttcagtctttgactgatttgtaagcctagaatatactaagctgaataacagctctttggcctcagaattttcagtagccagtatttctgattaactaagttgaaactcttattagaaactttcagttggtgatattgtattctagaagatataaatgagaggtttggcttcatctcagtttagaaatttattcaaagctaaagatgtatatatacatatacttttgtgtgtatatatacacatatgtgtgtatgcagtttgtcaggttatatatagaatttctattaaggattttttaaatggacaagcaatagggggttgaagtgtttatctgatttgtttaaaattttgtatatcaccaaatttttaaaaagtgatagtcacagtgctaagttatctagttggctactattacaccttaaaaattgagtttacacacacacaattacctgtttatatggtgctcatttgttattctcaaatataatgtgtgaccgtgatatagtgagaaagattctaccaaccactgtttcactactttttagttaaaattgggtatgttcttaatattcattagtgagaatcacaaagtattttgtagaaggcccaaatcacagaataaaggactaagagtggatttgctgacattccatactaatatacattgtttatgctttctttaaaataactagaagaacataaaagaaagagaatctcagaagtagtttgctgctaatatatacatatattgtataaaaaggtatattttggttttgttaaaacccttgttgacttttctacactgaacattttttttaacttgatttaataaaaatgttaattttggaagtgcagttttgtaaaaacctttttcagtcaaacagtaaagactttatttatggattgtaataacaaccacaagaaaagccatacatcttaatgaacatacgcctttgttctgtcattttaaagagtggtgtttactatgtgtgtgcttgagcattttctttcagttacatgggtgtaatttaaaaaacagctcctttttaagacttttgaccatagtgttttccagtttaaagcaataactttcatagtttctttcaaagtttaatacatccaatatgtcaagttaaaccattctgggatttgcaaagtttaatacatccaatatgtcaagttaaaccattctgggatttgcaaagtttaatacatccaatatgtcaagttaaaccattctgggatttgggaacttctttaaaggaaaattgtagtagaggtcatcttgatggaattgtgttttaaagttttgtgaatgagttaaatatcattgatagtcttgtgtgtctcacatatcagctttttcataaggaaaatactttatttgcttttatctgagaatttctcagtatgaaaatgattgtttaaaatttcccctctttttgtcagtgcattgggaatagggatagactttacagatttatggaaattaaatttatggggaaaagtttatttttaatattacttatagctgagtcagaattaaaggagggaattgtattgatactccaatacctaaatttcacaataccacttaggaaagctatttcaacaaattacagttttattgttaaaacagagtcttatttgagatgtattgctttatttttcaattaaaagtggttttctcct

SEQ ID NO: 7654 - DNA, 158 bp, Homo sapiens
agattaactcgacaatatggccagctaatgaaattaaaaaggattcttcatcatggatttcgcctaagtgatattacagccacctcattcttctaaaagtggatatttttctgtaaatagctggaaatattataaatcactattttggtcaaagtcaa

SEQ ID NO: 7655 - DNA, 3636 bp, Homo sapiens
gcaagctatagtcagacagatgatgaaagtaacatgaaaactggtgatgatggagagccctgtggccacacagaggaggaagacagcagcctggcagcagcctcaccgaagagaggaaccaccacacccagcagctcctgacagacccccacccctaaagatgtgtcctgatgactatagtgcagctaactttttgttctcagatttgtagtgcataggtgtgtgtttcaagaaggaaaaaaaaagacttctgttcaaagttaacttatcagctacatcctctgtaacgtggttcatccctggttaaaaagcaaacaaacacaggctgaaaacccatgctgctgttatacacaatggcagtattaacaagcattttaaacctttgcacatgatattgaacctgttcagtttacaatgacaatattaatactgtttatagctagaagtttgatttctgaattctttgagattttagcaaaacagtttattatacactgtacatttttttcacagcaattggaaaaaaacaaccacttgcaatcattcaataaccctgaagaatttggttcctgagtgtacaaactcagagcccggaagccaagaagggtccttggcctgcacggtctgtagttgactccaagtctctgtgagcagtgacttgaaccaaacacaccaggaataatccattctttggggcctctttccaactcgaggttgttttctttcaagatactctaatcagccatagaatttagtgtaaatatttttttttccaaatagatatcatattcaaaaaaggcagcattcaaattatatagaatctagtttttaaaatcagcacagatcttcttaaaaactgtgaactatgttttgaaatactcgttactaaagctgtttataaaccacaggtgccataagatccccaaacggactaaagttatctctgctcttccatggtcttgttcctctcgttttggctttaggaagcatgtctttaacagcaccgctcgttcacaagttcccccatcaagttgtttggaggccttcagctttaaatgtacaggcttaaagtgcgcttgcaaacgtttgctctcctttttttctgaatgttgattgccttagctggccacctggtgttctgcatgtagccttctgtggtcatgtgaaaggagacaggctcttctaagttgagttgggatttttgcactcagtgaaaagctgaagtgcaaaagagctatcaaagacaagaggataaaagactgggatagtcttttccaaggaccctctttagagggccctaaagacctcctttgggaattctggggaaaaagaaaaagtaatcttctacttgcttcaagatttgatttttttaaaaaagcctgcgacctattcaatacattatgcttaaattagcagtttctctggaattcctgtctctcctttaaaagaaaggagagaacattttagaacaatagttctcaaagtgtgttccccggacaagcagcatctgcaacacttaggaaggtcttcgaaatactaatttgtaagccccacctcaggcctactgaatcagaagctctgggggttgggtccagaagtctgttttagtcaaccctctaggtgattctgatgctcgctaaaggttgagaactactgctttagaatgaagtcgtataataaagtctctgaaaaggccttattcagaataagcaagaaaggttctgtgattcacttttgcttctggggctggcaaaaaccttctctgaacccacacaccaagttcgtagttggtaggtgcccagccaagtcctgacatcttcatgccccctctgcagagggcggctgtacgatgttcacatgtctgcgtttggtcagacatcatctccttggctgccctttgaaaccaaatcacttgccttggggataaagtgctcaattggcattagtgagaagcccatcctatcccttgacatacttaatcatatatctctccagagaactcacctgacaaatgtctctgagcacaggctgacaccaaagtggcacaactgcacagttctcagatttctttgcacagattgatttttattgcgggttttgttggggtgtcttaatgttcatctcttttccactgcccatcctctgtgaacccatacctctctagatggagcaggtggccactggtgcctcatactcagtattgaaaaccactacatcccagctacctataatgctgtcagctcaaaatcatagccaggtagttcttgaactcagaacttaaatcctgcacgtggcactccaccactgactggaccgagctggcatatgttgtttctttgtgtttctacatcaaaatgttcgtctaagatttgaactgttctgctgataaccttccccgttgtcatagctatttcattgccaaccaactccatcacatggttgttgatatcgtcatataaagccattgcaaggactctggaaactgccgccaatgaccaatttctgactaaccagccaccttttctctctcttagctccacgtcagcactgagaccagactcgagcacccctgtcctgtaagcgagacaaaatggcgtgtgttattttggggttttgtgttttttggtgggtttctttccttggctctccagatttacttttggggcctgttctaagtgcaaacccagcaagtttcacttgtcctgtccattagatacaactacatcttgcgggggttgtttctttcttgttccacaatgaattgcacatccatctccatcagagctgatagcctgttaataagcactggtctaacacagccaaccctcctccacagcgccatattaatggaggaggggaggaaggtgaaatctactgcatgggattcaggaaacagttgtggttggtcaggacggaagttggggtaagtttggttggtcagagggagttgtgctggagattgtgaaaaatgggttcttgaatgatctactataaggcagggaaggttcatttgtaagtagtaatgtgaactgaattgcattaagagtgtgtggcctttgttgtgatatactatgtattttcttatatgcatgagccaaactgttgcatcataatttagcactgatgtctgcttttattttgatcatctttgtccacccttattagttcttggctgttaaccgtagatagatcttgtaaatccagcaacctttggttgctgcattccccttggttcgattccacgcaaggagccacaagtgagaactccactgtccttagaagaaagggcatttttacttttgaaccaaaaagagaaaaaaaaatcagaagtgttgcatcttgaggcgaattaactgtaagacatttttaattatgactactgcaatttgacaccatttgaaataatcaattcagagacactaaagatttcacaatattcattggtattgtaaaaaaaaaatactattgtatggatttttgtattgctgttaagtattgttttgtgtgtgtgtgtgtgtgtgtgtgttggaacctcctggggacatgttatattttgaagtgattaaactatttaattgtgtgtctatattttggagtggaataatttcttcattaaaaaatgtttttaaaaacact

SEQ ID NO: 7656 - DNA, 1244 bp, Homo sapiens
ctaacagtggaggggcctgccgacctgcggttttctcattgcttttgctctaatgtatgttcatgcttcagtttggaaagagaaaaaagtcatactaatttgcttctttttcaatgtagtgcttgaattgagatatataaatttagcattttttataactatcactactatccacatcaaaagaagaactatgacatcttttagaaaagggaacgaattgtcatttattggaaacattttagatccccagaggtataagtttcaaaccagtcttagcttttcaagttgttgatcagacccttctcttaacagagagataccacagtcactagagataccctgaggttcatgtcatcccaaaacccacagcactcagaagctaacctctacacccactcacactgtgagtattcagttcggtttcattttactgaaaacctgtgaaacctctttttataaaaatcaggcaattaaatcccttttcatcacacaattattgagccttgttccccatggctcaccaaaatgtgctcaattttgtgagagaaagactgtactccataactgactattcacgtcccatctttttggctcttccccaaagcagaatccttactgttggttgacagtaatctctttttaaaaagtaactctcagctttttccttagcaccagagcctttcggctccgggagacgagagggtcattacatacttttttttttttctggaaataggggcattgtgactttatagcctaaactggagctgtctgaacctgtggtcaggctcaagagccagcagggggagcagcaaactcaaaaaaaaaaacaaattaaattaaattaaattaaattaaatagaagcaaaataaaagcagctttaatttcaagtgcatgtaccacgctatgtatgacaatatatcccactcactagcattatttaaaagtttcacattatttccatggatcaattagaaccacaacctgtccaatttcaacgtatctttcatttcttctgtatgctcttttctattattcattatgtgtgtttgtgtgtaacaaagaatgtttggaaaatgctggacacatttttacccttcattcccatggtctgtaaaaaaggaaagtgtaaaatcaatctgtaatgtcagacaataaagataatgtattacattattttgtattttgtgaaaaaaattactttactaaattaaagtcaaattttaacagaagacagtccccc

SEQ ID NO: 7657 - DNA, 259 bp, Homo sapiens
atggataacatgacttcttctaccctaaaatattcctataatactttgagctgttctggttcctccagggtgcatggtacccattaacccaaaatatgattatttcccttttttcccattttcagtcattttggaatgttctctgtgaaccacagttgtgttgtttaaagctcacatttctttctgtcaccacagagattggcctacggtttctgttttgagggtgctgttcaataaagctgtgtacactaaatgtctt

SEQ ID NO: 7658 - DNA, 1482 bp, Homo sapiens
cccaccccggctgctcttgacacttccattgtgtgtgggaacgtttcttctggagaattggaacatgtgtggccccaagctcaacagaaaccagttgttcccaatctgccgttaccatcaacgcactgttgcatatgccagccactgcgcttggttcccattttctttgccaaggtgtattagcggacggccctctggccacctacccgagagatcgtagggtcacatacatccaacttcaccacttggctgcttgagattggttctgctcttttcttcatttctttccagaacaactctttcccaccccaacaccactgccaccacccctctttttatcctggtgtgaaacaatggtaatttgatatatggtatttatattggcatttttcaacccagtgtcactagatgtcacacacatttgtggtgctttgatgtttgcaagtctaacctctgaacataaatttggtcaaataattggaacaaagggaaacagatacttgatatgaaagccataatgacggtgacttgtgtcgtgggggaaaacataaggtcattttctccctctactcacaatactaaagggaaaaaatggattcaaagctaggatttcagggcccagcagtgttcctccatcagcatgttagacaactacacagtatgttgttagttttgaaagacattcactcaaggaaaacaccatctcaactttgcccgctcaccatgtcccttgcccccatgtagcccatttcccaggttatgctcttttctttctcagggtcctctttggtgggcagccactccccgagatgttgccatcagttttctgcagtccaaagagggtatggttaggtacgggtcttcctgcctcattcctcttcctctttgtgtaggtttcagccacaaaactgtcattcactctaggggacccctactaaagggtaacttcaggtgtgcagccctgagctccaaggctctgcaccatgccacacacttgctgtaaggctagaagtgaagaccttattaataggagcataattgcgagggagaatcatggttctgcagtctggtgtagacactggaataacagcacagaaaaatctatgactcccaatatcttctagaataaagaattttccctctttaacacaagggccctccttgtcattgaccttagctaaaccatggcaattcataaatagaggaaacattaatgaattaaaagcattccttattttttaactaatatttgtacattttcttagtctctttccaagtctttgcctcttttttttctttatttttattttttcctttgacagatggtatcccttcctggatcattcatttcaccttggtttctaactttaggtttactttcacttgttatttgacttagcaggtgcaacaaaaacaagaaacaaatgtgcccaccccactttccgcttaactgaaaagcttaaaataaatttctgaattatg

SEQ ID NO: 7659 - DNA, 456 bp, Homo sapiens
agaacacatcgtcaataaatcacctgcacccaaatctccatctcaggcgctacttctggcaaggcatatcatgaggctagtgaagcacctacaagaaacttataactcaaggttgtaaaaatggcatggtgactcttacaatcatatcacagtgggcctctccaacaatttaaacctcatgacctaggtgaaagctgtgaaaggatccacattaattcttcagaggcagggctaagactttcaagactgaaaagagactagcataaggagacttaacaggaacccagtcaaggccattcatggccatgggaccacgcataaatggagaacgagtaaattttgctaagtccaaggacattggagagatagagtcactattactgatatggtgactgagtcaacaacatactgccactatgaagtaataagaaaataaaaagttaaaaaatgtaacag

SEQ ID NO: 7660 - DNA, 214 bp, Homo sapiens
tgagtatgaaaaaggttttaatcagtgttcaactcttatgctacattaaaaccacactggatccggatacgtatggtggctcacgcctgtaatcccaacactttgggaggcagatgtggaagcatcatttgagcccaggagtttgaggctgcagtgagctatgattccaccattgcactccagtctgggcaacagagcaagaccctgtctattt

SEQ ID NO: 7661 - DNA, 2060 bp, Homo sapiens
gaccaaatttacaaaaaaacgaaaaaaataaggattgactgggctacctcagcatacatttctgccacattcttaagtagcaaaaaaggaaaagtgctttcctcctctgcaggatgtaaggtttatcagccattaaaacttagacttctctagcttttcactagctgtgaaccagccttcctgtccatggacgtgaaactgcatagtaatgagactgtgcacactgatgtttacaagattgaaagagtctttctccgaaaatcatggtaaagaatactgagacaatgaaaaaaaatcaacaaaatatgctttctggagaactgtaccttttatggtttgcttgcacatcagtagtttctgctgaacgtgctgtcataatgaagagatttccaagattttttttcctgattagaactggtagccagtatattaaatattgatataaaaataaaagaactggaaccagattcagaatcatgaaaacaacatttttacaacaacaaaaaaactatattaaacagggtttaaaggaaattaaaacagaactatgagaagtacaatttgttatagtatagtatcaaatttctatatagattttatacctcagtggggaaaaataactgattccaatgacattcattttgttttcatctgtgatagtcatggatgcttttattttccttggggtgctgaaattgagctgaaaaaaaaaggctctttgaatatagttttaatttctctctacagttttttttgtttggtttgtgggctgttggaattgtaatttttaattgccttctaaaaaatggaaatttaacaatgtctgatctcagctgaacaaattagatgtttcagttgctcttgggtcaactggcttacagatttacatgtgcacacacacacaaatttcttatcacattttcgacttcttcacttgacctaactgattatgcgaaatacccaagattcatgctactgtaccacagatttgttttcacagcaataaatcttcagttctttgtttatgattccacttaacaaaaggcctgcagaagtgatttattatttgggtatttggagataatacatttgatggttttttggaaaacctttttcactccatactcagatatgcttcattgtcaaatgcatatttagattagattattgaattgtaatgtttatctgctgctttttttaaataaaatttgactgaaaatgtttaattggcattttttaatgacttagccaaagaagtgcagctattattccatattaataggcttgcatttcttttcctaaatcttatttaggctaaatcagttttatttttctctgattttttttaataccacagaatcacctgagtgtcaattgaaagttgtcaattaaaaggtaaccttttaatctcgtaggaggaatctcattaagacatttttcctgatatgtagagcagtctgttggcaaaaatgcatatattttctttcatatttgtaaaattatatttaatggaattcttttctttgattatcaaggactttcactgcaggcagtgctatttcttgtgcctaagaatgtttccaaaagtcgcatcgctaatgatatttgccaagttgagtgtacacaaagtttctcatatcctgttcaagttaatcaacatcaagcacatggggatgctttagggtgagtctatagtacaaaatgcataaaccatgtccccaggaaatttgaaaggaagcaggtgctgaatggaatttttttccttttccatgagctgtgttaattctatctccagtaggcctaatgcttgaataagcaagatgtctaatcaataaattattttcatgctcagaatttcaggtttttgtactccagcatagcttggtcttatttcttactgtatgaaagcttaacagcaatgtgatttaaggttttgttttaaatgggagatgtaagtgatttaattcatgggtacttttagaacctgatagataatcccattgcctttatttttctaattaaagaattcctaaatactttgaaaatacaaaatattcctg

SEQ ID NO: 7662 - DNA, 271 bp, Homo sapiens
gaaatgcctgatgtcaattctgaaactaaagttggtaaaacaactttttaaactcttattcattttttgaatacatggaaactagatctgaatgcaaacttttcttggcatccttcagtgtttatggggaaaatacctcattagtgtgaatacctgaaacctgcctacctcataggacagctgtgaggatcaaaaaatatatgaaagttccttgtagatacatatctatagatatatatgtgtatgtatataaagatagatatatacattg

SEQ ID NO: 7663 - DNA, 36 bp, Homo sapiens
aaaaaatttttagcataaagtttctcttttacagtg

SEQ ID NO: 7664 - DNA, 525 bp, Homo sapiens
cactcataggttactcccaggagtgtgctgagcagaaggcaagctcttgctggatgaaacccctccaggtggggttggggagacttgatattcacatccaacagtttgaaaagggagagctcaattcccagcgtcaccccatggcttgtgttgcctgctacgcattgacttggatctccaggagtcccctgcacataccttctccatcgtgtcagctgtgtttctcttgattccgtgacacccggtttattagttcaaaagtgtgacaccttttctgggcaaggaacagcccctttaaggagcaaatcacttctgtcacagttattatggtaatatgaggcaatctgattagcttcacagactgagtctccacaacaccaaaatatccagatgtaaaccccaaacttgtacacaaaagaaagcacagattgtttacctgttgtggattttagatgtaacaaatgtttatacaaatacatacatgtacaccatgtttcaaatactaaataaatagagtttaatgcc

SEQ ID NO: 7665 - DNA, 3097 bp, Homo sapiens
catattgcaaaattttcttaggaaatttgtgggtttcctcacatactgatctaggattttaaattatttcattgcaaagtaattgtgtctctcctttcacggggacttgtctcactagcatcctgttacgtattgaatatagaaatcattctaacaacccaggttattttcaatcagaccaggcattcgataacacactaagggggtaggaatggaagatggtatcttttatatgctaaacagattagaaaattaacataggatactttctgcgtggtggaaaccattgcatattcagcctcatttcaagagtgtttccttctcaaacttctgctagaaaatgctgactcacttttatatacaagaaaaacctttccactgaaaaatccctctgatttaaaagtaacccctttgaaacataagcagtttcagaaaggcagactctctcatctttctcatcctgttctctcactactacatttctgtaagtggtcctttaattctgaagttggagttggtgcccctgccatcacaaacaacacgagagccaattgtgagtcagtctcagtagccatcagcctggcagctgcccatcccataaccaaagagctcaatgggctggagggtgagacccagccaatccttgggagcaagcagcactaaatcacatcagggagtgattagtcctggggaaattcagtggaggcacaagcctgaagcactcttctaccaatgtttgggtgaccacccctccaatatcccagaatgaataagaacaatccctaggtatttttatttacccaagtgttcagcttattcaccccacccccccaccccccatcacacgtgctcctgtgaactttccatggttatgtctacggaaaatgccactagagagagagtgatgcaagctgctgcaaagctgatgggcttcctctggccctcccttttcctccacgaggattaaaggatacaagctgaccaggcctcacaggtgctctgctcgtggccccaaagaaccatctctacttgccagagtatgttccaccacccaagcagggtctccctactttttctcactggcctcgttttgacccagagaaagcctatggaagttatgcagtgcagacctcatcctgtctgctgtcttttctcccacagagctcttgagatgggtccttcagcttgcagtggtccctagtagcctctcaagctaatggggatgatgatcctggtttagccagagttcaaaactctccagtcattgaaagcaaggggagggtgtgttcccagatgtgtattacttgggaattttatttgatctggagggtgtggctttttttctctcctttttaccaaccccaactaaactgggagtaagacttagtcagtgttggtagacaaagtcataccacccagggcagcctgcatgcagcgagtctgcgtggcttccctgaattactcttttaattaaaactagattatttcaatctagaaaagccttgttgagcagcctccttatccagatagatccaaagctcatgtctcttcaggctgagactggcgctgtcacctccacccagccttctttcacttggggttttttattctttggagtagaaaagaatggagcccactaatattatatttttcttctgaaataaatataaagtcaagactaactagttataatcattcccttaaaaagttggaaaatcattacagattaaaatttctttataaagttcacctctgagagtaaccaaatcggtttcatcccatatcaaaaagcctttggagtgtggagctttctgtggtatggcagaaatgggtggatggcaaactaagagccctcagccattttttcagttaaagttaggttgccagaactttcttttccttgccccctgtgtcatgactagcttaagtgtacttgactcccatagactactcccatgcccacagtcacccattccagactccagtgtccttaaaactctggagtgagaggatgccagaggatcaagaaaaggatcacagtttcttgaagaagcttgtttgcctttagaagaatcgtaaacagagtctaaactaaaggctttttgggggtcacagccacagagtggagttttattgcttctttgcctctccatgaatggccaatttggaaaagcagagatgggctttcagcagaatatcaaccaatacatttttcacatgcaaaactcatcaccagttgcctttttctaacttaatggacattttgttggtgttggtgcaagggcaataggatgtaaatttgtatataatctaatgtcttcattattaattgaatagtacatgttaacattttaatctatttaaatttactttgaaatatatacatacatatgaatgaaaggttgttacagagcctcaaagctgttgcagactatcccaagagaaaggatctggcacaaaggaatctgcctttcctccgtctcaagtctcccacccttgactggttgggatttgctcgtccagcctctagacacttcccaaagcaagactggacacatgccgagggcgttgcggatagtgcctcaccattgcccaccctgctgcccaactcctgtgagagaaaaaccaatcaatgtttacaaaatggaaaaggacacagcatgtcctttgaactccctaagtaaggcccacagttcttgatgcagagaaccaaagtgaatcatagaaaagcttttgctaacagtccgctttccaggaggcaaacttgtgtttatccaaacctgatccccatgatggggacttttctagagcaccccaaatgtcatggggagagagggactctttctgctccctcagagctactcttcacttgtccctgcttccggcaccaagttcataatagagatcttctggccagagaatcaggggagaggagaggcctgatggggcagagctggacgaagtctgctaagagagatggaggctgtggcggactccttccaactcacgatttatcctcagctcagagtgtattttgaatatgagcaaatgtttatgtacgtatgagatttcaagttaataaatcatctctatggct

SEQ ID NO: 7666 - DNA, 343 bp, Homo sapiens
aactgggattgacccatcaagatgcttggctcaataagaaaaccacgttaggagcaacctttgtatattggagacttcagagtaaccagcaaggaagagaaatcttaatcttcaagttaccatattttccaaatattacatggtacctgagttctgcttccttggatgtcattgcttaaatatagtcttgaagggcttgttttgaaatattgtatatattttttcaaatgtatacattgttaataaattaagaaatgagaaacattcttatttatgtacatgttatgagagttctggaggaagtaatatgttgaaatagtaaaacattttagtttttgagttt

SEQ ID NO: 7667 - DNA, 1110 bp, Homo sapiens
ggcgggtctgggcgtctgcacctggggcctagggaactgacacgtgggaagcgcagtgagccggggcgggggcggaatcccccgctgcagggacacccacgcccttctctccagaagccgggcaggcagaatccggccagacgacggggctgagccatcaggagctcttgggaaagcaaagcagggagacaccttcagaagaagcttgtctgagcttcaccgcagctcccaccacgcggcgcttcagtacggctggatcctccgcaggcgagcggaaggcccccaggaggagcaggctggtggcactctcctgacctcacgctgccaaggtgcgccctcgactcccgatttcatttgctggccaggaaaatcgaaagggaaacaccctcaattaggaaacattccaaggggagaaaagctgcaaattgctcaactggcattgctgtaacccgttccatttaattggtttttatttcttttgattttcaagctctgctaagctttggggtaccaacgtcatcttcaggtgacctgaatctttcccttaaccgtacagtttctcgatggaattgtgtgatcagaaggtggaattctagtgataggcgacctcagacccgcattcatgttctgtgtgcctcttctattgcacatacactgatttttagcattgtctattcctatttttcctttgcccattgtacttccatatatcttttcattaacttacttgctgccttttttttttcttggtacacatttaaataaagtaatccttaacctgtgctgtaaagttcacccttggcatgctgttccaagaacctgggtttgaatcccaatcgttgtgaaacatactcagtattgataaaacctttttaataagtgatgcagagcagccaaggatatgttgacccagatgtcaaccaggctatttttatacttaaaacatgtcagcagagcataggcagaataaaatggtttaaataccccacagcaaatagagtaactgacaaaccaccaaaaactgaaaccccagacccaccagaaagacaagtgtctagcaatgccttggtacctgatctttttcattcaaataattgtcataggttgttc

SEQ ID NO: 7668 - DNA, 574 bp, Homo sapiens
gtttccctgtctaaaacacatcagtgtaaattcaggcttcagcacgccgtccagatccccaggataagagaccacttagccttccctttggtctgttctgtgactctctccccaaacacaaagaagcgtgtatgtagtcaccattccagaacctctcttttctaagatgcacaacacttatcaaagatatgtttagtttagactttatacccttagctttcccataagagctccctttgtggggaacttgccctcttctgcgaaataagcctcatccttaaagagaagtcaccggccgggcacggtggctcacgcctgtaatcccagcactttgggaggccgaggcgggtggatcacgaggtcaggagatcgagaccatcctggcgaacatggtgagaccccatctctactaaaaatacaaaaaattagccaggcatggtggcgggcacctgtagtcccagctacttgggaggctgaggcaggagaatggcgtgaacccgggaggtggagcttgcagtgagccaagatcacgccactgcactccagcctgggcaacggagtgagactctgtctc

SEQ ID NO: 7669 - DNA, 1383 bp, Homo sapiens
gaacaagccccatttgcagccatggtcacgagtcatttctgcctgactgctccagctaacttccagggtctcagcaaactgctgtttttcacgagtatcaactttcatactgacgcgtctgtaatctgttcttatgctcattttgtattttcctttcaactccaggaatatccttgagcatatgagagtcacatccaggtgatgtgctctggtatggaatttgaaaccccaatggggccttggcactaagactggaatgtatataaagtcaaagtgctccaacagaaggaggaagtgaaaacaaactattagtatttattgatattcttggtgtttagctggctcgatgatgttaacagtattaaaaattaaaccccataaaccaactaagccttatggaattcacagtcacaaaatcgaagttaatccagaattctgtgataagcagcttggctttttttttaaatcaatgcaagttacacattatagccagaatctgtatcacagaggtgcaagctgacagcagagctcagtccccacttcctgcaaacaatggcctgcaccctatcccttgtgtgtgtgacattctctcatgggacaatgttggggtttttcagactgacaggactgcaagagggagaaaggaattttgtcaatcaaaattattctgtattgcaacttttctcagagattgcaaaggattttttaggtagagattatttttccttatgaaaaatgatctgttttaaatgagataaaataggagaagttcctggcttaacctgttcttacatattaaagaaaagttacttactgtatttatgaaatactcagcttaggcatttttactttaacccctaaattgattttgtaaatgccacaaatgcatagaattgttaccaacctccaaagggctctttaaaatcatattttttattcatttgaggatgtcttataaagactgaaggcaaaggtcagattgcttacgggtgttatttttataagttgttgaattccttaatttaaaaaagctcattattttttgcacactcacaatattctctctcagaaatcaatggcatttgaaccaccaaaaagaaataaagggctgagtgcggtggctcacgcctgtaatcccagcactttggggagcccaggcgggcagattgcttgaacccaggagttcaagaccagcctgggcagcatggtgaaaccctgtatctacaaaaaatacaaaaattagccaggcatggtggtgggtgcctgtagttccagctacttgggaggctgaggtgggaaaatgacttgagcccaggaggaggaggctgcagtgagctaagattgcaccactgcactccaacctgggcgacaagagtgaaactg

SEQ ID NO: 7670 - DNA, 369 bp, Homo sapiens
ggagtccctcagccaccaacatccatttcagcactgtaaagaacaaaggccagtgcgaggcttggctggcacagccagtcctggttctcgggcaccttggcagcccccagctgggtggctcctcccctgctcaaggtcaagaccctgctcaaggaggctcatctggcctcctatgtggacaaccatttcggagctccctgatatttttgccagcatttcgtaaatgtgcatacgtctgtgtgtgtgtgtgtgtgtgagagagagagagagagagtacacgcattagcttgagcgtgaaacttccagaaatgttcccttgccctttcttacctagaacacctgctatagtaaagcagacaggaaactgtt

SEQ ID NO: 7671 - DNA, 207 bp, Homo sapiens
caaaagccaaataaacatccttttccctaacaaagtaaattgaataggactttacagagttctttttcctcttggcatttcctaataacaaaactttctgtgttcttagattacagaatatcataattgatagaatatggtttcttactgtgtgttgcatttttgtgcccaaatacatagttttcatattaaaaagccttttctctt

SEQ ID NO: 7672 - DNA, 3873 bp, Homo sapiens
tacaatgtcactgtgtttcctctgcactgttcccttccacttcctcatcctctttgtgacatggaagttcattgtcatagcttcagcttcagaagctgtttgtggcatttgtaggattcaaactcatggaaaattccctcctcttcccccctttttttaattaaaagaagtcacttaggaaaataacatcacagagaaaagaatttcttctttccctcagtaggaatatagaatgatgaattttattagacaactttattttacttggtgacttttaatcttaggaaactctgccttccttttagaataatattttaattgccaggcaaaatgggtttcagtttttgaatcttgtatttatttttctgtataatgaaattaatatctagacttgaccactatctgcccaccccattggcactcccatcttagggcattcgcacacatatcagtcaggtccttattggcacctagtagggcatgtgcatttaaaaacttgtccttaaaaatagaagacagaagtattaaaattatattttcttttattttaagtcttctgccttctttcttgagtttgctcctgttgacttcccacagcacagataattgacatgtccctttgtgtttataaatactactaaggtgacctagttgttctccttgttgcaataattaataactctttgcaaaatgtctcctttgagacagaggcatttcagatagatacccaccatgaggtgttctgggcatctgaaggtattaagagttcagtgggaaaaatctctctccctcgcctttttttctggtttagtcaaataacgggtgaacatagaaacctgttgggaagaatatgaaaagttatgtggcctctgaggctacaggcacttgcaaatccgagaggaaagtgccgtctttcatagctggtctctgtataaagagtatgtagcaacaactgtttaacatccgagatgaagtggacctgatgctgtatttgggtatttttctcctctaccttctaaaaaaaaataccataagaagaatcagaatgtaccataagaaatcagatgcaaagcacgttaatgtcattggtaagttttacagagtctaaaaggattagcaaagggtagcaggagcttcagggaattcaggaaatgccagcattggaattttgtggcattagttactaccttctttcttataatatgttgtagttactagtgaattcttttaaaagcaatacctagagttagaacactatgtactctgcacagggggagtgaagtaatattggcttagaagacttcaccttttgtttttcatggtttttgtttgttttgtttttgtttttgtttccattgttaccgttgctatggccctttgcctgtctctccaaatcccctggtggctcttcttatcattaagagtatgagaattaccattttcagttttcattcagcaaacaaatttaccaagtgcctgctctgcataaggcactgtgaggggtgggtgctctgggggctgctgagatgaatgacacacaccgcacatacacatgcatcagtgtctgcctgcctccacctgcccagcctgttcttcttcttcttcttcatcttcttcttttttttttttttttgtaaagacaagtttattcctttacgcttcttgttgcattagttctcctgtatgttccttcttccacaggaatgtatttgtgcatatgttctttgatcttctctgatagcatctcatttgatctggcctctgtccttcatcagcttttattttttttatttttattttctgcttttgttagataaggcttttaagatcatgaacctccagctttagcaactcatatatcagtctctcacatggccacaattctagacaaaaaccaaagacccagaggccagagcaaagtaggaccttctgaagattcactactggtgtatccttggaccttcacattttactttaggattaatttattgaattttactgttacacatagtttttgacttgaattaaaatactagacaaagcagaaatgtacaatttctggtctgtgttttccaggaaattcatagagaagagaatagagtggatgatgtgacttgaagtttttgcagcttattttttcccccactgtcagggcagaggcccattttaatgaatgtttttgcatgacctgttcttatgttaaccacatattttttttcccaattccacacagcaggtgatttcccgtgtgacatattttcttcatagtccctaatatagtcatcctctacagagttggcgtgctgtgtgcactgtggattaggaacagagtggagctgtaaccagtctcttctctggccctttgcctttatgtcagcttgcacttttgcctcacttattcctagtccagctcccaactgcctgacttaatggaccagaacggagatttggatattaagatgcagagggggaggggaagggatggtagagatagacagctctcccctactaggttgggtcatttcccctaataactatagagagactgtgtttcaactctcttttcattgctgtttccagaagagtggagagtgtggtttcaggcaaggtattaatgatacaattccgtggtatacagctcctgtgacatttgaagtttcttttaaaggggtttttcttaatcaaagttttacatttggtagcataagtagttctttatgcttcacaggacattgtcttcagagtaatctctctgctaaaatggtacatgtgggtcacagattggtttatgccactgacttggttaagtttccaccccctccaatttgtgaaaaacagagcagtgacctagctgttgcatcatcatgactgccatgtaacctgtaattgctgctctccagtaattgtcttttcattttgatggtaggggccagactgaatgaataatgcattcttttttattcaatttatttcattcagtttattcttggcaatcaaacatcccataaactttgcttttattatcaattatgaatatgaattgtctggtttactaatgtagtcatttgttcatctttacttttagcagattagcaccataactaacttaaaactaagtttgttacctgctttttatactgtcacaaaggtttttgaaaaagctggggacactattttgtcttttagttttaaacttttttaaggcaaagcaagctccccaatccctgttctccaatatgtgtatgatgtgacttccatgtagatataaaaatgattgtgccctaaccaaacttcctcagattgtgcactgtttgtttaaaataatcacgtattttagtctgatgctgttgtattttttcattttatttaaaacactacttacttcttattctcttaacaaattttaaaaggtagtgatcttaaaaaaaaatcactggataactaggaaatatttttgttgttgttttgtttcttaaagagtacagaggccattgaagccttttgctcctcttaccgtgaaaatgaaatgttagccattgtatggctaggaaccaatgcacttggcagttaatggatctgctgttgctggagtgtgagcgtggacttgatgcagtgatgacaaatcattgcttagaattaatgttttcaaatgtgcaactctagtttttaaaacaaaatttggttctttacattcattatttcgtttttgtttccctttagtatttaatggtctttggagaaaaaataataaaacagagtgttatatatatattttttggtgcaagataagattttctgttttttgaaataagtctgtagcataaaggttaaactattttaagacaaaataaaatagagtgtatttaaacaatg

SEQ ID NO: 7673 - DNA, 4184 bp, Homo sapiens
gggaggaattagccagtggacaccccatttccttcaccaggtccccccacggccatagcccttgcagccaaactttgccttctgagccatttgacgtagaggaaaagcctgcaagcacattttgtggaaagaggagttggtggtatcggtgtcgagggagaggagggggttggggaggacccacctctccagaatggcgactgtccccatccgcctggctgagcaggagagagggagctggcggtgcccagcgcaagggcgggaaggaggggcccaggctgcggagaacccaggtgggatcctgaaggcactagctgacagacgggcccctcaatcctgtcctctgaaggattgtatatatacctctcgaccacgtaggaaccatgtaggggtctctagctatttctgtggatggcagccggagcatgttagcttaagaaaaatgttgtgtgtggtgctctagtcatcttgtggtggacatgtcgctattaccgaattcgcaccaaatatttctcattgagtttcttgttttggtgcctgaccgaaccaacgacagccccaatcttcccgtctttatgagagaaaaggaaaaaggaatcaaaggtggaagaaaaaaaaagccaaattctgtttacggtgaaaaaggattttgtttttcacccaatttgggaggcgggaggggggggttctcgttttatttttgtttttgtttttaccttggcttttgtttttctcatgtttacagtgcacggagtgtggaagggggtctaggagagggagagctggaaaaggagctgatggggtcttatcctggcctctgagggttcagcggaggtgaggaaggcagcagagctccagcaggtgaagggagagttcatctaggcggggctccccaggcccagggctcaacttcatggccccagctatatccccccagttccacactaaaccagggagggctcggccctcagctactggtacccaatgtgttcctgggagccgagagacccatggtcactccaactccttcctttaggctgtgctcttgcctgtcacaaagaggcaacgtagccactgcctccctatgcaaaaaattaaccagatgatgcagataagacagcataggtgatggctgcttggtcttggccacagtgctctcagccagcactaagggctgaggtcaataccgcagaccttggggaggaagctgagcatcccccgggatgtctccagtcctgacacagtccctcagagatggccctggctctgaggtcacatcagctaggtttgggaggcccctcagcttggtttgggagtgcccgtgttcctggtctctggctgcttctctgactctttgataaccttgggcaagtccctttctttctctgtgcctcagtttccttctcctttgaggggggagagagaacagtgcagccccatttccggtcctgctacctcacctagatgttgtgaggattcatattctctgtccagcgtgttctatgctctcttctgagaaccttgtggggtgtcgggatgggggtgctgggagacacagacctgatacagtatgtctttctgcaccacctcacaattttcctgaaccccaaagggagcagagagataagaggacagaagaatggagatgggaaaatccaccaaattccaacccaaacccaactttctttctccctatgtggaagacaccagattagctggaattctgccaccttcctttgtgccccaccccccactgttccctcatttgcactgctctgtaagcctccccctcacctccattcataacccagtctcaatgccctcgtatcaataagaccggggtaagggggacaggatacttgtcacatatttgaagaaattccatacagtgaaggaaatttgagtctgtattgctgctacaagggtaaaaccaggaccaatgggtaaaagtaacaggcgggcagattttggcttgaggaagagcttctagcacgactggttcatgcgggaatagctgctctggccacctgcaggcagaaagtgggggaagtggctcctggcaggagatttctcccagcactaatatcctggtgttctataaaatctttattgagtgcctaccggtgcaggcgctgggagagacaatagctttgaggagctcacaatctagctgaggagacaagacacatccaatgctgcaaaaatggtgaataacctgattcagggttagcagcaatgagtatcacagcgtccaactcagtagctccagtgtatgaaaatgtctccagggctaaaggctggagatctcaccagtggggaaagtacatctgagtcaggattttgggggaaagctagttactgatagccacaggaagttgagacttctgccccattctctccaatggctgggtgaaaaccaagaattcatcggaagatggctttggcctggaggtagctagggtggtctaggaagctcactcctctcttagtctcagtctttcattctttctgctgagactggcctgaaaggctggcaagtgggagggagtcagtggggaggccaggatagaactagagctggtgtcccaggttccagtctgggctcttcactgacaaagtgggcaacactagaaacttccctttgtctctctgggccttagtttcctcagttacaacctaaggaggttggattggatgcttgctaatttccttctgacactcacactccctaacatcaacacatcttcaaggcggcagagctgtgcgcccacccagctattgaaaaggactttctgtgggcacacactctgtttcagactgggctgggggcacacgtgctgggtgagacagtgggccctcgtcccctcccccctcccaattctctgccccaggctaatattagggactggggaggggaccaccagaggggagagggaagctgcttactttgggggtagaccctgaagcccctcctccttcccccacagatggggacaggaggtgatggggtgctcagaaccctgcagctcccacttctttagccgggcagctgtttgggggacaagagagggccagggtctgtgcttctgctcccggcactggtcagggagtctgggaagagtggagaagaggcagggtcaggcctcagcatctcacatccaccacctccaggaggggagaccactggtaagtcctcctcctgctcaactcaagggactcagaccctttcttgactgagacgcatgagtgccttctggggtgagagcagccccagggtttaagttgggcgtcctagcagctgcagcagctgtgccgccgcgggtccaccgaggacgccaatcaatcaacccaacaccacaagcttggttgggtgcaagcagagggtgagcaggggctgcccctccacctggccaggacccccttcggcacccagttgcccttggccaccacctgtggcaggactcaagctcctcttctgcaaatgttcccagcctccgtgcaagtattcttaactctttacgcctaatgaacaagcacagtttttcaatggtgaagaaaaaagcaccagactttttttctttttttcctaaagaaatcccctaagccccccgcctgtaggcgggacaaacactccctgcgtggggctgtagcaacgtctgtcaggcccccttgtgtttcatctcctgcgcgcgtagagcaaatgctagagcgatttcagctgatagaaaaacaaaaatgaaaaaaaaaacacaaaaaacaaaaaacatggcacgttgctagtttacagggttttgtgagtttaaatgccttatatttaacaatcataatttatgactaacttgtagatatcgtgggttcttatttaattatttttatagttgttttgcatttttaattataatttatttatttagaaaggatactaattttttttattactcctattacctcattttggcgttgtttctgggagtggaatgctttgcatgcattggtacgatgacaaacaactacgaatacaaaaaaaaaatttaaataaaattctgcaaactttatttcgtccgaactatcagggtgtgtgattgcaagctgtcctaccgtggtgctggcctctttggatacattccatacgaaatgcaaacctttgattctgtatgctgtgatctagtgaaaaactccaatat

SEQ ID NO: 7674 - DNA, 285 bp, Homo sapiens
aaccacatttaccctgacctggccacaaaggcaaccacaaagacctcctagtttattaatgtccgtgggagaacaaaatgattggaatggaaaagagaaaattatttttgaagactggattaacttgagccactgtattgttttggatagctgagatatatttattaacttaccattatcgatgtcagcaaaatattgagagtttcagttacatacatatatgtgctattgggtcatacaatggagatttttctgacaattagactccataaaattttaatgaac

SEQ ID NO: 7675 - DNA, 3654 bp, Homo sapiens
cagccagggggcctggcaggcggcccacgggcagctggggccctggtgcacagggccagatggacaggcgggaggacaggggtggccctggcgggagaaagaaatggggaggagggcaggcagagtcggtggccagtctggagccagacggggaagggagcaaatccctgagaggagtgcccccgcacaagccccccagcccgagcatgcaagctcacaccaataagggaagcatgtttctttttcctggtggccctggccctccccttcctcactcccgcctctcccctccccatcagacccatcccccacggagctttgtgtgagggatctcatcgctgtgactcctcggagaccttggcagcctcgcacgccggggcaccgcttgggtcagaaaggacctcggaaggctgaaaaagtgggtcggagacgggctcgcattgttcccgcatgctgtcagccgcagtcgccaactggcagcaggcgacgtgtagcagatgtccgggaggacaaaggcaggcacggtccccaccagccgcccgtaattgacggcctttgtcagccatggcagagctgacgctccacctcccacctccaagtcctcctcactgcagcccccacagcctcaggcctagggggtcaggcgcagcgggggagatggagtttgcagttccacttgcactcttttgtttattgtgttttatttttcaaaagtcggttgctttgaagtctctttggccaatgaaaatgcccgtgatgtgatcacacagtcagcactgttgaggacccccggattagtgggagatcaaacccagctcccctctagaagaaggattcgagccacagacagcttgccagtagccaattagggtaattggaaacttctgccccggcggggggtccccgctggaatcctgtgttcctcgccactggcttccagcgcctctgttttctcaaagggctgatactgtcaccactgggaccaagttaaacctggtcctggccccaggggccttgtggcaaacagggcacagaacgagactggcaaattaaaaccaaaattctagatggtgtcttgcgctccacacgcaggtcttactggggaaaaggatgggagtgggggctccccaggactcgattttagctaatgcgctgtgtcactgccccagctcggacgtagaagcccagccctccgtgagctcttgggaaaggggtgaattcactgggtcatggaagggacagtcaggtgaccagcggggtcgccagatgaagcttcccagccgggaaacaagacggggtttcttggcaggccctggtcctggggagcaggccctgttgttggctggagaggaaggtgtggggtggaacaggtgtccacatagctccatctctgggggctggagcacacactttgatgagcccccccggaaatgatgtcagagcctagccgcttccttatttgctcttttattgaggccgggcaggccctgggtcactttggaggcccctcttggtccacactggactggccgggaggtgatgggcggggaaggttctcgtgattgattgattctgagtctgagagtggcgagtggggagaggcttccccagttctctccagctttccctgcagctgcaacctgccctctggtcccaggtgtggagcctttgcctgtctctaaaaagagcctgttggcgacaaggtgtagggggcacaagtttacctgaaacaggtcagtggtctctcccaagaagcgcacgccacctctggtccctggccctgaaccctgccttcttcctccctccacggtttcttcccagactttctcaagctcctcctcactgcccttcctccccagcccagcctgggaacacagatgccccgcgggtaggaggcctcgagggaggagccgggctgatgcggggctgctcagggcaggccccagggcgagcttgccatcgtggccaggcagcctccacctgtgcttcagtggcccctgcccccctgaagcatgtggggtttgtccgctaggaggaggcaaggcccccgaagagaggagagacctgggagtgggagctcaggtcagggaggaggcaggggagtggggtctcccagacccaacggtgagctcagagcaagcttcacgcaggacgctccgaaacactgtgtggagggggctgtgttgtgggcaccttggggcctgattctccttcctccgaacgggctccttgatggcctggccacaggggcagctccccattggctgttaggaccagagtgtgaagaagaagtgaaatataaatatgtatacatatataaatatatttttaattacatgtcgtgtcacggtggctccagacatactgtttgcctagtttattccactgcttgaaagcgcttcctagccaatctgaacaacaacactttaagctgtttttctaaatgcaggttgctgctcctttttcagatatggaaggaaaacgttaagactattttttttttaaagaaacaacagtcaagcctaaaatttgagaccccgaggcagcttcccgagggagactgctcagacaggaactgcaggacagaagtggatgccccacagaccctggccccctccccaagtccatcccctctctgtggcatgaggaaggccgcgtccgagttgacctctgaatgtatgtgatgagaggcagagctggatattgcatttctaaggcttgcattgctttcccctcgcccgcggttcttggcgcatggaagaggcggtccagccatctgatgttgatcctgtctcagtctccccactgcctgtcaggatgagttagtcattgtttttctccgaggcggcctgcttgccacagccctgctccccaaggcctggtggctttgccgaagctctgggaccgcagccccagcgaggcccccaacctcacccagacgaggccaggagccccgccaccctccacgggatgtgcaccctcagaccccattctctctgttcgtccttccttgaccagtctgtaaaccttcactgtttggggatcgtcctgtccatccatgtaaatgtaaatgttggccgagtcggtatttattctgattgatttttattttattctattattttctccgagggatgagggtggggggtgtgggaagggtaccacagatcaggccggggcagctgtaggggcgggggcccagacagccaggccgccaccagagcagccccatggggtgccccagacgcgggcctccaagaagccaagtcccagtctgttttctggcatcagacaccggcccgtgttccttgtcagacagacagactctcaggcctgcctggggagtcgtgtccctcagctgcagggcactgtgttgggaaaccattggctgggcctttgaggacacagatcagaagaaagaaagacaactttcctctgcgcggaacactcacacggaagggctggccgcctccctgagccggctgggagtggacgacaggacctacctccccagagcaagggcctggggcttcccgccaaagctgccgcggaaccccgctagtgcgaccaccctccctccgtcggtatgtcctgctttccagctgaacccaaactacaagtgggtttaaaaaaataaacaccaccaccaaaaac

SEQ ID NO: 7676 - DNA, 2384 bp, Homo sapiens
gggtgcccgggcaagtcttgccagcaaggcagcaagacttcctgctatccaagcccatggaggaaagttactgctgaggacccacccaatggaaggattcttctcagccttgaccctggagcactgggaacaactggtctcctgtgatggctgggactcctcgcgggaggggactgcgctgctatagctcttgctgcctctcttgaatagctctaactccaaacctctgtccacacctccagagcaccaagtccagatttgtgtgtaagcagctgggtgcctggggcctctcgtgcacactggattggtttctcagttgctgggcgagcctgtactctgcctgacgaggaacgctggctccgaagaggccctgtgtagaaggctgtcagctgctcagcctgctttgagcctcagtgagaagtccttccgacaggagctgactcatgtcaggatggcaggcctggtatcttgctcgggccctagctgttggggttctcatgggttgcactgaccatactgcttacgtcttagccattccgtcctgctccccagctcactctctgaagcacacatcattggctttcctatttttctgttcattttttaattgagcaaatgtctattgaacacttaaaattaattagaatgtggtaatggacatattactgagcctctccatttggaacccagtggagttgggatttctagaccctctttctgtttggatggtgtatgtgtatatgcatggggaaaggcacctggggcctgggggaggctataggatataagcattagggaccctgaggctttaagtggtttctatttcttcttagttattatgtgccaccttcttagttattatgtgccacctcccctatgagtgacgtgtttgatcactagcagaatagcaagcagagtatcattcatgctggggccagaatgatggccggttgccagatataactgctttggagcaaatctcttctgtttagagagatagaagttatgacatatgtaatacacatctgtgtacacagaaaccggcacctgccagacagagctggttctaagatttaatacagtgctttttttcctctttgaaatattttactttaataccagtgccttttcttgttgaacttcttggaaaagccaccaattctagatcttgatttgaattaatacacacaatatctgagacacttacacttttcaaaagatttgtgtatgcattgcctaattagagtagggggagaagggcaactattattatccctattttacaaaactgaggcttagtgaggttcagccacatgcctagacttatatactagttagtggtgcagccagggagaggactcagatttcctggaggcaaagtctatctctgaaactccatgaagacttttgcagccagttcccaccaatatgccccagacgtgagacaaacaaggacttttttttttatatagagccatccataaaatcctaagcccttttattaatgtataaccaggagaacatctgtgccaacggttggactttttatggctgagattcgggaggaagtgtgacaccaagcaggagaggaagaatgattttctttgtacttaggttttctaaggacattgttttaatctgtatcgtgccaaagttgtatcactgttaaacttctgaagacataaccagttgagtcttatttcaagatatgttctcaagccaattgtgtgcttctcttgtttctgtgattgctttctagccaaagcgaagcttgtacaggttgagtatcccttatccaaaatgcttggaaccagaagtgtttcaaattttagattattttcagattttggaatgtttgcatatacataatgagatattttgggaataggacccgagcctaaacacaaaattcattgatgtgtcagttacaccttatccacatagcctgagggtaattttatacgatattttaaatagttgtgtacatgaagcatggtttgtggtaacttatgtgaggggttttcccattttttgtcttgttggtgctcaaaaagttttggattttggagcatttcggattttggatttttggattagggttgctcaacccatattattggctgtacatcctggtcacttctgacttctgtttttactaatggaagctttgcaaattgaattctcagtgagttgtatatttatacacctggcttgaagccttaattgtatataatgatgctttttaaaaaatgctatttggaagactatttatttctcgtgtatataatgtatataaaaaaatatggttagtgtttacctaaggttaaccaatttcaagattaaaatttttaaatagtaaaataataaaaaattataaagttctt

SEQ ID NO: 7677 - DNA, 1921 bp, Homo sapiens
gtcccttgtgaacttttgaacataccaacagggtatagagtatagaggctatttctataattttcttatatataatttttttaacttttaatcttttttgtttccttttttttttttttgagacaggatcttgctttgtcacccaggggcttgctttgtcacgcaggctagagtgcagtggcgcaaacatggctcactgcagcctcaacctcccaggctcaagtgatcctcccacctcagccccctgaatggctgggactacaagcgtgcgccaccatgcctggctaatttttgtattttttggagagatggggtttcaccatgttgcctaggctggtcttgagctcctgagctcaaacaatccaccctcctcagcctcccaaagtgctgggattacaggcttgagccaccacacctgacctattcttgtttcttataaaaataaaacttttttggataaagcttatttcttgtttttttctttttctttttttttttttttgagacagtctcgctctttcacccaggccggactgcagcggcgctatctcggctcactgcaaactctgcctcccaggttcacgccatcctcctgcctcagcctcctgagtagctgggactacaggcacctgccaccacgcccagctaattttttgtatttttagtagagatggggtttcaccgtgttagccaggatggtctcgatctcctgacctcatgatccgcccacctcggcctcccaaagtgctgggattacaggcgtgagccaccgcgcccggccaacttatatattttcaagattcacctcctctcaccaaatatttaactacctgctgaatacgcctctgtactaggcacataatggaactaaaaaatgctcatgtccagtttttgtgttgagtgaacaatgctgcagaccctaataagattgggtacagatcggcatgcgcctgtagtcccagctactcaggagaattgcttgaacctaggaggtggaggttgcagtgagccgagatcgtgccactgcactccagtctgggcaacagagcgagactccatctcagaaaaaaagaaaaaaagactgggtacagatgtgatattggaagaaaaagatcaagctgatgaggttaggatacccaggccctttggacttaaagatcactagtgtctaaattccatcgatggcatttcagtctataggtaaacttcctggaagctggatttggagacagtttatcatctgattattgggctttcgtataggtccttagggagcagcttacctgaaatgcatttagtgtacaccagtctgtaaacttcaacctgtaatgaaagtgtaataaatgtacattgagttgatgtgataatgtgatataataagaaatatatatttgatcttcctatctagttccttgttcagagctcctaaaacccttgtaatttccaaagtgatggagtacatcttttgttctagtatttggtctttgaccccagttcctgacacaaagctcctaaattcctttaaatttcccagtgataggagaattttttgttctaatgaggtcactcttgatgggcacctggataactcaggatgggggctgctcacaaagaccacatcatgattggaagtttcaaactttcagtctcccacctccagagaggggagaggggctggagatttgtgtcaataatccatcaggcctatgtcaacaagacataatccgttaactatggagttcagggagcttcagggttggcaaacattttgatgtgccaggaaggtgacgcactccagctttatgaagtcagcaagtcctgtgctcaggatgcttctggaccttgccccaggtaccccttcatgtggctgttgttcatctgtatcctttgtagtagccttaaaataaactgttaaacacaa

SEQ ID NO: 7678 - DNA, 1971 bp, Homo sapiens
gggcggaggggccgctccaggccccacagagcaggagacccccagagaaagccggggctggcaggaggcggccgcccttcccgcccctctctgctgccttggggttggcagaacacgtgaaggatccgaggagcgagaggaatgtccatttcttaaactgccttaataactagcctttaacctgtgggagcgggtttgaacaggaccctggcttaggggttgatcactttcctagcaaaggggagaccacatgtggtgcacagggaagaaacggctttagacagcagtctgcgggccccacctgggtggcaggatgccgagaaatcttgcagaggtagctccgaaaccatctggcccaactagcctcaactgacagctgaggaaaggcaattaggcccagagaggcagagacactcgcttaagatcacaggcttagtgtgaggacgagcttgaaatcccagtctcctggcccccaggccagggtctgtccaccatagaatgtcttcctctactggggtcgttctggctttttgttagaaacttggtctgagatgtttcttccctgtccattaccattcgatgttcttttattcagagcaatgtttcttgtattctgaaactggaaactgaaccagtttgtttctcctagtcaccaagcatactttcctggctccccaagtacttaaatgttctcatctgtcgcacccctgtatttgcctcacccctgcatggtcggaaatcttcgtttcaggtcagaacagcctggggtctgtgggtaaaatcagcccttctcccaggcctgtgcacacaccccctcagcactccctatgcactttcctgacacgcaaagacacagccctctttccccactgggcgtcctaccccagtgaggttgaaggcaccaattccaagaatccctccaacctccctgccagcactcccccttcaccccacacccggcccccccacctaaccacagcgcctctccagacctacctcgggacctaatgttctctacatgaactgctcatttggaggacagcagtgaggtcctgccatagagcaaatgtgttaggagagaaggtttcacatgggacccaacatccttcatcaatactttcctgagtttgatcatccatttagccttgacaaacagcagaccctacagagatgtgttggagagcacgtcgtgaccttgggggcaaggaatccagaaaggtaggaagatatgaaaagagaggtgtcaacagcaagggctcttaggggtcaggcaccagcatggagacctcatgacaaaggaagggactcaaagcagcaatgcccctcatagtgtaggctaaggtgagtttggtgcatgcaaacctgtgtgctcacccacagagcatggggtaatggtgtgtagacacaggccctctgcagaagcgtggggtggggacactgacagcccctatctggtccccaggaacattctaccatttctgccactggtgttcagctccttctcttcccccaacactcccaaagatacccacaggaagtccagccagtttccaggtagaggattccaccagttggtcttgggctgcgttcaccctcacatcacagcaccttaaatctaatcagcaaactataatttgtacgttgaaacctgcaacacattagaaacttatatttaaaaacagaattaatcacactgaccaacttttaaatggaaaatatgtaaataggaagtgtttgggttttgttttttctttaagaaaaagaaatgtacaccactcctcatgtgccattttgtcctcagagggcggctttacttttttggtaaaggaacaagctgctggccttgaccaggagttcatatataactgttattacagaggaattgttataactactaatgtttttaaaaaatttattaaacattattaaacttgatcaggtcaggccaaataaagttttattggaacacag

SEQ ID NO: 7679 - DNA, 704 bp, Homo sapiens
aagcactcccctgataaatactttctgtgctccagggaaccccttttttcagacaagaagagataatgtcttcagttttatggtgttttctgtgttttgttctccctgaccactttggttgatgtattttttccatgcgtctccacatctgttggggtagacgtgttgattgattgcattgcccaccagcaccctacagtcagatagttgtgatgctttaattctaacatacagcccgtaccacatccaggagatgtaaaaagtgtgtttgtgaatgtcttcacttgtactctaattcagacttgccaaagtatttgctatttactattatgggtaatactcttctctggcctagttcttacagagctactaaaatagaaatttacttttatggatagaagtacagaattttgagaagaaactaaattttcaccaaattttaaggaaaaattgtcattatctaaaaatgttcttatatatctgcttcatcttaccttcatactctgaaattccctatagcagacagagctagggaaatattaaaaatttaccctatttattttctggaactaaatcaagccttaactataacattatgagagtaatgggaactactgctggctttaagtaaataaaagtcattgttttcaacagtgtataaaaatcatagtgtaacctttttatttaataaatatcttacattt

SEQ ID NO: 7680 - DNA, 1034 bp, Homo sapiens
aaccagtgttcctgagtgcacactgacatgtctgtgaatatgttactgaacctatagtccagtttttttatttcttgttttagtctgaaattatttgggccctaataatcctaaaaagaatggagctgcattgatgaattggctcagtatttaaagggagcaaactttttgataataaatctttttaagagaaaaaaaacccagcatcctttttgaagtccagatttgtcaaaatgatagactattcagttatacatcttattttgtgctactaccacagatagccaatattccatgcagtcctgggcttagcttctgcccagctttattgctgctattggcaaagagcacaggactcagccctcgtggctaaaaatggtattttggcagtttgtattgaatctgtttgtgttattaacagaagagggagaaatgtcatgagacgttggacaggcaggattgatgatagcatgaccatagctttgctggaatactgaatgcagggtttggctaggtgtttattttaacattttattaaactttctatttgggtcttaacccatggttctcagctggggtgacactgctcctctagaagcaggtttgaaattatgggtatgttttcttgtcacagtgactgagtacggtggtggtagtggtggtactactactactggtatttagtcagcagggataagggatgttagctgtcctgcaaagttttggtcagtcatatacaataaagaatcatctcaccccgaaatgcaaattgcaggcccattgagatacacagcaagttagtttatactcttgatgtgaatatagtttaccaaaattagtgacataatgagtggaattactaggtaagtcaaatcctaaagagtgaatgtgttagaattgcagtgtcataccaaataacattcaaaagaaatgagccattaagtgaagcttatgaacctggaggtaaaaaatgcttatctgttaaactgaggtttcattgacgtgtccctattaataaacgttatttgccccac

SEQ ID NO: 7681 - DNA, 1309 bp, Homo sapiens
ggtcttttaccgttggggcccttaaccttatcaggatggtggactacaaaatacaatcctgtttataatctgaagatatatttcacttttgttctgctttatcttttcataaagggttgaaaatgtgtttgctgccttgctcctagcagacagaaactggattaaaacaattttttttttcctcttcagaacttgtcaggcatggctcagagcttgaagattaggagaaacacattcttattaattcttcacctgttatgtatgaaggaatcattccagtgctagaaaatttagccctttaaaacgtcttagagccttttatctgcagaacatcgatatgtatatcattctacagaataatccagtattgctgattttaaaggcagagaagttctcaaagttaattcacctatgttattttgtgtacaagttgttattgttgaacatacttcaaaaataatgtgccatgtgggtgagttaattttaccaagagtaactttactctgtgtttaaaaagtaagttaataatgtattgtaatctttcatccaaaatattttttgcaagttatattagtgaagatggtttcaattcagattgtcttgcaacttcagttttatttttgccaaggcaaaaaactcttaatctgtgtgtatattgagaatcccttaaaattaccagacaaaaaaatttaaaattacgtttgttattcctagtggatgactgttgatgaagtatacttttcccctgttaaacagtagttgtattcttctgtatttctaggcacaaggttggttgctaagaagcctataagaggaatttcttttccttcattcatagggaaaggttttgtattttttaaaacactaaaagcagcgtcactctacctaatgtctcactgttctgcaaaggtggcaatgcttaaactaaataatgaataaactgaatattttggaaactgctaaattctatgttaaatactgtgcagaataatggaaacattacagttcataataggtagtttggatatttttgtacttgatttgatgtgactttttttggtataatgtttaaatcatgtatgttatgatattgtttaaaattcagtttttgtatcttggggcaagactgcaaacttttttatatcttttggttattctaagccctttgccatcaatgatcatatcaattggcagtgactttgtatagagaatttaagtagaaaagttgcagatgtattgactgtaccacagacacaatatgtatgctttttacctagctggtagcataaataaaactgaatctcaacat

SEQ ID NO: 7682 - DNA, 759 bp, Homo sapiens
catgtatttctgaatggatgaggtgaattttccgggaactttgcagcataccaattacccataaacagcacacctgtgtccaagaactctaaccagtgtacaggtcacccatcaggaccactcagttaaggaagatcctgaagcagttcagaaggaataagcattccttctttcacaggcatcaggaattgtcaaatgatgattatgagttccctaaacaaaagcaaagatgcattttcactgcaatgtcaaagtttaagctgctagaatagtcatgggcctttgtcactgcagtgaccacactgtcataactaatacctatgttttcctttgtcaaggcctgttgtttaatgtgtaggtctagtcttacaaaatgcaagtgcattatttaagcctgtaccatgccatggcaaaccagtgcaagctcactattttgttttcaacttaaacatacaaagcacccatgggaatctctcatgccatagcaccaaaggattggatgttttccttacagcacaaaaagtaaatagtaaacaaacaaaaggcagagaatgcttatgtttgtaactcagtcattcatcttgcacaagtggtggatattagtgagtggctaaaaattcacctattttggcaagtatttgtaaatccacccttggttaatatgtatgtctggagtccaggaatataaaaatctgcaactagtggcattctgccagcagcagtacatttctggaaagaggatataatatgcaatcttct

SEQ ID NO: 7683 - DNA, 3767 bp, Homo sapiens
gcatattcagcaaaaaggtctgaaaagcaagggaataccattattttcggattagcggtttattaagctcttctatattaaacactaatagatattcaataacggagtaaactgttccagataaagcaagaatagttgcaagaagtaaattctggcacaaagcgtaaaaatataacagaagaaataatgtaaaatactatcttttatgtctaaagccattttatattacttttcaataaaaagaatatcatggtcaacatagaatatttttcatgaattggtggggagatgtatatgtttatatataaaaaatagccaaatcgttgcaatgatatggtaaaggacacattttttttttttttttcctgtgaaatgtggaatatctcaaattcagcctcttaggctgaatagcaaatcctactgccaactaacctattaaaaatatagatagttttgactaaagtactacattacatttagtatgttgacttttaaaataccaaagcaatttatattcaattaatgcttcttcatacaccaagaatctaccacaatacacagcacacaaaggccgttcaataaacattgaatgaatgaatggtttggctagggccagggtggggagttaaagtgagaggagggtatatgttatagagaacagtggtagaaggaactctccgtgcaagtaaattaagggaaagatggacaccagaaaggcaaggtgatgggcctataagcatactggataatggaagaagtccatttctttctagctagtttgaagggcctaaaagcactgagatgtttttgtatcttccctacatttggagatgatattaggttgtcataacaaccacaaatatagaccattactaaattggtggatgtcctctttctcccattgttattgccttcctcttttgcctgctaaactaaaaattggatataagattgagaatgtattatataatttgcaagacatagaggatgtttatagaatatactaaagtatccctcagcaccaatatgggagtatcctggtctcaagtttataatttttgcacatataatctaaagaagagactttaaaaataaagtacacaaatatgaaccaaagagtagcttaaaaatactttcttctaggtctgaaattttcttttctttctttttttgttttggagacagagtctcactctgtcgcccagggtggagtacagtggcgcaatcccagctcactacaacctccgcctcccaggttcaagcaattctcctgcctcagcctcctgagtagctgggattacacgcatgccctaccacacccagcaaatttttgtatttttagtagagatgacatttcaccatattggccaggctggtctcgaactcctggtctcaggtgatcctccaccttggcctcccaaagtgctgggattacaggtgtgagccattgctcctggccccagctctgaaattttaacttagttttggattccttggaatttgaaaatatgctaacacgaaggattgtaaataggtagtttgaggttatcaggaacagtaacttgaagcaagaacatcagaaattgttcaccatgcaaatatttagtactctgaatcaaggaacatagtattttttacatgagtattccagtaaggtaattaaacttatgaaaagggtatataactttttgtaaatcattaaaacattttatagtccttgtaatgatttcaggaccttggacagctagaaggggcttaagaaaaaatggctaagaaaacaaagtaaatggttttggccagcttaaaaagagaaagcaaaatagttaaaaatacatttcatagattgagaatgtacgggctatgtcacagttacgctacttattttgtggttttaagttagtctcaacatctttgggcctcagaatcaacttttttatgggatcttttttctctgtttttaagattatctcttttttctttggtgctttgcaggtttactgtattatttggaagtgcgaatttatttttattcttagtatatactggcttcttcctgtatcttttaattcatgttctgtaaaattctcaaccactagctcttcaaatatttcttctctattctaggactgtatacaaatgatagactttcttactgtatccttcatgtctcttaatttctcatatttttcatcctcttgtttctctttactgcattttgggtaatttcatcagctctatctttctgtttactagttcatttttcagtagcatctcacctgctatttaaaacaatgatggttttaatttcaataaatatatttttcatttgattctttttaacttcccgtttactcattacagtcccttgtaagtctgtttctaatttttaaaagtcaaatatatgatatttttgataatttcaatattttaagtctttataagtctacatttaaggttattattgcatatcattgtgacttatttccttgagtatgtgttaatctgcgagaagacagagggcctaaattgtgtatgttttccttcagtatgatttgagttcgttgcttctctgggtgaggtggtacaaactccttggcatactctattcacctttgtggatcctgattgaatgccttgtcttaagtgtaagctccctgacccttactactagccgaaggttttgtctctgcaggtcaattccaaactaacaggcagatgctgttagctatctgcctccagggataaaccccatctttcaagcttgcttcttgcttgatgctttctgctgctttcttgcttttgtttcagctcgagtttgttgttgttttttttttttcctgtttctgtcttgaatgtagagggtatttttatttttattttttctgtttctctcttgagtgtatagtgtagagggggtttctgtcttgagtgtaggcctggagatttcccttatatggtacaaaccagcaatgaattaagaggtctcttttctccaagatctagtgttttgtactaggagaactctaaaaagtatctattccactgtagtgccaaagtacaaatttatttggatttattttttgccatcttattttttaatatatttctttttctatgttgtgcttctttcccacctttatctctcctcctatcttttgggatcagttgggttttctatttaatcatatattttccctttactgatttggaatgtgaatgttacaagtccttttgattatccttaaacatctaaaaatgctaccctctttccaaacaacacaaaggtattgaaataacattaattctaattaaattccacaagttctttattaaatctccaaattggatattattagtattttatatagtcaatgtttatttttttgatgggacatggtgggggcttaccttttttcttgtgtgtcagatgttccttctaggtagaattctttataccttctgaaattatgtccttagagctgtagatttagaactgacatctcttgagctgttctaagataatatcttttactttggagatacgcagtttttattatatgtctagctatagatttatcatggatttaggttcattatgaatctgcagatttgtgtcttccatcaaatctggattgttttcaatattaaaaaaacttctattttaaaatctgtatatagaaaggtacataaacataaatgaacatgttaatgagtaattgtaacaactatgtaactgtccaagtcaagaaataaaacatatcaagtaa

SEQ ID NO: 7684 - DNA, 3765 bp, Homo sapiens
agaggaaaatgaaactgtcaccacaatgaatagtcaccacagaacaaataggcattttttctattacttaaactgacaaagtaaatataagccatacattattttgtggttggttcaaggattatatatttctaaaacactaaacttgaaaatacccataggttttgggacctatctttattttgtgccaacatactagaatgtgaactgcaaggacccacaatatatcctgaagtcttactttcgccttctggccagcaaatgtctaatatttaaagatggatgacttctgttcttgaagcttacctggatttaaccttcttcagcatcctcaacattttattacctggttcaggatcattaagaaacttactggtttttatccaaaatcttttacgttaaatagacttttttaaagatatagttagcatcacttttaaacagcttaaaggaatatcaaaattgttattgtgtatctcatctataaggaagtctgttactttgaaattttcataaatttaatatttaagatacattgtatttgaaaattgcattaatagtggggtgatactgtgttaaaaggaatgttgtgttgtgacattcaagagaacctcctcatttaattagtactttgattctgtgtaagataatcttggtagtgcttgacagtttccaaacctttttttggagagatatttaagaatttaatattttgatattagattgtttcccagattttaattttggggttggctcaaactagtgaaaactatgactcaatggccaattgctttatcaaatttgataactaaaacttaaaatgaatatggaaaatcagaaagcaactctattttagagctattttgtaagagttgtgctttctttaacaccatctgtagtcttaagtttgtctctagctagaactgaacaaagctctataatttttaccaagcacttattattaatacttcttataagtagtaagcatctttactaacacaactgagaattaagtcataaaacataactaatacagcacattactgcctgacaaaattaaagagtactgtgtgtatgtataactactacaggttaacacttcacccaaatgatagcgtttttcctcagtagattattgtcaaataggaatttctaagcacattgagtcaaagcattttttccaagttaataaagtgttatttactatctttgttagaggtgacatgtcaaacactacagtgagctctgtggggttttttttttttttttttgcccgtgagttttttaccatgctgctctgaccagtttgagtggcaattaccaatagatttgttttctttattctatggagatgtttttaccactgacactgttttctgattatagtctgcttcatagaaaatagcctgcataatcaaacaaggagttactttgaaattaaagtatgcctggctattaaaaatgcagattttaggtgggtaaacatcaggtaggtctgggtgggtcatgttctaggcctagaaaaatacactattagacaagttctaaagaaggcaaggagataaaggcatcaggtggtaacttctaattgaatattatatgttgatcatacataatatatactatgcctggaaattatgactgaaaagcacctattcggttagtgctcctattcatgagaacatatctccaatactaaatgagataagcctgttctaaaatcttatagccagtattttaagaaacttgattatacttaccaaaggaacattgtttgttttctcttgttttaaatatggagaggtttaatcctttacataacaaaggaattaattttagcaaaatgattcattccaaccttcttataagaaatatctaggagagtcaagtaagaaaaataacgaatctaagtgataaacattcaagaaattctctaaataagagatttatttataattttaatatctcagggttctttttaggtttccaggggaaaagagcaggataacagtgtggagactgctaagttgagaatttaaaacaaatgagaacataagatttttaaaattgcattgtgaatgtaaaatttttatcaatcctttgctctcttttagacatattgagaaaatgttaaatagaaaaaattaagaaattttaataagatgtttcagatctttgagtatgaaaaacataacaaaaaaagcctaatttcaaaaaactatttgagatcaagggacaatggtgtgaccaatatgaagggtcaagactgaaatgtattgtctttactatcaagaactctactttcagttgtttctcagacagttaatttcagcttcatagagatttctgagcaaattaagaaacactgttttcctgggtttgttttgggtatatgtcattatagttatgttatttcttgttgaaatttataattgtaggttttttgtattgttttagtatttaatggtgtataatgtgttattacattatatgtagttataccaaaatattgcctgaagataaatcatgacaaggtcccctgtttattcctgtgttacagacgcatggaattgctcctgtagatttgaatttttgtttcatttttttctgtcccacccttcactctctctgtttcagaacatttttggtagaagtgctatccagaagtgaacttgtcaaaaggcaagtagcatgaaagaagacagaagaagcaaaaggctaatacagtggataatttctgagcacttgaagtttcttcaaatgtgcaagactgtgtgtcttcctattagatgtataaattggatatttcatgcctaattaaatgttgcgttggattgcagtgcctatcatacagtgattggagtaaattgaggcctaatcctgaacacatatagagcatattgttagatatttttcctgtgacatttgaagttattattctcccatttcctttttctttttttgtttataatcatatgtccctaagattgttttccttttttggaccaaaaaaaagaaaaaaaaaatcttagcttttcatcctcccagtgtattctgcattgtccttaccctagatcagccccttctgtgttaacagtttttctcacaatgtagcaacttttatccacccttcaggaccttcactgggactagttcattcattttcaaatagctatttcaacctttaacatctactgtcttagtcttttacacagaagccagagtgactggtcttggcaagactctgttgtgtatcaccactctaaccttactgatttgtttcagcaaatttgctttagttaaattgctttactcagattcccccaaactttatatgtgtattgtcatctttgtgcatattatttctcatgcatgaaatactcaatttttattcttttatctaacgcttactcttacatttctttaaagctctggccaagtattttatttcgtccctaaacattctaactatccaccaaactggtaagttggcttttctttttcctccccctgtcattcatttagctgttatatttcattttaatgttttgggtggtgcctcttatactatgttgtattcctagacaaggaaatgtatatcaaaatatgttagatgattgattgttttatctccttgatgatagcacctcttatactgctttacagaatcaggaaaaagtaaactgcattttacatagtggttttaaatattgattgattgatattctaaacctggtttcctatataaagttgtaagttcaagat

SEQ ID NO: 7685 - DNA, 1348 bp, Homo sapiens
tttgaacagccatagccatcacttcaactgaaacttcaacctctaccacttcaactcagtttgcaactataatagctactcctatcacttcaagtggaatcatggctgcagtcactttaacagactctataaccgttacaacttcaacaaaatcaagtcctacttcaacttaaacttacttgacaactcaaataatcaccacttcgaccatctctttgactgaatcaacaactacattcccttcaactgaatctgcaaccacttccacttaacctataactactgtaacttctacttagcctacagtaacaatgctcatcactcttttccaacaatgtataatctccacctattcatctgaggactaagctctgatttttcatcttgcccaaattcctttctaaggggtatggggagtcatgccctacaaaccataaattctcatcagatgggttttatttaaccctgtatattgtgacttactttctaatctgactctggcataacaagggaaaaaaatcaaaatgttttaccccaaaatatatttccttgccataccttgaaattgtcctgcaaagtctcttgtggagaaactccacattctgtagagaatatcctttcccctttgttttccttcctttctttccagatccaggagataatcaactaagagccaggcacccttttaggtctaataagaaacactttacaacctgctctctctctgaagtctgctttctgagagattcctctgcacaataaaacttgatctccacaatcctttatcttaacctgaacattcctttccatggatctcaggtcttcagataaactaaaccaattgtcaaccagaacatgtttaaatttacctatagcctggaagccccaactttgagttgtcctgcctttctgaaccaagccaatgtatttcttaaatgtatttgattgatgtctcatgtctccctaaaaatatataaaaccaaactgtaccttagccactttggacacatgttctcaggacctcctgagggctatgtcatgagccatggtcactcatatttggctcagaattaatctcttaaaatattttacagagtttgactctttttgtcaacacatccgaacctgcaactacaaatgccaccattaccacttaaaacttgatagaactagcatcagtcatcaaaataacctgttctatattaagttaacttttagttatcaccagtaatactagcctacaactactcgccacactggctcttccccaaaattgaaattgtacaatatgtgagtctaattcttgctaacataacattattgcctacattaaaagcttctgcaaagc

SEQ ID NO: 7686 - DNA, 563 bp, Homo sapiens
actctacatagaaactgaacatcaagaaccccaccaaaatattacttttaaaaacaatgacaaaccacacaattgttgttgagtaaaccacgcacaatggcatgtctttctttttctgccagaaaatctattttaagaaaccagaatagtcaacagtgttcaaaagaattgactagttatccctgaggccctttcaaacatgatcaaagatttcccaatgtgatctcatcatcatggatactcaatttgttttttcttatagagaaaatgagtatataagacaatatacaagaagaaatatcagtgagttttaaatcagaacaagttacctgtcacattgaagaaaagggtaggcactaaagggagaacacagaaagaagaatttctaaaatattggatttacttcttatattgagtcagatgcatacttttagatttgcattggggaaaatgtactagctaaaaatggatacacaatgaagaattctatttggctaattaagaatgatatactatgtacacccaataagctgtactagaatgaataaattactgataaggtt

SEQ ID NO: 7687 - DNA, 2598 bp, Homo sapiens
tgctgctgcctgccgccgtgactgcgttttagttctctaaattatccaagccgatgttgctctgtccttcctcacaccagattgttcccaggggcctgcccaccccagtgccatccagtggcacggccgggtcttgtcacttgtgcatgcttctcaggggcagaacccgctcgtgccatctgtcgattcagaggcacgcacacatgctctgcaggatgtggccatcctgtcaccaggtagtttttccctgccagagatggcaggggaaagccagtggttcctgggaacgctcttgttgcttggtgcaacagaagcacaaaaatcaataaacactgtgattgcactcccagcccagatcagcatttttagccatctcaaccgcacctctgaagtgctgcttgaatctggccgttctgacactgggtgttgaggtcatgtggcagtcctcacgattgaaattattgccctttgaattacctaaaatattgtttaccaaaaagattctgtgtttacatgttcttttcttctggtgattgctaggaaattactcaatccaatttcctagggtttagctaccaccttctttatcaacagctaaccaatttgagattcatgattaattatgtacacaaaaatattttccttgtagaaaatagttttccagacacttagccttctgaagtgctcatctcttgcttaaatgatagtctatttagtagtttaaaataaaaataatcactccctatgatctagttaatgtaattatccagtcactgtaactaatctcttgaagggacttttgtgataaagagccaagttcagaagcatagcgtgtaccgaaaatgaagactctcctatctactgctacagatcctgttgaagaaagagcttacccctttcccccggaaaacttgcaatcctgtagttcccatatgtgtggcatatgtcagttatgaaattattataattcagccttcaaactactactgatcaactaaaggaaagctaataaggtatttcttttaaacaagtattctggaaaagtaataactatggcacaaatgttcaggagtgtatataaaaatatgtgggctctcgatttatttgagcaaacattgcaatgagggtgttcattatgcttctaagtaagctttaactagaccactttcttcttatgtcagattgtgctggttctagctcataataatgaaaaaaatagaattatattttgtatgaattgtttctaacaaaccttgatctgtatatacttgtgaggggttgtttggttgcctaattgttgattggttggttagttgggcaaaatcatttattacatgcaaaaatagaaaattatttgttaaattcagagaaaatatgtgaagtttacaaaggaaccaaaatgataatgggagaatttagtcttaaaagtttaggttgtcagagtttatctgatatacaaaaaagtaggatcaaagtctaggaacaaacattggttatttcactgaaacagatttttaaagagcatattaagaaattaagaccattagatcatctctttcataatgatatgatgttatttccattgacggcaaatctatactgttccttggttttagagttgggtattctttcaaaagtgaatttaggcacatgcatgtacattgtatttataaagattatatatgtagtttccaaggaagaaacaaagacctatacagtttagactttatttgtttggtgaacgtgctgttgtgtttggcatagctagagaaatgtaaggtaaaaggctcactttgttttccagtgggtccagagtcttctctatacccaacatatgtttactttatgaacttaaatggaaattaatttattgtagactacatctctatttggaatgatgaggtaaatgtataccttagcattttctttaacaaaaatgttctgtgtgtcaggaaagaggtgtgagagtggtaggcagcctgccgcaaacacacggatggctccccccgccacgaaggttgagaacaaagccagggggcccagaggagcaatagccctgggccacaagcgtgggtaggcctttcacgtattccgtctgcacaggcaaccaaggccagtagaaagctatggctgcaaaaccctggggtggacgatgtttgatgattagacggtcatctctaactactaaactaatatctgcattcttgttaacataaatctctccttggctattttaatagccacagtcccaaacttcatcccagcttagatttctcagcactgaggtaaactctgcattgtcatcccagcgtacacctttaatgttttattgatttcactggcactgtatttggacctgtccttgtatatgtagagacatatgtggcttcattggtaatttacaagcaaaagatgacatgacgtgacacctgtatgaaaatgtgatgattgaactccctgtgtacagcgagtgaattaaaatgtctgcctctccagacatttcttaatgattccacttaatagactctatgtgtgctgaatgttcctgtgtacatatgtgtgttaaataaaacaattgtattgaagactgtttttctc

SEQ ID NO: 7688 - DNA, 8651 bp, Homo sapiens
gaactccaaacggaaagcgccaaatggctgtttaaaaagtgccccaaatcaaattgaatagccttcagaatagaaccctagagaatgtcttataaggattgtctgccatttaaaaggaaagatgtcttttctcttttgcactgctcttttaagagttttagcagatttagcaggacagatgcattgaagccacatggtttagacttgattgataaagggaatgttgcatttgggactatgctgctaacgaaatggtttgaagtattttcatgtttggattttaataataaactgcctctcatttttatgaggactagagctatagtttctgcagctctgctcagatagtcctcataatcagaggcctctggccaactggggcaggacctgttttgctggtgggatcagactctgaaaaatggaaacgtaaaaaactggtttgcatatctcatcttctatctatctccctatctccatctctatcaccatctcactccttccctctgcaactactccctgccctaccaccgtggagtttaataatttgctaggaatcctattgaattcgctttgcttgtatatgttgcatttgtacttgatgtgtttaaggttctgggtaactttgatgcttcatgacaaaataggcaaatcacgatggactcccttgtgattccttttttaaagaaatgcctctgatgcagtcctcaccagtccattcagtcattctacagcaagatggtccctctgtggtgagtgggatataaggcagtgcatctttcatgatcacaaagaaagcctatgttgtggatagcattgcgtctcttgatgtaggcattgttatggcaaataatagcactgtggccacatctgtaaggccattccagcctaaatttagtgtctcccataatcccaacccatgcactaggctgggtgttctctcagaatatagaggcaatgaatcagcttaagaccctgggacacacaaaggaaaaggaagaagaatatttagaagttgttatggaatcctgtgtaccctaaagtgtggtaaccatgttacccattccagctgggttaaagtggaggaggatcttggccaggccaggtgcccaggtgactagtgctgaggtgcgatcgttttccgtatcattgtgtgcaccaccaccaatccagaaccatttgctctctttgagaacattgtagcactggatattccctctttccactgaagtcagatctatacaactacaaattaagcatttcaaaagaaaaagccattgtgcagtggcaagagttggaatccaagattatgtagacctgcgatgaaggaagtagctggccattctcattttctttatttcagccatatgagtagaaatcaaatcattcccatccctggctttttactgagcagcactttgttcttccaattcagcccaacgtctggccaagttgatgttaaattttaataagagtttctttcttctttccaaatgccagtcaagcatatttgttatgcatttgagtggggtagctcattcttttcctgaaatctcatctagattgcttgcaatgcgacaaataactgtttaaaaaatgtgctgtagttcagtgatgagctcattgcccctctttaggaaggtaagatcatgcctaaaattaaaccgaatatggtaaggaaagacactatcgttatgctcacgttctgcctggtcctaaacctgccttattattattttcagaaagcaatctaattagagcaacttgcatagatctagatattaactaatgaaagaaacaccaagttcaaatgtgttaccaattatgacacacattacaatataattataaggggagacattaaaaacattttgtaattcagtggtataatttgatgggtatcacaaccacaccgtgtttgttccctgtccctttgaagaggactgtactaccatcctcacactgtgctctgttgggatcactgagagattgacaactgacagaagtgtttagttggctgttcctgagcacttagttcatttggttatagctaagtgatattaatgccaatattacttgggccagattctgactctggagttttaatcccaatgtgcccattcattttcactaaatataaatgcatagacactttaaaccaagaagattaaaagaggaaaagaccagaatctctaaaaaacagtttactgttctgtagtggacaatttaaattttatctcatcataatgccaaggatttttgtttgttttttaagttcagggagattttttaaatctccttgcagtcttggctccatcttaaccttagagtgggaggactttcccatcccccaccaccgtgttatctatcactttaatgaaaactcaaaatagtgaggaaatggacttttcttcagaacttgaggggtttagagatcaggctcatctctgcttataaggaggacttcctggagatgatcccaatagatcacccttcacttttgaagaatagcagcttctagctgaccatgcaaaatctctgtttgtttttaaagactgtttcaaagattaaatctatacaaccacttttatgaccaaaaaagttgttgtgtcccaagtgtcctaattagaaaggcagctggctctcctgcagctcccaggcttgtgtagtcaagtgcagtgaactgggcagtaatcagctcaggaccattggctctttcctcctctttcagctacagacacatgccctggcttttgcattgaccttgctttgttagttctagactaatttatccttttgtcagacactttcccttttttaggatactcacaacagagtccactttcagctattggaatacattttaccataaagcccccaaggctttctacccataacaccaacacaaaaaaccaattaagttgcagaggggggaaataatcacaaacttttggcaacctgcttaatgctagacgctctgttttcactggttattctgagtgtcatatgcagatgcagatccaagggagacagggctaaatggtggtgtcaagaattcctcccacaccccaaaaattctttccaatatttgattattaaaatatctatcatttctccaccttgtgtctgtgtcttaagtgtctgtgaatattgtaaaagtgctgtatgtttagtagtgttgtgtgcctggcagtgctgactatgactactgtgccatctgtctgtgaccttgatgtcaggtacctggccatggggctaccagcaaggatgtgcaaaggaagaaccgctgcccctgccctcagcttccttatgcccgagccactacttatccgtgaatgtgagtgccaagagaaacctaatttggtggggaagccaaggaatgggagaacgttttttctgatttgagtcaaggcactaattattagacactctcagacaacaaagcggtattgacctgagatcaaaggaagcagggacaatattgtagaatgctaggacactggaaatgaagaggccttcagcttcgccagtcttgattcttgactttacaaatgagaaaatggagaaacagggaggctaggtgatttgccccagatgacactgtcaattagtggagaaattatgattcctcctctagtacttcttggtcttaccagcatcaaatgaagctgggctcacagggaaagtggtttttggtctgggatctgcagagcacataaaataagttagaaagtctataaaagaggaaaaaaggttctcctctccctcccaaaaatgacttcccaacacagaacaataaaggagatgcttgtgtgggtatgcaactgtccaccaattatcacctaccttctccctgagatgaaacaaaacacgcttggtaaatcatgatttgataaataacaattaagttactggtggttcatgcttgacagctgcaatcttacccaataagctattcatcttagtaaaaccttgttttagtaatatacatgcataatttagaagttgaaggctgaaaattgttgtgttcttctccatatatatacaactttcatcggggtcccttgagttaagaaatgccttctattttataggtaatctcaacagcagactttgaaatattgtgtttggttcaatatgctaagaagatatacaaataataataacttcgtgagtcttcatgtgcaaaatgacaaactgagcaattttctgtataattctagattcttaaaaccttttttcccataattgtttgaatgcactaggcacaagtttctgtttaagcctctgcttctccctgaatgtgtagaactgtcactttgcttacaaaggggctgtgtgtttgtggctggcagcccagatagagcactctgggtgctggggattgagggcaccttggccagctgattgacctgtctggactctgtggcccaattaatcgaggccacagatcagttggtactaagcatcaaaatgattcattatgcctctctcacactccgattgctttgccacatagataacagcatttgaaatgggaaacactttagaatgtcattattgtattatatattgtcatcttatgcagtatttctgaaaatttatttttattgtgatgactgattgaagacatatgtgtatgaatagatgttcctcagtgaagcctattctcttgttgttgatgacagtggcatcagagtgaagagttgttgcagagtaactgacttcagtttaaggttaccctggggttctggggttaggacccggattatgcagctgatctcccagcaaacacagctgtatgaaataagcaactcttcaaaatacaattcttgccactcattctggacctttgattcataatgtcctgggataagtccaacttacaaagattcccaggtgattcgtgtgaccaccatttggaaaccagtaatatatacatccggagtcatatataccattttgaacaaagtagctaaatgcttatctctccttgtgcgattagtttcacatgttcgttgaggttatcatgttaaatggcaatatagacacagtcttagtgattcaacaattcagctgtttcagccgaattgaccagttgctaatttataagcaaattgtaactgatcaatttagtcagaatggatgcaagcccaaagacaaggtggagagcaagctttaatatacactttgtctcaaggccagctcttcatatttccctctttatatttcaaactaagaggcagatctcaggtcactcatctttagaattggtgagaatgagaaacagggaactgaagtgattcattcagattcaatttggaagtcattcccagagcctaaaatatttatctaaggggtctgatttatcaacctcaggtagtctccaaaacacaaaggtattcaggctaaaataaaaccaatcaaaaaaggaaattcaggaggctccagttctaagactaacccagtataacaagggtgatcagttattacttgtggccttgtaccacctctgttggataatgtgccaccgtcctaatgaagctttggccagacttctttctatagctgtgcacatagaaaggctttagacaacagtgataccaaagggttcctttgattttccttctgtgtgattctcagacagttttagctctttggtgtgctgccaaatgtttaacaactggctctggaaaacagtggaacccagatttttagcacctaccaatttctatggtgtaaatactctcatctcagccaatttcaggctactaacttaatgtcaaccagctgaaaacacaacaatatgttttcaagagccagtataagttggctccaatacagcatgagccagctccagcatagcactgcctgaacaatttttaagtcagtgagtaccaaataggagaggctagcagaggctttggagggacttttaaatgtcccctccaccaagggaagcatttccatgttggttagttttactgatttttagtaaaagagcatattattggatcccaaggtgttcaaatattccacgtgactcttaggaacctctcaacagactccccagtatcttgggagattaccaactgtggcttttctaatttctaagggtgaccctccaggaaaacattctttaatttaactaccagttaaaaccatgtttggctgatcttttttaaaaaatctatacctatagttcatcacttgtttccccaactttgtcattttccctatccacttgcccctcatccttctgacacaataaaaaaaatacaggtacccacaaaacagtgcctgcaaaggagcaggggaagaacaaggcacccagtaagctcacttggctctacatatctggaaaggcactgaggttccaaggtctctaccccaccaggggacacccagtaaacatcacgctgagagtttaagttgcactcaactggagttgatttgcccttagaaaagtttccaacggtgaagaaataccacttggtaggaatatctctgggcaacttcattgctgactgggcaaactttgtaggataaggtgtcatgtgatgtaaggctggaccatgaaaaacaaaaatctactaatacacatttggcccctgcagtcccctggcattgagcaatagagcaactgtcctttctcaccactagttgtgagtgtacttccaactgagtgtttagaaatcaggtaatctggtaatccacagaacaagctttgtttgcaaattgcaaatttttctggtagaagtcattcttaggtgggcttcattaaatctttggagaggcaatgctgggaaaaaatatgcctaattcctaggacacagtgagtggccgtaagttgttatctgcatgtactaaatcaaaattagatcatgaaggaccaaatctacttccgttgctataataaaataccctacaggttctgtaaggcatttctaaactgtaaatgcttgaaacgcaagttggacattttctatactatgtgtaaaatgccaggttatacctctattttctttcttcctaatggtcattgaaatgagcttgtttctctacattgagcaagctacattttattttaaatgagtcaggtgcatgttcagatgtctgtattcccaatacattgcatgcagcctgagcacaagtatgccttcaccctctggctcttttcctgacaccaaacagagaagtccacagctacaagcacaaggggcttgacaggtaggccttgttttattatgaacaaattcaccagaaaaccattcttgaggaaccagccactcccatagcatttttagtcttagggaagaaaattggcagggaagaaaaattggcagacaatgggaaagaggtttggtcaacctgcataagtggaataaagtcattgaagtacttgcaaaaagaagagggaggtttccctctgaaggaatctagaccattttttaatatggagaataactgtaccccatgttagaagtgctctttagccatatttcaagatccagatctgaacccatactgtgcagaaaagcacaagagcgcttacagccaagagccctgggaggagttgagtaacaggctgagatccggtcaccaagcatcattagttagcactgaaattctcccaggacacaaaacaaatgtatggaaacatcgcaatacactatcatttactcacatgggacaaccacctaagtccatagcaaaactttacagatctagatgttatctcaagtcaggattccagatcaacatcctccatgtggagatgagacaactgaggttcagaaagttggagtgacttatttgcccagctagctaactggaattagagtctgggtctcccaaccactgattctgctacaccacactgtgctgcttccattagttagatggacattgacaattaattgtgaaagcattaattagaagtcaagacaaaagaatgtttgtgatatcttctctcgcttaacatactttgatttcaccattgcatttcagcattttaaagaatagtgtatcagtatagaaggaggagcaaagctctttaagagtaatgatgaaaccaaaaggtcaaaaagtagaagaatagcgaatgtaagttattaaataaatgagcaagaagtatgtgtcagggaaaataaatgcttcttatattgttaataccgtgattccctgcccgctcaccccgtcactcaacacttgatgcatttgttttggaaagtgccattttatgctgagatactggtattgaaaacttccctctttcccaactctgtcagaagttctcttgctctttggaagaagccgagggccttaacaaatcagactgacctcccttgtgacaggcagcctcgcctgcccttggaaacaagctgccagaatgtgagggccacagagacccaagagaagccagcactgctagactgaggaacttgtaaatatcttctgctttcttggtgaacaaggacagaggcaattgcgtgtatattgtgactgtagtttgtgaagaaaatgcaaccatttgcttcgacagctcctcaaatgtacttgttaagtgtgaatgtgcctgcctcattgccttgtgttccaaacacagtactgaatgcgttgtttttaaataaaccatttcgttttgctttggg

SEQ ID NO: 7689 - DNA, 14574 bp, Homo sapiens
tggaaggactctcacttgggcacaagtcacctccaaatgaggacaacagataccaaaagaaaacaaaggaaaaagacaccggattcctagctggggcccttcactggtgatttgaaagcacaattctcttgcaaagaaacttatattctagctgtaatcataggccaggtgttcttcttttgtttttaatggctatggagtccaagtgcaagctgaaaaattaatctcttagaaccagacactgttctctgagcatgctaagcatcccagaaacccaaatggggccttcctggagcgagttaattccagtatggtgtcaaccaagctcgggattgcttaaaatatcatccatcccacttcaggtcctgtcagcttcttgcagtcagagttcctatgagtaacaataggagtttggcctatgtaaggactctgagtttaggcttccaagatacaacaataagagaagaatctagcaacgagaatgacctcatttgctttccacatgcttagcctcattataccatgttatgtccaagttcacagccacaacatcagaatggtaattactgagcacaagttttaaatatggacgttaaaaaaaaaaatccaaggacctgtttttccaacccagacatcttttcattgaatgatttagaaagctttaagttgatccagcttacaattttttttttctttacctcctggaaatctcatatggtcttggatccgtcaaaaaaaccagtcagttcacttgcgctcaaagtatcaagcacaacaaagataaacagaagtgaggaaggttctgggttcactacatctggattttcaagacacctattgtgaagtcattagggaattgatgagaatatggcttcaagcacattttgcagtttgctacaaattctgttgtacataatgcagacgcacactcaggaggccaatttaactgttaacagtgcatggagcgaatgcagcattttaaaagatctaggtttttttaggtcattaatgtgtccttggttgatcagtcatctggtccctcctactgtgtgttatgaccaccacgtaatccattctcgctctttctgatttggggtttttcctcatccatcccattagtagggatgttttctgtgttttctagcaagaaaaaaaaatcaatcaatcaaacctgcatacatgttactcatgactgtcatctagtcctaaatctcttctgttgttgaatcatccttgcaaaacagctgaatacatctggagaaaacacagcacaccaaagaagcagaatactgcaaaccaaagacatttatgacttgtcattttctagcctaaaaatactgtgattacttttagaaatcagaaaacctctgcaactccgaatggcattcagctcttgcatttggcgcatcatcgggctgagcggaccagctacaccaaggacattagccaagccacccagaggggtggctttgccacaccagttgtcaccttcccatagcaagtggaagagcgcccacagaactctgggagattgcaaaggtcacaatgtgcatatttaccagtgaatggccccgggtggggccacgtgggggtgttcaaagcaagccaaacgctgcaatcattctttacagacacttgagactgacttttttatgaattacttagtcgaaaccaaagaaactttttctgcacctacttctgcaacaaacaaaactgtcccattaaaatgaataaataaatccgtaaatcaatggaaatcaccaccaataagaaggaagcacgccagaaaataaacgaaaacaaaaacagggagacacactgtgttcaaacagacctcttgggacattttttggaagcagattttaaagaaagggttgagacaaagatagaaataaggaagagcctcagtggctgctgcttcatttgacaactcacacggtaatcttaaagctgaagattgtctttaatttgtgcctatgcagtttttcaaaagaacacggaacagagcaacagaaacctcaacagctacaataccaaagatgaggatttctcacaccttttgtttcagttcattatctcctcttgcctggctaaaatactaatagcgccattgaactgtataaaggtaatcaattatgtttctctgagcaacaaaaggaaagggccatttatttgattttattgtttcatttcaattttgtcttatggttttttgccccaacatggaatctctcaaaagtttccatggactccaagtttaagatgttgggatattgaacagttctctctgctcagcagagggtagggaataacattatcacttgaatgttctttgcttaacccttagacttggttccttctatgttcagagtctcatcatcaggggaaggaaagggagtgagggtcagggataggggtcttggtgatgcatcctctcccgagccacagaaccaaagagtttatagaggaatttacagcctcgttttcatgtgattgctacatcctaacagggcttcatttgggggtggggggaaacatgtaaaaataattgccagtttctacttttctattagctttttaaaaatcagctgtaaagttgcatttctaaagaaagatatatataatatataaaatacatatatagatcaacttgacattggtgataaccaaaattattgctgtccaaattcatgtcttgttttggtccagtgcttcatttgctaagtattcggttcagaatttttctcatttctcatgccattccagagttaatttgccactgtggatgatttgaagtattcagatctctatggaagtttctgggacaggtttaaagtcaagatcaagcattttagcatttaacctgttgataaatggatccatggtgtacatgagttttatttgtattcggagtcatctctattctatccctcagcctcgattaaggtggtgagtgaagtgcatccaacagactcggcccagaactgggtcctgacagtggggtgctcatcttctgtaactgttgggaaggctcggtggtccattttcaccagttaaagaatatgaggccagcccagaaatctgttctccaggagctgccctgtcccatctgggtgtgccagaccccctcagtgagcaggtccaccaaagggacttctcacaggggaagcccaactcctgttgcaatgggttgatagatttcctcagggtggtaattaccaattcgtattttgacaagcctatgtgcaaccacagctggcactggggtgggcagtggtgttgggtgggatgggggagagtgtctcaatcctgaagagaaaatataaagcaggttttggggagacttctggagtcctgcccctagagagccccattgttgttctttgtgccccctcctcattccccctatgtgggtctccctatgcaggagctgtgagagaatgtgactctccacaatttttataattcatccttcctaggagattgttcattggctcttcccttgtgtccctttgtcccttgctcatactccatgtttcctttgtcaaaggactaagaaaagagcatatttcagcagaggagtgttcccatgtgggttgatttcaacttgggtatttctaaaagagtccttgtgacatgtgtccagtggaaatggttgctcttttccagactggattgaggaatggagcctgtttgatttggttagtgattctttgacatactaatctcagcgtttgggtctccagcatcctctgaagatgtctagactagtagaggctgcctttgtgacctgacattacaacattggtcaaaccagtcctctgataatcagaagaacatgtcataattgtttaaaaaaaaaaaaaaggcaagaatttctctccaaggagctttaataaatgtctcattccagataatgtcataccagagaaaagtgcttgcttttagaaaattatttacatacatatataaatatatatgtgtatctatacagttatgtatcaaaattttaagccctgcagaatttcaatttgttagaaatctaacagaaaaaaatttctatattgaaaggtaatagaatttaacccagtgagtttactcaaggatttttaaatttaagttaataatttcagagaaaataaccatttgggtgtggttatagtttagtatccattacctcaatccaaggaaaattccaggcattcctcaaccatcaggaaaaggtacagtgtgaaggaacagttctcagccaaatttcacattcttgaggcaacagaaatcaaaacactcagagccattgagtggaaaaacaatttactttattcctttacacaaataggcttgcattgtttttgttttaatgtgattttggtactagggatataattatttcattccaggaaataataaaaaaaaacagacagagccaatacatttctttttttaaaggaaacagcaacaacaataaaaactcagcaccaatatttaaaagcttttccaaaatgtaaaagaagtgtttagcttgcaccatgcataaaggtgcaggctagttgaaccaggaagcatggcacttcctctggagaaatccagaaagagttgcttctaagctcccttttccccctgcaggctcttggcaattgtaggctttagcaaatccagaataattttcaattcaagctaaaataaaatcaacatttggaatgtaaatctgatacacacacacttttctaagtcaaacaacatatttcaaaaccaaaaataaataccttttagataatcagttattttctttgtctatactgggcacccacctactagtgccagtaaattcaagttgaacagatttttaaaatcactattatctgggtatgggggaaacttccccacttttgaaaatgttggtagaattataggaatgtctgtttgattatcattaccaaagtgtcatgacagtatgcctttgtagtgaactcggattttcaggagtttgaatagttggatattttaaaatctaagaagaaaaggcctgtttccaatgttgttgaagaataatgaactctattaaaaagtggagaaaaagataatacatgtggtcaaggttgaccacaaggcccaggcacaactaccttggcgataatcttctagattcgtaacaggttagagctgactttttgtttttgttgttgctgatgctgtgtgattcagacttctcagcctaaccaggaagagtaagtggaaatggtagatgaagaaggggtagagctggtgtatctataactttctgatatttgtctgccaaacttgatatattagtaatttttttatctttagctaagatcaagtcacccctgaaacaacaggagattctagttttaaaataaggccacaaaaatccttacggaatgaagaatggcaccccagttggttgtataagtctcataagataatgatgttgattttaaatatggatgtctcaatgcctgttttctatcaatgatttgtttgtttccaaggtcggggagggaaagaggggagggtttatctgttttagaaagtctcagaatacttataaaatacagaagtagttattaaaatatataggacctcacataggtagatacagaacttaccattgaggctgatgggctgttgtgtgaatcacacaggaccttaaatgaggctcattattctcacacaccaaaatgactctgacagcctgaagcagttattgctagagcccaagctttccttggaggttttggagttaggttgattggaagtaaccagctaataccttttctagtggagaaaaagacattgctaccagcttgttcatcccatagaagtcttccactctgctccatttttagcagcaagcatttcatgtagcataaaccttggcagataagtgtgcctaaggtttatacagtctgtccgcttggatgtatacaaatttagatacatattttaacatgtgttctcatagatgactttataacaacacacattacctataggtgtctagactgtgtacatacaagtgtgtacagacaagcttcatacgtatatactgtaatccgttacaacaaataaattttaaatcatcgtttaacatgtatgtggtacttctacagtgtacattgttttcattatttattgtaacattgaaaaccacagtgcagggaaaacaaaagtatcccagcatcttcatcctgtacacttggaattaatttcatttgggcatatccaagataaactcaactttcaagaaatcttgtatattatttaatcatctgtgttaggatgacacctatgattgatgacttcggttgaatagctttattctggatttttcataactaaagctaaatccaaagacctgaaaaaggacaaaaagaaaaaaaaaaaaagaaaaaacaaagaaaaagaagaaaaaataataaagtcaagcgcaaactgatggggagacagtgggctctggtttccaggattgagacaatggtactgcggtcttggggagactgcgttagctagtggggagtggtgatttttttcatgcttgtcacatctaaatggtctttaacatgagaaagttttagaggttataatttcctgctttgtttttatttagactatcaaatgaagttatacatgttgtcagtcaaaaaatgaagacaccctctgccccaccccacagaatgctttttatcttgtctctttgggttatgacccaacaagctaagtaccattaatgtaattaacttatttaaattagttcctagtacataaatgtataggatttgggtaattatttaatcatccttccttagtttgattctactccttgtacttatttatcaaaacctagaccaatggtgcatcagagatgcaaaattctacttggaatactcttgaagtttagtttgctttataaagcagtgaaattctgttacagacagggaagaaatacaggttacaaaaagagaatttgggatattcttccctcttaaattaacttttaaaatagtctaagtaacaatttttaaattatttaacttaagttcgcagccccacctggtaccaggcgaacttcacctcttaattattgtggccctcggagccttcatattgtaacttatttatttaacttattcagcatctgtgaaaggtgcactgtatagtttatatttttaatttaaaacaacagagagcactgcagtttgtttgctgtcagaacaacagagcaaattttgtggacaagcaatgactattcagcctgaacctgtgcattcagaaaacataagctgagaccctgcttcaccagcctggatttcggggcttctatacagaaactggaaaaataaattttaaaaaaatcgtaaacaaaaagagagaaacccttacactagctgcttccaagaatgaactctgtgtgtatgtaaagcaacaaaacaaaaaaggaaaaaaacaaaaagcagaaaaaagaaaaaaaaaatgaaaaactttctatttctagtgagaaccaaagaaggctacctcactgactttttccatttgtaattttaatcgtgttgatgacaccaaagataccaaagatttctttctctgtgcggtctgcattttgcttgtgctcttttataatttgaacgattttctctgacatatggtatgtacagccacagctcagataccccaaagaaataattatctatgcgacggcggctgctaatttggaaagggatattttctgtgtttctcttatatgtttgctgtctgctcgacatgttcaagatgcgagttcagatgctgctgtaattggattccttaaattctgattacaaattgaggaaggaaactggttggaaatggccttcagtcctagccatggcctctatccccgctgggacctgtcacagtaaagactgccaattactgaaccacagaagctctgaccattgagtagttgagctggaagagaccttaggaatcatttagtccaagccccggtggcccagaggaatgaaatagttatccaaatcaaataactcttgagagtgaaagcccacacatgcctcctggttcctgccccagtgctccgcttattgtacagtgctacctctgcatgagagcggtcccacattgacaaataggatggtggcaatcctttagcaatgagcagggactggggtttatctcttaacattttcagctgtaaaattagtcacaagcattttcagtgtcccattagtacatagtcacatatggtcggttgcttcgtgaaggtggcctgtcttgaaatactagggctcatacgggatttttgccctaggaaaaacatgttgatcccaatgatgtgatcacttttgaacctttccattacaaagcattgtatagataactttttaattcagtaggaggagaaagttcattcttggcctgttggctttgattattatgggtactttaaagtcagtatttatcaagaaagggaacttgaccaccattggcacatgtgacatttaagctcttcagccttttcctttttagttgtaggtgtttacatttcatttctaagccaactctgtatttatgagagaagtttaagccttacatcatttgatactaaagggttatttgtggtaaatgaaaaatgaccccaaaattacagaggaatatgccagtttaagaaatggctacttaaagttgcttctctctttccttcttactcatgaaattaattggtcttcttcaagtttctttagattccattaaatgattaaatcactattaagagccattcatcaacgtgatttgtgtgttagccaatgaatctgtctcagcttttgaccaaatgggttttagacaaatgcaaagatctgcctctagtccatatggctctttttgagtgctagtattttgcatttcacataatgtagttattttgagcttttaaagagagcatttagacaaagaagcaaagagaggaagggaccaatcaactcatcagttccatgcatcaacaaagcatagctagtagaggaatataaatgacagattgacaaactgtaggaaacactgttactctctttctgaagttttcaagcaccatcctatgtgaaagttccctcctgtccaaacaagctcaaggcccatcttctccctatacaaggcaaacctgtaaggccttccttccaaagagtacattgctttggttttcttcctaaattcctattggaattagaactctcagaatccctgggagacagagcaaagatgacttaattcattgagcagcagagctccctataagtgaacatcaccttccccatctttcctactgccacacccatacgagagaggatctagaaagagcgatggcagcctgaacacagaaaacatccccacttggcagacctctcctcagcaatccccccagcctcatgcttcacttgcaaagtgtgacataaccacgggacgagtgccttgcttgaaccaaagcaacgatttagccagtctggacctctctgtgctttttttaattcttcctgtgaatacctcagcttcaactgggcctccatacagtcagttggtgggcttattgtactgtggtgctttgcaatgcaaccctgcaaagaacaagatttgtactaataccaaaggttctttctctatgtctcctcctctgcctccctcgttcttcccttttttctagttcttcacggttccaaagctttactatgaacctgggcatgttggcaatgcagaccgcgcaattccttaccgaattttctcagatatacctcatagacaatagtgtttagagtaatgttattatagcgtatgtaataaattattcactgtttcttttggtaactgtgatttaaaaaaagaaaaaagaaaaaaaagctttatacgttttaggttgtgcttttgtaatagatgaaaaaaggtgcgcttaaaaagaaaatgtatgtttttttccccctttggattttatttatgctggattggggaaagttgcagaatgagcccaaagtttacagtttcatattttgctgaagaaacaatctgtgttcatttgctctgttgaaaagaataattattttctacatttgtgccacttggtctgaacaattaattgttccgtgttaacagtgtagtattatgattagcaactgccaatcagtgctataattttatgcatgaggctaaaaatttagcagtgtgatgcattgtggtcttaatagcaacatttttcattttgaactagatcttcccctttggttcaatggactttatttatgcatgggcgcctattgtttgttagcagttgtggaacagttgtgtatacattaaactgtgaaaatgtacacagttcagcctcagacggtggtaatattggttttattgggagatgtgtcacctcgaaaataccctttacatctgttgggatctgaaaatgagtcacattgaattgggttccagctttataatgagaaacgttattcctaatttttgagttagccaatttgcattccacaaattgggatcctcataacccaaatatatcaccgtatgtgagagggatttgaaagcgagtattgaaaaactcacctttgcatatttaatttccaccaaaaggagttattttggctttatgctcatgaacttagacctaactggccatgtatatgtagatgcaaattcatctagctgtggccctctttgatctctgcttgggaatggctatttttgactatgcgtggtttcttctcgtattttgtgatcaggtcagctcccagtagaaactcaaatggcatcaatattactaactcttctctgcccacttctcttttgtccactctcctagacattcccaccaactgttccagtgatttgggcaaaaatacgcagccatttcccaaaacttcacatgtgcagctatcatggctgtccctccctagacttggaggtgactctcacttaatttttacctgcccaacaatgttccatctaccatctaaaaggtaatataagaagaagttttgaaacccactttaggaaaaccatcttctttaaatccttcaattatctgaggcctctatatgtcaaaactatttttcagttgcaggggattgggcaaacttgttctttcttatacttgggttcaaagacccattctccagtttcatatttcccaaaccaaaatgcttgacataaagccaaatcaactgccaagcacactttattttgcataggagtatgcagcctagggaaccttggttgaaaagcagcagtctgctatgcaaaatattggaaatcactgacagtgtagcattcatattatctgtcaatgagggtatattgggaacgtgctctcgtgaataataaaaagcaacatatttttatttggccttataaattaggttgtggtaatgtaaactttgatatatagtctttttatttttctcttattaatctgccaaagatgggaacagatacaagaatttttcaaattggcttttgtaagacaattgatgattgtaatagtgtttaatcttccagaaagctttatatgttgttccacaataaaattgatatttgtttcagcaaagttttcctgacactcacaaacccacaaactgttcctcttaatgcagatattgtagaatctacaaagttcaaatccatttttgatccaaagaaagtagaggagtatttgagacatgagtgtacccagccctttttttaatcacaggcaatgcatgggtctggctggttacactttgccaagaagacttgtcttatgaaacccaaggtatattttgttatgccattttatgtccttttcttttaacattgtggaaagtggtatgttgaatcaagtgtaagctgagttttccagacaactgaagtagctacatcatgaatgttattttgttattaaagggtttttactcagtgctttgtgccaatggatgtccttttccttggagacacataactacaaaattacctcagcttggcctggttttctctcctgccctcttggggaaacatgggcctggcctgggaaaaggcaggtcatgggctggaaggtaggttttggtactaggaagaaatctctgtatctgtcagctttaaagagaactgggccaaaaatctctaacctcactctctctggactccaacacttccctgcaatcctttggtcttgagcatgtgccagcatgaaggcagactccagttcatacatgaaaggcaagaaaaagaaaatagtaaccttgaatcttctgtgggccaccaggcactcacctttccccaccttgcacactatccagtcaaggctattgcagcccatctggtggctttacatgggacattaccaaaggcttcttcctccatcctggggttgcaaaggatccaggtcccctccatccagtggggctcttccacatcagaagtccccctcccaccatcctctgcatcctgtttagctatcccatctataccttttggagatgattatttagaaaacaaagaaaggtatggaatggggtttcctattgtttgctaggttatattttagcaattctcaattctttgatctggaaaaatacaagagggaaaaggagaccccactatctccctgtgctttgctcccatctcagggggcaggggcagtgcacattgcctatgctgttgatctgtcttgggcgacaggctgaatcacagctattgccccagccaaaaacatggcccatcaatgcctactttatctctgcttgaaaatcctattcaaaaagttgtagagtttgaggtttttatccccccatatcctttgctttggtccagtttggcctttagcataagagtcagctttatctctaggaaagttttttcagattatgacaaggaacctgccacctgggaagaaaagagtccgaagactagcaatcggataggtagtcataccattaacagatacttccttgaaggtagaatattatttcctttctttacagttttgtgttacacaagtccaagtggtgccagcaaacttcttaccgtgaaatgttgtaaaacacctggcatactgaaatttctgaaacaaaaacacaagctccacattgataacttgataaataaccactaaagtttagatgcagggactgagatgatacaggcaaaatcttggtgttggtttctcttttaattcgtatcttcgatcacctaacctttctcaatccaagagcagttcagtcttttctccccaagtctaggatgccaaagagcatcataggaaaagataattagggattgaccagcatttcaattagttctcttcttcatctttgcatttctcaaaagtgttctcctggaccagagggaaagagctggtccattttttttcattctttctattcaaatttttccacccagacaatactttattaacacagatactgtagatccttccttggtcagtgaattattacaagaggagctatccttccaccaaagtgagtgaaaacaagttccagtatcttttcttccatccagttttgttctcagaatccaagtcagtcctgggtcttttctcactttagaccctggcctcagatgtgtttattcttgctatttaaaaatacctttaaatttcacatgctggcctgcagaacttgcatcctttgttctatactgttgactgcttgatggtattgaaaggtgactataatgagggaagaaaggaggaggtaaagagagaagaatttgtcccagatctgtttaaagtttcaaaatttaaaaagggacccattaaattatgggaaaatggctatagagtgtgagcctccgttgaccatatgctcaaagaccgtactctgccacctgccttccaggtagctattctagaaactcagtcctttgtggaaacccaactaccttttaaaagtctctttccagattccaaaaggacaagagatcagagagtcacatatacgcctcttgttttattttcttgctttcacgggtattattgccaagaaaatcgtagggaaaaactttaaacttttcttttcagttgatccctttgacatcacctctcatgtttaaaatcaggaaaacacacccctaaaatttgcactctcttccgttttgaaaaagaaaacccacacacaaatgcacactattaccgtctttcaccctgcgctatatttccaaagtgtattataatccagatattgccccatctcaaacatgttaagtcagactgtgctgaaagactttccagggacggtcaacagggtatatgttcagtggctgccctgaaatcctggtggggatgaggatcacgcttcatcatcaaggggatgcccatcccctgataagctcccagtccttttggaagatttctttgaatgttaattgcattttcagttttgctcatttcccaccccaatgttttgtctgcaacatcgcttacactggattctttctatttttattcctatcattaaatggtagtgctgtaaattctgcaattaatgttaaataaactgctttaattcattg

SEQ ID NO: 7690 - DNA, 1888 bp, Homo sapiens
gcaccctgtgcctcgggggtggttgttcttcaagcaagttctgcttgcacttttgcatttgcctaacagacttttgcagaggcgatggcagagagcagctgcaggcatggtccctggagccgagccttcaccacgcactcgtccaagttcggatgcgggaacctggtcccagcttgagttcctgcctttcccaccacaaattatcaactggttgatgtgtacactaattacatttcaggaggacttaatgctatttatgttgtgcctctgcaggcaaagcccttaataaatattttacatcctttctaatgacaatgaatggaattaatcactcaacaggtatagtattacgactcatgtttactttttaaaatgatttagaccgattttcagattttatttcgttatgattaaagatgtctcatgtacttggaaaagtgagcattttttttttttttgtatttcactttcataccaggcttaatgtcaatgacatttttatttttgaagtactctgacacctccaccctctactttattagaattggaaggcaaatttttgtccaaaaacctacagacaagtactttgagagaatttccaatataatattagacataatgataattttttccatactcagaatgaaaaactggatattacgtttttgttttggggtttttttgtacaaatttagctaatagctacaggctgagagaattgtaacatagcatgacaaattttgtgttgacttgaaaggaatcacaccattattccttagaagtaattacatgtgttctaacacatttgagacagggttggactcccatttctcatccgagaaattacttaacccttcctggcgctgtacagtcatcttttattctatttcctctttgctgtttgtagtagagacattttgaatgaaacttggcactgcttgattcaaaactgtggaaaccagatctgtttagtctcctgtttgtatgcgtttgctaatggtagctaaataaccagtttttgttgtaaatgcaccaattctgaaggcactttatgtactacatggaggtcatatctggttttgtttttatttttttatcatgaacattaaatgtgatgatgatttcttttccctgcacacatctttccggtgcaatatctatcaattgtgaatctggctgctggtgtataaaaacctggatgtaaagctgagcctacagacctgtcctcaccaactgttttgtgatttctactcaactacaaagatttatttaatgtactcttaatctaactgagttttgttaccaatgacctgttgcatgcttcaataccgtgtactgcctgagttgtgcctcttgtgtgctagattaaaagtgagacagagacttgacttgatcctctgagctcaagctattgagctggtagtggcagaggactgagggtacctgcacagtttgattcttttccacgtgtaagtctccattgcagaattgtcgtgctttgagaaaacacctgaggcagtgtgggagttgaacgaccctgctgtcctttttaacctgtgttgtcctagaccctgtcggggcagtcaggggacactagagatttgatctcatgcgagtcatcaataggacaaaaaagttgtggtttggggaggtctgtttgttacataaaaaggacctttcggtgtaagaaattgccgtttttaccctgccctggctggcatgtgagaagccatggaaggttgtggttgtaaatgagttgtctaaaggggtgcagaggcctgaggtttctaaaagaaggtagatttctacagagctgagtgttggttcctttttcttattggttgaaaattacctggtagtgatcagaaaacttagatgctatgtaact

SEQ ID NO: 7691 - DNA, 2296 bp, Homo sapiens
cctccttgtttttgaaagttagcataattttagatgcctgtgaaatagtactgcacttacataaagtgagacattgtgaaaaggcaaatttgtatatgtagagaaagaatagtagtaactgtttcatagcaaacttcaggactttgagatgttgaaattacattatttaattacagacttcctctttctaagattttgtgaattggttgaatagttctatacaaatgaagtatggaggtgtgtatgtttatatgtatataacaaaatattttcattgtgaccactctgaagtaagagcaatgggaatggcattattgtagaataagtcattgtatttttaacaccagaaagaaccttgccgatcaccaggcataacctaattttatccatggaagaaacacagaaaggcatctaagttagagctggcaccagaactgagacctccagaaatctattccagtattttttccactacacaactgccttcctgacaggttctgagataagtgttatgtttgtagatagagtgaaatatatttatatatatataaatatatacagatacatatctgtgtattatctcaaggaatgtacaaactttagtttttgattataaggacttcactgcaagttttagttaagaggtttgtatataaatctgttatagaacaggctgaaatttcttgttcataagattatgaaaccacatgagaagtgataaaatgtttgttaaagctagatagaggttaagaatcaagatataatggataattttcatagctgcctatcagaatttcccaaatatttagcatcttccttgataatatgtattttcttcttgaatttcactggcctaatgagataatactcttatctttggctctacctaaaagttggttaaaaatgcaattggcattaacaaggaaaaatactgaattagtaattttaaaagtctcacaaagaaaatcccaggcctagatggctgcattgttgaattctgccaaacattaaaattagcactaattttttgcacactgtttctaaaagtaggagaggaaagaacacttcccaacttactctaggtcagtattaccctgatactagactagacatcacaagaaaactataagccaatattccttattaatacaaacacaaaaatcattaacaaaaatattagcaaactgaatccagcaacctataaaaaggattctatatcatgaccaagtggaatttatcccaggaattcaaggttggttcaacatctaaaaatcaaataagctaatatacagtcagttctcattattcacagtaattatgttctacagaatattctcccataaacactgaattaaatatggaacaactgcttttaggagaaagtgtatttgtgtatatgtgtgtatacatatgtttatctcacacacattatgagcttgaattcttaattcatcctagcaaattctaccttattttacagaagtgaaagtgaggtatcagaagtgttaagtgacatgcctgaggcacccccctaacaggtgtcagagctgaaattcaaaccccatccagctggccccggagccagagcttcttgtactacacagaattgcccctgccatttccaccctccagtcatttctctatgagactgaagcaggaaggcagagcatcatcttgttcagcctcagctgggaacatgtgtactgggtgactcaaatttttcacccatttacacatatccacaaatgactgcaaaagtgccacggatatcaatttgagggttataaattttagcaagttggtaaattcacaaatacataaccttgaataatgaggatcaactgtaccatatttaataaagcacaaaacccacacagattgtcttattacagcatttgataaaatccaaaactctttcataaaaacactcaacaaacttaggaataaaaggaatcttcctagatatgataaatataacatctatgaaaagcccacacctaacattatacttcatggtgatagactgaaggctgaatgttttccccttaagattgggaagaaggacaaggatgttcactcggcactacttctattcagcattgtacttgaagttctagccacagcagttaggttaggaattcaaggtttgttcaacatctaaaaatcaaataagctaataaagaaaagaggtttatactgcaaaagaagtgaaactatatgtattcacagttgatacatagttgtatatagaaaatgctaaagaatccataaaaagtaataaatgagttcaacaggt

SEQ ID NO: 7692 - DNA, 2005 bp, Homo sapiens
ccacagatgctccatgaggaaaatccctgtccacattggaataaaaaagacatttttgttacaaagtttgcagtataatagagttaacagtactgtctaggctgttgcaatatattctctttcaatgtaccttccttcacctcgtcgtatatatcctcgataagtattaaaacagtatttgagtttaaaagagtttgtatatatttaaatgaataactttttatactctttgttacatgtttgtatcagtatttagtggaaaaccatttgagttgttttgggttagaatttttctttttgtactgtttctttaaaacagagttcttagtaacaggggcagttcctgaattcaaataaaccattttgtatgtttggattttgaatgggttaactaattacaggctaaaataatgccttttttagtgtttttaatttttagaattcactacataaattgtaagtaattgtgggtctcaaaaacactaggaacttttaagtgtcttagcacttcctcgatgtgcctgccctgagggagtgagttcacatttgagacaactgcactccagtgtggacgtgcctttgtcttcaggccatgccgaagggtgtttaaagcagtcttgcaggtcgctcctttcccagccgtggataaaaactgaagctaggaatctaataaggaatgctgatttcctcagttccattttgaggaatggggaaggctattctaaagaaaaaaatgggatttgttttctcggcagatctgcaaggctggctttaagagcacaaggagggaaagtaacgaaagggctggactactataaaagttacaaatacgtagttagaccaatagatttatatagtcaggtttttgtcatgtaatttattaactaactattacagaaacacagctaagaatatcaagtatttctctggctcttgacagaaaaaaatcagttgacttaaccctttgctgtcaaaagagttggcgtttcctgttctgggtgctactgccaaacgttatggtacttagagtcgggatgcacaacttcaaccaccgacttatcaatgcagccgcctgtgtattgcaattggccgttaccttaagcactgagccacccgggtttagttcagccatttcaagaagtatatttaacgtcggtagttctgctttattaaaatgcagcagaggtactcttctgtcccttccgtttatagttctctgagagagttctattttttggttttgttttgtgttttcttttgcattttgtatcttgtatttatccctgaacatgttttgtaccttttttttttttttttttaagaaaaggaattcttttgtgtatatatagatacttgcatgatatactgtagtcaatgttcggttcctcaaaaggtcttgctgctgtcaggtgttatgcactccatccatcataactgtatgaaacacatttcatatgtaaataaacgtgggacatttggcccttgtgcttctgtgagagaattattgatggtgggtctctgacatctttgtgaagtttgggaagtaattaattgcagcgacaagctacagggtgttgcagaattcttcccactcagaagaatggcatattcgttctcattagtaatcagctattttgtcactttcttgttgactccatcagtacatgggtacaatccgagggtgtgaatttcagcttgaaattccattgctgttccttgttttgtttgtattgctctaagttgtattcataatagcactttcatatgtttctgcatttgaaccttgcaataagcctgtgtggtaggccacataggtccgaataacctagttttacagttgagggagctgagctcagattcagttctttgccgaagccctcatagctggtaagtggctttgcatattagaacccaaatattttgctctctaaatctaatgctcgctctatgtggttatgtacatattgacaaatattcatttattcaacaaataaaaagtatgtac

SEQ ID NO: 7693 - DNA, 146 bp, Homo sapiens
aatgagaagcagttcctgggaccagattgaaatgaattctgttgaaaaagagaaaaactaatatatttgagatgttccattttctgtataaaagggaacagtgtggagatgtttttgtcttgtccaaataaaagattcaccagtaa

SEQ ID NO: 7694 - DNA, 311 bp, Homo sapiens
accagcaatgataatgatggcctctctcaaaagagaaaaacaaaacccctaagagactgcgttctgcaagcatcagttctacggatcatcaacaagatttccttgtgcaaaatatttgactattctgtatctttcatccttgactaaattcgtgattttcaagcagcatcttctggtttaaacttgtttgctgtgaacaattgtcgaaaagagtcttccaattaatgcttttttatatctaggctacctgttggttagattcaaggccccgagctgttaccattcacaataaaagcttaaacacattgtcc

SEQ ID NO: 7695 - DNA, 1553 bp, Homo sapiens
ctgcatcaaaaacttgcatgaggggactccttcaaaagagttttctcaggaggtgcacgtttcatcaatttgaagaaagactgcattgtaattgagaggaatgtgaaggtgcattcatgggtgcccttggaaacggaagatggaatacatcaaagtgaatttctgttcaagttttcccagattatcattctttgggatgagagaacattataaaaccactttgtttattttaaagcaagaatggaagacccttgaaaataaagaagtaattattgacacatttcttttttacttagagaatcgttctagtgtttttgccgaagattaccgctggcctactgtgaagggagatgacctgtgattagactgggcggctggggagaaacagttcagtgcattgttgttgttgctgtttttggtgttttgcttttcagtgccaactcagcacattgtatatgattcggtttatacatattaccttgttataatgaaaaaactcattctgagaacactgaaatgttatactcagtgttgatttcttcggtcactacacaacgtaaaatcatttgtttcttttgactcaaattgtattgcttctgttcagatgatctttcattcaatgtgttcctgttgggcgttactagaaactatggaaaactggaaaataactttgaaaaaattggataaagtataggagggttacttggggccagtaaatcagtagactgaacattcaatataataaaagaacatggggattttgtataaccagggataataaaaagaaaaaagaagttaatttttaattgatgtttttgaaacttagtagaacaaatattcagaagtaacttgataagatatgaatgtttctaaagaagtttctaaaggttcggaaaatgctccttgtcacattagtgtgcatcctacaaaaagtgatctcttaatgtaaattaagaatattttcataattggaatatacttttcttaaaaaaaaggaacagttagttctcatctagaatgaaagttccatatatgcattggtgaatatatatgtatacacatacttacatacttatatgggtatctgtatagataatttgtattagagtattatatagcttcttagtagggtctcaagtaagtttcattttttttatctgggctatatacagtcctcaaataaataatgtcttgattttatttcagcaggaataattttatttattttgcctatttataattaaagtatttttctttagtttgaaaatgtgtattaaagttacatttttgagttacaagagtcttataactacttgaatttttagttaaaatgtcttaatgtaggttgtagtcactttagatggaaaattacctcacatctgttttcttcagtattacttaagattgtttatttagtggtagagagttttttttttcagcctagaggcagctattttaccatctggtatttatggtctaatttgtatttaaacatatgcacacatataaaagttgatactgtggcagtaaactattaaaagttttcactgttc

SEQ ID NO: 7696 - DNA, 437 bp, Homo sapiens
cggaagccaggaggcaggcgcgcgtccaaatccagacgttctccgcgggtgcttcgcggacaaggtgcagccaaccacacgagcaatactgtgctggagagtgagaatgggggtgagcaggcgaacagagctctctctggatcagctttacttgggtagattaagttaaataagcaaaaggaaacccagaaggaagagggcagaatctttaattacctttttttcttttctttttgatttttctgacactgtgtgcgaaggcttggagtccaaggtgttctgacaagggtggcttttctctgccattcgctaaggcctttgtcacttttccaccacagaaaggctctggccttggatacagagatgccaattgaaagcagaaagttctactctcgtatctgttttttatcttatcttattctccatttaagagtttt

SEQ ID NO: 7697 - DNA, 1587 bp, Homo sapiens
aagcaggaaagaagcccccagtaaacactaagatggacctcaagccgactggttccttgtacttgaagtacttgccttttttgtttcctcagttttatgttcttgcattataattttatcctaacctccaaagatatttgcactgcttttaattactgctgtatatttgttgattttggagttacaactgtggtgatagaaaattgagttgatggtctgtaccaagtcccttgtctatgttcttgtctttcagaataatttttatataaatatatatatagtgaagaagttttttttaatttttggatgggatattcgcaaatatctgtattatacactaagctattacaatggtacttaaaataatgtaaatttgaagtcattgttataaaataataaagtggagattacttaagtatttaaattatgaaagaataatgcagactttttattgtttcttaactgactagaaagagccaccagcattactctgtgccttttggacatcagtttgtgtgttctgtaggaattgtgtgcattccattcacacagtatttctttaggatgctgtgatgatttgaattacaaatcctacagtcaatagctaaagacgaaaccttcatttcagaactctcatgaatattctttaagtgctatttaaacctccccagcacttagatgcatataatggacttacctgaggaaagacagcacataggcatggggagaggtaaccaaggtgaattttacaaactggtgtatagtagatttaaatgctcaaaaataaatgtaactgagaagagttaataattgtgagatttttcccaaattgagatacagaagaaaatatagtttgaatctgaaatttaacacttatttatgtaaaacactttatttaagatattttctaatgattttaattttagagagtaccttttcattctgtgtgttacagagaagtactgaaaagttaaggacacttgggggctacttttttccctctaaactaaaaaagacattggctgaattataactagttagttatcacctcgtcccttaaagtcagtgacctcctgtgtttgatgtatattacatagagtcttaagtcagtgtacagttccactggaatttgacagttgtctctacagtcatgcaactcgaagtagaaaagagtgctggacataggaagggggtgcttggtttgaggggttaatgtgaggcctttttgaaaaatgaatattttgataaaaagaattcttgttttagcacagttgatgcacataagtgattctcatatttgttgtataaactggtttaatacatttggaacatagttggattacattcatttcctgggaaagctagcttaccatacattcaagtttataaaacaatttgccataggcaaagccatttaaaaagttcattctgaaattatttcatttacctacagtgaaataattgtgaactaagtagtctttctgaaaactgttgggttctaggcattcctgagaaattgaaagtggctacctttcatgtcaaaaatgttgatctattataaataaaatgtttttgcatatgtttttg

SEQ ID NO: 7698 - DNA, 1235 bp, Homo sapiens
gcgccccccatggctgggagcccgaagctcggagccagggctcgcgagggcagcaccgcagcctctgccccagccccggccacccagggatcgatcggtacagtcgaggaagaccacccggcattctctgcccactttgccttccaggaaatgggcttttcaggaagtgaattgatgaggactgtccccatgcccacggatgctcagcagcccgccgcactggggcagatgtctcccctgccactcctcaaactcgcagcagtaatttgtggcactatgacagctatttttatgactatcctgttctgtgggggggggggtctgttttccccccatatttgtattccttttcataacttttcttgatatctttcctccctcttttttaatgtaaaggttttctcaaaaattctcctaaaggtgagggtctctttcttttctcttttccttttttttttctttttttggcaacctggctctggcccaggctagagtgcagtggtgcgattatagcccggtgcagcctctaactcctgggctcaagcaatccaagtgatcctcccacctcaaccttcggagtagctgggatcacagctgcaggccacgcccagcttcctccccccgactccccccccagagacacggtcccaccatgttacccagcctggtctcaaactccccagctaaagcagtcctccagcctcggcctcccaaagtactgggattacaggcgtgagcccccacgctggcctgctttacgtattttcttttgtgcccctgctcacagtgttttagagatggctttcccagtgtgtgttcattgtaaacacttttgggaaagggctaaacatgtgaggcctggagatagttgctaagttgctaggaacatgtggtgggactttcatattctgaaaaatgttctatattctcatttttctaaaagaaagaaaaaaggaaacccgatttatttctcctgaatctttttaagtttgtgtcgttccttaagcagaactaagctcagtatgtgaccttacccgctaggtggttaatttatccatgctggcagaggcactcaggtacttggtaagcaaatttctaaaactccaagttgctgcagcttggcattcttcttattctagaggtctctctggaaaagatggagaaaatgaacaggacatggggctcctggaaagaaagggcccgggaagttcaaggaagaataaagttgaaatttt

SEQ ID NO: 7699 - DNA, 2004 bp, Homo sapiens
aacgagtaaagcttgcctacttaatacactcaagtgtggggagtcatggggtgtggaggggaggaaaggaaaggtattttgtttctttgtctatacatttcctagatttctatgcagttgggatttttcatttctcttgtaccaatgtccaaaacaagaaagaatgcaatgcttttgagcctctggtctcctggttcaacaacaggcttatatgtatgatacatgtaatttaaaccttcagacaaacttaaatgttggtgcgtgcttttttttttttttttacactgaatacttgctgtgtgcaatgtttactgaatctttaaaactgtgtatttgaccttttttttacaacactggtgacagtcatatggttttgaaaaaaaaaagaaattttgcttcttcccagcttttctcactttcaccctaaacgacacttcctccccagccagcctcactctgtctccggcccgcagcaggagcagccagcagtgcattcaccccacttttgtaaactgctctgcatataaaccaagggcagaatgtttcaccctgatcttatgggaggaatcaaactcccaaaatagtgtgtatatatgtaataaacagcgtcacgtaaatacatatatgcagtgcttgttgtccaaatagaaatgaaaataagtggaagagagaggaagaagtcaaaccatatgaaactgaaaaaatatgacgtacgaaatggacaaaaagctttttctgaaaccaactttttacttccatcatccttttttagcctgttgcttcagagagacacaaagtgaacacactggtgtgaatgtcgctctctgtgtgcttgtgtttgtaatgaaagtctacagccaattttacttgtctaccaccgtgttgtgctcaaagagacactacttgagtgaagatttcttctttccctgtaccagctgttacagtgttacgttgtgtttaaaatgtgtatggtttattgcaatctgaacagagctatgggtttctaccataagtcaggttgtttgttccctaacctgtctctcatagcaaagtcacttttataacagtttaccactatgcttgattataatgtgaaaggcggaattctgagtgtgttaagatggtattaatcatgtcggtgtcatgtcactaagtttaatgctgctgtttttaaaaaaaaaaaaaagtttttttaaaaagccaatctatgtactaaattgcttccaggtaatttttgatttcctaaagtgcactgaggttatctggaagattgggtgtattttttggtgactgctgcattcatcagcaatgaacagtttccactgtatagtcctaggggtcagggggtgggggtttcattttccattcctcagcacagagcagaaatgatagatttttattgtttggagtaacgttggtatgcagcagaggaacgtaaacatttggtcttggttcagaagcctaacagattgctagacaagagaaaaaacttgaagaaaaaagaagcttaatttcatgcttcataagtagcatttatatttatagcaccaatgtacattttgaaactttctttcaggggtgggagttatggggaaggggtgggtgtgaaggggtagatgaaagctttaatttagaaagaaagttcaagtaaaggaaattattttgattaaatatattttatttgatctgggtatttttggaccacattattaaattaattgttaagctgcagttgagttgttcaagtgagagttttgataagccacttatgggccgcgttgtgaatcacttgccagttgtactttatggagcttattttatgatttaaaatactgtactgtacataggaggtatgttaccttctccttatttgtatgtttaccatatactttgatatttgaaatgttatgtactggaaaggccacttatatttctagaacagattggattttatgcaaccttttttccttgaattaacagcaataaaaaaatgaaaaacagctt

SEQ ID NO: 7700 - DNA, 1001 bp, Homo sapiens
cccagccgagctgtttaacaaataaactaaccacaaaagactgagttgcaagagtctcccaggctcacattaaaccaggggttttactccacatccttcccccagacactgttcccaacctgtcatcgcagctaatctgtaggttctctttctttgggttatttttttaagtaatcaccactttcttctagtgatgctttaccaatatgatttacatttgttaacttctccccctaacatatcagatatgtaaagacaaagaacaaaaggtttaatatattacagagaaacagttaatgataatgtaatattttttaaaatggctttttgttgtttgtttggaaggcagggcaggctgccgttgctaaatgatttaataatattgtaattctgtatttctttggggggaaaaggcttttgttttgttttgttttgttttgttttgtttttgtcttgaaaataatagacatttgtagaatatggagactaactcctaggagttgctttactctgtcaggtgacttaagtcactgggattcactaattttctctgagagaacagctgattgagaatttccattgtaaatagctcagtgttgtatagtgaggcttacgatgttttgtagtcttggcgtaaggacacagcccaagtaactgacgtttcccctccccctcccctctgaggagcctgcctgcctcacaactcaccctcacttcactgaatgaggaggctgagcagctgcagtgtttctgtccggaggaaatggatcttaggccactggacaagaacctgcacccaagggccctgaacccattttcctcccctgtcccagccttcccactttgacagacacttttaactgtgttccttactgctgccacaatcagcatggttgtatagtgccccattaggccatttacatacccagagttatactcaagcagaatgcacaaatggacatgtcataatttttgttacaataaatatgaaatttacaagt

SEQ ID NO: 7701 - DNA, 1362 bp, Homo sapiens
gtggcatagcccatgttaagtcctccctgacttttctgtggatgccgatttctgtaaactctgcatccagagattcattttctagatacaataaattgctaatgttgctggatcaggaagccgccagtacttgtcatatgtagccttcacacagatagaccttttttttttttccaattctatcttttgtttccttttttcccataagacaatgacatacgcttttaatgaaaaggaatcacgttagaggaaaaatatttattcattatttgtcaaattgtccggggtagttggcagaaatacagtcttccacaaagaaaattcctataaggaagatttggaagctcttcttcccagcactatgctttccttctttgggatagagaatgttccagacattctcgcttccctgaaagactgaagaaagtgtagtgcatgggacccacgaaactgccctggctccagtgaaacttgggcacatgctcaggctactataggtccagaagtccttatgttaagccctggcaggcaggtgtttattaaaattctgaattttggggattttcaaaagataatattttacatacactgtatgttatagaacttcatggatcagatctggggcagcaccctataaatcaacaccttaatatgctgcaacaaaatgtagaatattcagacaaaatggatacataaagactaagtagcccataaggggtcaaaatttgctgccaaatgcgtatgccaccaacttacaaaaacacttcgttcgcagagcttttcagattgtggaatgttggataaggaattatagacctctagtagctgaaatgcaagaccccaagaggaagttcagatcttaatataaattcactttcatttttgatagctgtcccatctggtcatttggttggcactagactggtggcaggggcttctagctgacttgcacagggattctcacaatagccgatatcagaatttgtgttgaaggaacttgtctcttcatctaatatgatagcgggaaaaggagaggaaactactgcctttagaaaatataagtaaagtgattaaagtgctcacgttaccttgacacatagtttttcagtctatgggtttagttactttagatggcaagcatgtaacttatattaatagtaatttgtaaagttggttggataagctatccgtgttgcaggttcatggattacttctctataaaaaatatgtatttaccaaaaattttgtgacattccttctcccatctcttccttgacctgcattgtaaataggttcttcttgttctgagattcaatattgaatttttcctatgctattgacaataaaatattattgaactac

SEQ ID NO: 7702 - DNA, 1835 bp, Homo sapiens
gatgatcgttgccatggcattgctgcttttagcaaaaaacaactaccagtgttactcatatgattatgaaaatcgtccattcttttaaatgttgtctcacttgcatttccagtcttggccatcaaatcaatgatttaatgactccaataatgtgtgtgtttataaccatcctcgaaagtgaaatgtccttttctttgtgccatgcgtaaggtgagtcaaaccaaacctcattgataatctccctttggtttcctttgaaagtaaattggtatcttgtagttttgtgcacacgaaaggagagaaagtctctccagtaaagagtacgaactagtaattttggggggtctctctaattctggtattttgacatgttataatacgcaagtaaaataaaacaatagtttactcagctcatgttactattccccaacagatattgtggcaaatcacacataggaaagagaatttgggaatacagtagcaaaacataaattaaaactcaaatgccaggacaaaataaaacaatataccagatggagaggatgcccgtattttcatcttccattctaacattatccattgttagatgcataagcattttgatattgtgtaataaatgtggtatttgagaagataaatgatgtagttgatcagtattcctcctctatcacctttttagactttgtaaggtaaatatttggactaacttttagaaaagtttccctttttttctccatttacatttttctggtttttttttttttttgagtgaggtacgagtattaccaaatgatattttctgaagatgctttttggaaagctctgaatctatacctaatgctcttaattattggcttgtttcatttttttcctccagtttttaacaagatcacataactggcttatttttaacagctttgtcaaactacaatttacatgccgtaaaatgtacacactgtaattttataattcattgacttttagtaaatttctagcgttatgcatcgccacaatccagttttagaatatttccatgaccctaagaagtttcctcatgtctattaatattcccaatcctaggcaccactgagttgttttctgtctttataagtttttctttctacatcttatataaatggaatcataatacatgtagtattttgtgtctggcgtcttgcacttagcatggtgttcttgaggttcatctgttgtagtatgtattgatacttaatttttttattgccgaatactattccattgcatggaaaagacctattttatttctaggttcaccagttgagggacatttggattgttcccacttcttggctgttaggaataatgttgctctgaacatgtaaataaagatctttgtgttcacatatgttttcatttctgttggggagattcctaggctagaaattgctgggccatatgaaaaatcaatagttagctttgtaagaaacagtcaaactgttttccaacgtgacattttatattcccaccaggaatgtttaaaactagtgtcttcaaatcctcaccaacatccaggattgtgtctttatgattatagccatttttgtaggtacaaagtggcatctcatggtggttttaatttgcatttccataatatctaattaggttgagctttttttatgtgcttattggccatttgtttgactttgtttggtgaaatgtatacaaatcatttgctcatttttaatttgggttgtctgtcttgtcttctcattttattgagttaaatgagttcttaataatctctggcttacaagtccttaatttatcaaatatatgatacgtggacatttcctcat

SEQ ID NO: 7703 - DNA, 489 bp, Homo sapiens
tcagatggggttgagcaaggctcagagttgcagatgaggtgcagagacaatcctgtgactttcccacggccaaaaagctgttcacacctcacacacctctgtgcctcagtttgctcatctgcaaaataggtctaggatttcttccaaccatttcatgagttgtgaagctaaggctttgttaatcatggaaaaaggtagatttatgcagaaagcctttctggctttcttatctgtggtgtctcatttgagtgctgtccagtgacatgatcaagtcaatgagtaaaattttaagggattagattttcttgacttgtatgtatctgtgagatcttgaataagtgacctgacatctctgcttaaagaaaaccagctgaagggcttcaactttgcttggatttttaaatattttccttgcatatgtaaatagaatgtggtgagttttagttcaaaattctctgttgagaataataaatgcatgaaataccttaa

SEQ ID NO: 7704 - DNA, 734 bp, Homo sapiens
aaatccaattggtttctgttatagcagtccccacaacatcaaagaaccaccacaagtcaatagatttgagtttaattggaaaaatgtggtgtttcctttgagtttatttcttcctaacattggtcagcagatgacactggtgacttgacccttcctagacacctggttgattgtcctgatccctgctcttagcattctaccaccatgtgtctcacccatttctaatttcattgtctttcttcccacgctcatttctatcattctcccccatgacccgtctggaaattatggagagtgctcaactggtaaggagaacgtagaagtagccctagggatcctttttgaaactctacagttatcgcagatattctagcttcattgtaagcaatctaggaaataagccctgctgctttctagaaataagtgtgaaggataaattttctttgttgacctatgaagattttagagtttaccttcatatgtttgattttaaatcagtgtataatctagatggtaaaaaatgtgaaattgggattagggaccaaccaaaatatttcattaatgctttcaattgacaaattttggtctttctttgataagacaatatgtacatagttttttcaaatattaaagatcttttaactgttggcagttgttatctacagaatcatatctcatatgctgtgtagtttataagttttttctctatttatcagaataaagaaatacaacat

SEQ ID NO: 7705 - DNA, 581 bp, Homo sapiens
aactaagcgtgctgcttctgcaaaagatttttgtagatgagctgtgtgcctcagaattgctatttcaaattgccaaaaatttagagatgttttctacatatttctgctcttctgaacaacttctgctacccactaaataaaaacacagaaataattagacaattgtctattataacatgacaaccctattaatcatttggtcttctaaaatgggatcatgcccatttagattttccttactatcagtttatttttataacattaacttttactttgttatttattattttatataatggtgagtttttaaattattgctcactgcctatttaatgtagctaataaagttatagaagcagatgatctgttaatttcctatctaataaatgcctttaattgttctcataatgaagaataagtaggtatccctccatgcccttctgtaataaatatctggaaaaaacattaaacaataggcaaatatatgttatgtgcatttctagaaatacataacacatatatatgtctgtatcttatattcaattgcaagtatataataaataaacctgcttccaaacaac

SEQ ID NO: 7706 - DNA, 3107 bp, Homo sapiens
tggatcttgaagaatttgaagctaactccaggacaggcagaggacaaacaaggatgctgatgaagtcttcttgcattccccatttctcgtctcatgctcccttctcatgcctcccttcatcttcagatgaaacacaattccctctcttttactctgagttgccctctgatttaaccctgaatagtcccctcattagactcagaagcagagttctgagccatgctctttgtcttttgtcaaacaatctctcccactcacagtagtatgtattgcatgaagattaatgtaatgaattggttagaattttctaaactgttaaaaaatgtttttaacatttgaaaggagttaggtacaaattgtttttattaaaaatttctgcctgtctcaggtgtttactagctcttttacacttgtctccataaaactgtgaaaagatgaaaatttgggagaaaatcttggtgtgtttataaaagaaaatatctgtagattttcttggaccagaactcaccatctaattgcatgtcattgggggaggggtaataaatgggtgtgtgggtatcaggctattgtcatctaaattttaaggtttgagtctttcttatcctaggtggaaaaagcacttacatatgagaaattcaaagcctggacaaattcagaaaagttgacaaaaagtaaggttcaagttttccttcccagattaaagctggaggagagttatgacttggagcctttccttcgaagattaggaatgatcgatgcttttgacgaagccaaggcagacttttctggaatgtcaactgagaagaatgtgcctctgtccaaggttgcccacaagtgcttcgtggaggtcaatgaggaaggcacagaggctgccgcagccactgctgtggtcaggaattcccggtgcagcagaatggagccaagattctgtgcagaccacccttttcttttcttcatcaggcaccacaaaaccaactgcatcttgttctgtggcaggttctcttctccgtaaagaggagcaattgctgtacataccctcctttccttctacctatcttgccttaattaacattccctgtgacctagttggtgcagtggcttgaatgccaaaataaagcgtgtgcactggatagtgtgtgaaagtctttgctgaaagttccagagccattgagaataactgaggccgcagatgcatgaaatttgggcctgggaaggctatgctggttttggagtgtttggggtgcctgccattgcctctgccttcacctaagtctgtgcccattgtttcaggggatcttatggagcatctcagggcttcaggagccagccctcttccatccgcccggctctgcccaccaccactgccaggctgaacaggggactagtgcccaggtgacactgcacacaaagccaagggcaaaccctatagagtaaagctgcagccaccctgtgtctcatgtgcagctgaaatagtgatctgcttctgtcactgtcacatagacagccctgcatgccccctgtctcacacagtttgtaatgaagacagctccttctcatctttccataagcctgagatacaagttcagggactcagcaatgcactttaggactgagctaggaggcaaatatctgaagcttgctatgctgttctttccattccttttccctctgaaacacacaaaataccaaaggaacttacgcaacacaccactgagtcctctaactaatcatatgtgctcagacacagctcaagcacaccccttagttaagaaagaacctccatatacattaatttttttctgcctaaaaataaaattgcgttgtggcagcaatttggaaactacagcaaagtctccaaaaaaattgaagtcacccacaattccaacacacagcaatcactgctgttaatagtgatatacatccttccctattatgtgtatgcaaatagaaatttataagcattttactacaagttaatcatatccttcagtagcttatttcttcccttatgaaaaacctcccttaagatctttccaggtcatcaatttgatgtgcatagtattccactgtgtggctggatttctataattgaatctaattttagacagtttgagtaattaaaattatttctattaacaaataatagattgctaataatatatattatgctgttttggatatactaaatatttgctcacatccttaatatattttttaaaattcctaacaatagtactgttgagataaaagttgagcacattttgagacttcttccaaattggtccctagaaagttacactggtttgtactctcacttatgtcactgtttataccaccactgactgctgcctgctttattatttctttaatgagttggactgaacagtggttaatcctgactctgtttttgactgacagttaacagttacatgaaccattcatattacagctcttacttaaatttgaccaagccaggatatatctgttaggccacattcatttagggatcatgttttccaaagcaggtttgggcaaaattaatccacaggactgaaaggtatacatctgtgagttttgttctcacttccacctctaatttgaagaacactttaattgacacagaatacatttcacatatttaacctctacaataagttctgacacattttccatgaaacaaaccatcgctatattcaagataatgaacctatctatcatactcccaaattccttcttgcatctttgtaatttctcactcttccttctccctctccccgtcccatcccaaccactgatctgctcaggcaactaccaatcttctttctgtcactatagattaatttgcatttttaaagaaatttacatacatggaaccatacatcatctatgctttgtagtatgactcctgtcactcagtacaattattttgagattcatttatgttattgtatgtatcaatagttcatcccttttattggtaagtaacatttttttgtataggtataccatgatttgttgatgaacaaatttacctgttgatgaacatttacgttgttaccaagatttttgctattgaaaataaagtttttatgaatatttatatatat

SEQ ID NO: 7707 - DNA, 44 bp, Homo sapiens
ccttggaaccttaattcgaaatgtactgaagaaaaagtaacagc

SEQ ID NO: 7708 - DNA, 1052 bp, Homo sapiens
ttttttcacaaaatatgctgaattaaagattagggccttaaagacatttccatatccttttcttaaatatcagtaaaattgtttttattaactagaaatattaatgaaaaaaacgtagacaatacacaaattaatgggcttcttcacttcttctaatttttgcctaacagatactgcatattctcaaaaagacaatttaaatgtcatttaaaaacaactttaattctaagatgtgtaaatattttgaaagtcaaaaagggctttcagaatactttttacataaaatctgaaagagttataatatcggtaagaaaaagtaagttgaaaaccatacaagacgctgggtcattaataagaaaaccattgactttaagtataaagtactggtttgtttaaataattggtaaacttttatgtacgtgttgtctatgtggtggggatggcaggttgtattaacaaaaatgaatcattctagaggtgtaacaatacatttcttatataattttataagtcatttctaatctttgtataaaacagaagtgagcagatgaatcagaaaaaagtgttttgtattttaaagtaacagataaccagtgattgaatctaagacaggctgtaagcatcgctgagaaactaaaaggacttttgacttttatctggatagacatttctacagtaaaatcatggaaaggcatcagcattgcaaagtagcatctaggtagaaatcaggccaaaattaagctgtggtttccctctgagtagtgggaatagagaaaattaggaaattgtggttatgtgaatatttctttaaaacttttatgtacattatagtttattgcttcatatttaagtttagtttttaaggtaaaatgttattttgaacaaaaagacacttataattttccatacctattttcaactgaaggcaacttgtaagatttaactcagtcaataacatactggttttactcatctccccctccattgattagccaaaaaaaaatgaaatcttactaattcattattgaataaagaccacttttatcagagtc

SEQ ID NO: 7709 - DNA, 760 bp, Homo sapiens
cacacagagagccgctgttgactagagagacagtctgtcctggacccgtctgtggggtcattaccctctgcctcctggaagaccaattgcagtacaaattgaaatgggtcggctctagccccagtcccattggaaggttaaaaactggagttctgcttccttgattcagtggctaagtcctttatttattgaatttctttgggggaatctatgttttacataaatagaatccaaatcgtatgaacagttatttaaataaacaaaattctttgggtctgacagtaacagaaacctcagcactgggaaaagttgcccacactggggtatgcctgggtgatgggcacctctcactgacctcacagcgcagtccgcccatctgagcacagggtctgtccttagacataatggtgaccctccacaagctctgtggcttttaaagttctgacagggataaatacagtaagctctgcaaatgacatcgtagctgcatataaataaacccagtgacaattaaaggaacatgaaattcagaacacactattaagcagggccctgtagctctactcgtgtgtgtgtgtgcgtgtgtgtgtgtgtgtgtagacaaatggatattgctatatccatctatatataacaagtatatatcaaacatgtgctgagggtgacaggatatgctcacttaaattgttgaaaaccataatttggtgcattaaagttaagattgttatgttgaatagctatttttaaaatagtgctgtaa

SEQ ID NO: 7710 - DNA, 3922 bp, Homo sapiens
aagattgagaaccctgcatcttgcactttgggaataagaacaagagattgaaatacagtttacaaactttcattgccatcaaaatcttttgctgccataactatttcagttttatgtgtaaaagagtcatcagtttgtttaggggtggggaagtgtcagcaaggtgtcttgggtttattttggttctttaaaaaagggaagtcttgaggttttagaggtgtgaattatgtttcatcaatgtgcagaataatcacaatgtgaattatcaaattctcctcaatgccccccccgcccagtcctttgctgctatccactgtgatttttatgcattaaaagcacatttcatgtgtattcaaccctaagtaaagttgaatgaaacttaacagaatggaaattgctatgtctttttaaatggtccattttcaaaagacagtgttgaataaacatacctgtgtgataaaacacagaatttacatatacactgaagatgagtttttaatctcttactttaaaaagatttatttagaatcgtgaattgacataatcttgggtaatggaacggagatctgcaacatatcttttaacaacacttttttctaaattatttctaaggttgtgctaattcttttggttgtgaaaagttgaatttttctgttgccttcgttttcatcttctagtttgtctattttaataaatggccttacattaaaaaattgtaaagaaatgtataccaccaatttagaaattgttgccttttctgtaattaaactcgggtacaaattggcataacatgaaaacctatggaactagaattattattaaagaaatattagatgatcatagcttcctgtgatagcatttttttgtgtgttacctatccttttggtaaaatgttttatctgtgatttctttagcttagtcaacattttcttgggtgaacttgattgtcaactaattttcataaatggactggattctcttgcaacattaatgtttataaaaagttttaaattgatttgaatagaaagaaaacattgttttaaagttggatttatatttttcttctatgtagttactataaaagtgtgctggatttgaccaatccttacccccactataaagagaacccgtgatgactttagtttaaaaattgtggaaattgtggagcaatttttctcacaatgtgagaaaaattctaaaccatattagataatgtggaagtcatattgtctatcatatatactgccatttaaaaataggtttttaaaatttagctaagtcttaagtaatttgccgttgctaataattttatctccttgagtcggttgttggggagagatgttatattcaataatttttagttattttgtaatgcagagtgtttattcatttcacagttctgcaatggatgtagtattttgggattgccctgtccagaaaattttcagctacacacctttaaaggaaaatgtttctatctcagatgaaacatgtaatttgggatggttcttcctttgtcacttaaaggaagagataggaaaagtctcttacccactttaaacatgagggtaaaggtttaggtcaaacttactggctttgtcattcaagcatatctgaatcctcacttttttctctttgctttttagggtcagaactgagatattaccaagaaaaggcacaatgccataatattatggtgttatggtattttgacttaaaggggaaaaggtacttaattttggtgggatgttgattgtaccttgttaaaaagactctcattttctcatatgttttctcctaataagatggaatatggagtatactgtaataatataagtgttcattataagctatttggattaagaactattgcagagttgtaagcttgttatcaaattaatgcaagacatttaaactatttttttgcaaaactatttatttttaaaacaacttaaagtatatctagggtgagttaaaagtccctgtgcatctatattagatggcaggttttgtcacagagtcactgtgtattaataataaatgttgaaatggcttctccgtgtctccagaagcatttacatgtcctccttgtgagatcatggtgcacagaggtctttggactgccctgaacccgtcttatgtggacataacctattcccttcgttttctcatcatgccatgtgtttaagatctacccgcttagtgtcaagattattgagattttcatctaaatgtttttaaaattgtattttgtgttttagtggaggacagtcttgatactgttctaattcagaaagccaaattttgatgcgcttttgtatattcataatatatactttaatatgccctattctaatctagtttgaaattgttagattctgatagtataatgataaaatcaaactatttgccaaaaagttaaatttacaagcagaaagatgttttgcgatattttctacttttgtgtagaaagataaccatttggggtaggcagcacaacagaatgtgaaagattggctttatatgatactaacacagtccagttaaaagtggaaacagggaaaagagagagagaaaactcatcatttagtttggtctagacacaatttggttaaattttaggattctattggcagttaacatagatgacatggacacagcctatgagtgctttttaaatacgtgcttctaaaaatctgagctcaaagcaagaaaaagaaaacaggaaagctgtatccatttgccataatagatgaatcagaattgttttctattaaatatttcatcacgaaatatgatggaggccagaagctatttttaggcttactataacactattatgcatttttataaataagaagaaggctgtagaaagtacttgaaaaatatctaattctctttctgtctaaggaaaactctttctacttggtgcaataatctgaaaatttagaaggtcaaaatatgtcacaggaaatgatcatagacctaaaaatagtttttaaggaaaccagctacacggggcaaccaaccatcttgctgttgaagaaaacagttccaaaaggctaaatcattggcataaaggaaacaaaacccaaagtatgcgttgtaattcttgagccagtattactgaaacaggataaaagttataaaatctaacataggttaatgcaatgtctctgctagtgctacaagtctaaaatatctttgtaacaatgctttcagaaatgccagttttaattacatttcacattgtatatgagagatactgctttatgaatgaatcggaataatacattttcatttaaatcttaattgcttttcattaaatgcgaagtcttaatttcaaaatgaaatcacactaccagcaatagacagttttcttgaaaactctaataaggaacaatagccagttccgtaaataactttaaaattctaaaagtgttggtacactagcaatcacaaatatggtttcttttaatacttttttaatcctgtaaagaagggtttttataaacattctttttattaatcagtcataacatggcgaagtgtgtagttgctgtttctgaaaagtgatccaaactctacatccagagattatgaaaaattcttatagaattttgtaacaagtatttacatgttgggtgaaagaaatttcatagtcgttggagtgccatgaaattaatacttgcaattcagattgcggtagtttacactttttctgtatgtttcaaatcaggtgtgtaccatttgtactgagaacaccacagaatgaattatccaaagtccattgattttaatacgtgttttggtttgtaaacaaattatagtaatttcttgcacatttttggaaattaattgtataagaatttatgtatctgcttctagatacagtgtgtaaataaaaaatttcgttcacaag

SEQ ID NO: 7711 - DNA, 368 bp, Homo sapiens
aatagggtttctgatggatgttgaatggcgtggactcgctactccgttcttcacagctgccttccagaatgtgttcaaaagaaagacaagaaggagtgtatggcttataaagtgaatctaatacagtatttgttgcatttaaacaaactagacattttcttacggaaaaattatgaaatacagcatattttatgttctcccattgactcaatcatgacaatatttctgctttaacaccatctttcatgattagaaatgtttgttattggaaatgttacaccatgtaaataaaggaaatagattttagtattgtattcattttatattatagaactgcataatgtctgcagaataaaattaaaactaac

SEQ ID NO: 7712 - DNA, 1053 bp, Homo sapiens
gccaagccctctgtgtgccatctccaatgagaaggaatcctgccctcacctcacccttttccaacttgcccagggaagtggaggttccctctttcctttccctcttgtcaggtcatccatgactttagagaacagacacaagtgtatccagctgtccacgggtggagctacccgttgggcttatgagtgacctggagtgacagctgagtcaccctgggtaagttctcagagtggtcaggatggcttgacctgcagaagatacccaaggtccaaaagcacaaggtctgcggaaagttctggttgtcggccgggcaccacggctcacacctataatcgagcactttgggaggccaagacaggaggatcacttgaggccaggagtctgagacaagcctaggcaacaaaacaagactctgtctctacaaaaagtttaagaaatgagccagacatggtggtgtatgcctgtagtcccagccactcagaaggctgaggcaggaggatcgcttgagaccaagagtttgagcctgcggtgagctgtgaatgcaccacggcactcaagcctgggcaatgtagcaagatcctgtctctacaagaaattttttaaaaatgagccaagtgtggtggtgcatgcctgtagttccagctactcaggacactgacgtaggagggttgcttgagactgagagttggaggctgcgatgagccatgaatgccccactgcactccagcctgggcgacagaacgagaccccatctcaaaaaaaataagttctggttgtcattgaattgggataaacagagagcttgatgctttctgccttctgtctcaggtgatgcattgcacatttgggatatttggaaaggaaatgaggaaagaaattagggcctcctctgatctctcgctatctgcgggtcctgtccttttctcaagaccttcaccattactggcattttcctgtcttctctttagtatgatccctcaaaacctcactaactggaaggatgattttgtctcagtttgtactcctaaataaaaagtaaacatgacacctct

SEQ ID NO: 7713 - DNA, 461 bp, Homo sapiens
tcacaagaaccttctagtctgatctgatccactgacagattcacctcccccacatccctagacagggatggaatgtaaatatccagagaatttgggtctagtatagtacattttcccttccatttaaaatgtcttgggatatctggatcagtaataaaatatttcaaaggcacagatgttggaaatggtttaaggtcccccactgcacaccttcctcaagtcatagctgcttgcagcaacttgatttccccaagtcctgtgcaatagccccaggattggattccttcaaaccttttagcatatctccaaccttgcaatttgattggcataatcactccagtttgctttctaggtcctcaagtgctcgtgacacataatcattccatccaatgatcgcctttgctttaccactctttccttttatcttattaataaaaatgttggtctccaccactgactac

SEQ ID NO: 7714 - DNA, 1204 bp, Homo sapiens
gacgcgcggcacctttactcagcacagggcaggtgtgggaaggtccagcttcggtgggggaccgtgttccctgagcttcatctgaaaccttcaaaaccatgaggacaaggctcccgtgagctctgagcatgccctcccagcgagagtcacactggccaccagccaggcgcccacagagggtaccgtgggctgggcctcggggagcaggctgccaagtgcaggggagggccgggcgcaggccgcacagggagctccggtccactgggggcccttcgatcagtggcctcccgcttcgtcctggccgctgtgctgaagagaagccaagtgttgttggtgtttttctctcccaagtgttttcccatttcagttatcagaaggtcatggccgtggggaaagtggtgaagatacccctcctggcttggggtgcacctgcttgtgcagtcagcatgtagctgcctttccatttcattctctactgggctaaaaattgcagctacaagtgttaccatcttgaagcagtccacttccattcaattttttttttttaattttagaataacagtgtccccataccaaaggaagcctgctagctcatttcatgtataaatttcccatcttcaaacagtttaggtgtatttgttgctctggtcacattctgcataaaagaaatcctcttaagcctatggttaagaaaagccttgaagtttatattcagttaaaatatatgtcggtggagatagccagtgcttctaattttgacttagtttcatacagtaaagcctaaatgtgaaacgcacacgctggaagatattgttcctatcaatattttgctttttataacaagggtttgttcatattgatgccatttttgcaggatttcttcgtgatttctgtccatatgaaaatgctgacattaaacattaacacatggagaccgtgccctgtggccctgccgtggctgccagcatggtctgtgtttccttgtggattcacctgtggccctgctgtggccaccagcatggtctgtgtcctcgtggattcactgcagctgtcggatgcgagtttctgtcataatcatttgtttcctgatacaattgttcttattcttttccaaaactgtaaaataatctcctccctcaaatgcaaaggttgtttttgttctgtttctgttttctttgaaataaaattataacgttaaaagatc

SEQ ID NO: 7715 - DNA, 1304 bp, Homo sapiens
cgtccaggtatgcaagagaccgcggaacattgcactaaacgtcgtcgagctgcactaggcctggcctgagcctctgaaatcagtctttcctttgttgctggcccgcctctctggaccttggttttcttacacatattttgtatatttatatgctctctgtccgatctgtgcatgttatttttctttttccgtgagtcaaagtctgacctttattttcaacatctgttcttggtgttaagctatcttttgtaggaaatagtggggcacactactcagagacattatttagcagtaaagaaagacacaaataacaatgataaaaagacatcctaaaatggtgaagttgccatgacaataaaggtcatagaacctggtagtgtcaaatttaaccctttgaggactgtaattgcatttctgtgcctttcacttgaaaaaaaaaaaagaagaaaaaaaggcttaaaggcatttcattcagatcaaaagctgtgtcagacacaaaacttatttaataattaaaaaatgagcttttatatgcagaactggtttgtgaggaaacatgcatgcagctgtgggaagatagaaagctgtctaggactcacggggttcggaagccacacctctacatgtctaaaacaaaaaacaacaacaacagataccccactcgccactatgcccaaaccctctggatgctgaaaaatgccactttcggcaaaaaaaaaagtatgcaagctattatttaaaaatgtgtaaaaatgctatttcttttttcctgtaaaatattgcagtttatagttatttacaaatgtaagctttggtacaagctgacctttctatagcgtgctgcattggtaaatgaaaaaaaatggggcaaacgttggagtcctttccttgtaaattgccagcatcagcttaaaaactcctgtatgttacatatcgtaccattttaatctcttcaactttctttgtaccttctggctgtatgctttctcttttaactttttatattgtcattttatattaaatttctgtgtatataatgtaaaaccacaatttttgaataaaatttagttcctgcagcttgatttaaatagaggacttttactggcacctgcatctctccagatgcatgtactcagagggactgtcagacaaaaataaatacataaaaacaaagcaagcaatgcactattaattatacattttgatgttctatcattaatattgtacagtacattttggttcacacaattaaatccactgttttctcagatgtaaaataaacccacatgcagttcttgatttac

SEQ ID NO: 7716 - DNA, 2387 bp, Homo sapiens
tgcgagttggaagtacacctttaagaatgtttctgaagttacgttttgtgaagagcaaagcacttggaatctccgttttaaagcttcaagtgttaaaaatgctacaatagttttttatctataaaattatctaaagaatcattgtctttcagagactcataggaaaaaaaaactaggaaaagtgtcaccgcattgttctcttttgtctacaaatcactgaactcaggtactactgtaggcagtttcctcctcagtctcctccgtggctagtgtgtctagttcacgaagcaattaactgggtcttactatcattgtagtgtgatttctttgtattagcaaagacaaaaacgctaacattgaaaaagtatgtcagattttccttcatgtttctggttataagaagcatagcttacaaagcaagcgtaagattgaggcatgaagttcagaaaaaaaagtgttacaacacacagggaagttttttccactcttttctctgtgcattttgaaaattagtcaaaatggactcttttcagtctaccataagttaatataactgataccttgagagatggctggaccaattctctccatgacaaatgtttaatcattagttacaagaatgcagtatctggggcgtcaacatggggactcgagtaaacctgacccaccaataaggattcagctgtccacacgggctggcgacacacttaccgcatcaatctgtgttcaggtccagggttacataattgcagaagcacaagccatacatcgcaggtaggaaaccacagaaccgtctgcaaggagcaagcaacggtggccctgtccaccccagcaaataagaagcatatctgtagcttaaggccacgaatccgtaaaaaccccatgactttctcttcgtgcataaacagatgtatttttgatttcagggaattctttagtatcgtcaatggtgccacataaaacatgtcccaaaccaaatcccacccgtgctgggcagagtgcgtgcacgccattcctacagcattccaaagatggaaggttctttacttcatgttaatttttcctttgaaattatttatatgttctatatataaatacatatgtacatagatatatgggcctctgtgtggctgaacagtatattttgtaaatataagtactagtcctaattgcagaaagagcgtcagtttcacctccccacgagcacttcagatcagtattgtattcattttattcataaatggatatctttttcattgtcatataaagctgggttttatttttttttcctgaaaaataattgcctttattttctctcgttgcctccttggtttcagaagagagtagttttattataaatattgtatggactttgtatattaagagaggagctcatttcagattcctaaagaaatagacattttactgttattttgaaagggcatcttttgatttttttgttgttgttgttcacttttggcatatgtatataagtaatattgacggtgatatgaaaacttttgttatgtgaagatatttaagtcagaaaattgttaaataatattacttcttttccaaactgctttgtgtattgtatatttttttaagaaaaagaaaagccttatttgacttatgcttgtgatactggacttcttaccaatccggaggtttccttccttgaatgtcagtgtgtaaacctggctgtagccgcatatgcagaataactgtaattgtgctagagttttaaaggttctgcttttaatgcactttttattttataattttgtattgaaatattttagaaatgttgattaattttggtgaaaaaatatccccaaagtggaaattattggaattttaaacttttgttcttgctgggttatttattttgattttagcattaaatgtcatctcaggacatctctaaaaggggttgtttaattcctaattgtatagaaagctagtttggtgaattgtattggttaattgactgtttaaggccttaacaggtgaatctagagcctacttttattttggttaaagaaaaagaaaatatcaataattcaattttgtgtcttttctcaatttattagcaaacacaagacattttatgtattatttcgatttacttcctaattataaaagctgcttttttgcagaacattccttgaaaatataaggttttgaaaagacataattttacttgaatctttgtggggtacaggttgatctttatattttactggttgttttaaaaattctagaaaagagatttctaggcctcatgtataaccagggttttgaggataaagaactgtatttttagaactatctcatcatagcatatctgctttggaataactataaataaaagatgaagttaggaa

SEQ ID NO: 7717 - DNA, 1235 bp, Homo sapiens
taaaagatagagtatccttatggttgagtttccatataagtggaccagacacagaaacaaacagaatgagctagtaagcgatgctgcaacttgttatcttaacaagaattcaagtcgttttaattaaatcccacgtgtgttaaaaagtactttgatccatttaggaaattcctaggtctagtgagaattatttttcaattttattttagttctaaattatgtttcagaaacaaaagacaatgctgtacagttttattcctcttcagacatgaaagggaacatatatattccatatatatgttcaactcttcatagattgtgaactggcccatcaatatggtcaggaatatttgcagtctacattttaaagccaatttatttagaaaaaaaaatttgagctttaattctttaattttaagagaagtaatattgtgaactatgtattttaaaatatgatcatggacacacaatgatgaattttttggccatttacatagacatatctattaagtggaaagaaggctttctgaagtctgtttgcacaggtggcatttgcttccaattgtagctagcgcacagagctttggaagcctgtcattatgagatacagtcggtttacctcaggagtcaattcagtgttgtactggtgacctgggatgcagtagtaggcactgttgattcaaatttatcctgtgaaactggctttatagagttaacaaaacagagtcagagaccactgtcttaacagtggaagatgcaaataagtttttgagaataaaactggattttgaaattttacattagtacttgacaaaagttttcattttgccttgaatggaacctactaaaaagagagatgaaaaaaaatcagcgaggttgatgtagataataatttctatgggaccaaagactagacagaattcagtaagtcacatgaagtaatggtcatgcctgtacataaagcatatttcatgtttgatttagatgacattcaaaaaaaatcatgggactgaatatacctggggtatcctatcttgtacaaatgcatgctttttcattaaatttgtaatgatgtttaatgaacatttccaccaaacattatttcctctaaaaatgttaatttggggttaaaaccatcaccatttgaatttcaaatgtagttttcatgacaattttatattgatgtgtgtttacaatgagaaaatggcatgaaaatattaaattgtcttgtatcg

SEQ ID NO: 7718 - DNA, 871 bp, Homo sapiens
ccagtgactcgctcatctgccctgcccaggcccacgttttgaagttggagcatcaggcctccgacctttcttgcctcggttctcattacactttcacccatagcagaaaacactttgtgcggctgccgagaggtggtcttgtaagcgctgcatggcgctcccttcaacagcaagcctgactgttctcgagaactctgcaatcttttaaataagcttccttcaaaaaaaaaagtgcttggaaaaccgccttaggaacagaaagagctcagaccatgtccacttcctttctcctgaaacctaataatctctccgagggagaaaggggttctctgcggtattccagtgaaactcatttgatggtttcttttgaattagttagacacttgaacggtgttttttagaactcttcatgttaaagacgtggtttagtactcccaatgctgtgtatcatgacactatcttcgtctgtagtatttatgatgttaagataatgcgggtaacagacaatataatagccccgaccttaaacgaagcttttgtactgcagaatacatctggctgtgtgatttttttttttaagcaagatttgttttactataaataagtggattatttcaatgcaggcaaaattgtgaagttctgttgggaaagatagcatgcttttcgtgtgcaagtacctgtcagtaataagccttttttttttttttttttaatttaaatgtttgtagctgctatgtggacagttgttttctagtgtggtctgtagcccaataactggggaacgagttacagacaaacatcaccgtaaatgactcacaacattataaacagttgtgagaaaatatttcacattatcaaagctgtacaataa

SEQ ID NO: 7719 - DNA, 897 bp, Homo sapiens
ggggctgtgcacccccagcgggctggccccagcaccttctgcccttcccagcaccttgtgcccttgccagtgaacgcagggtttgccattgctaccaagcaagcaccacaagaaagggagggtacgccaggcgagcccagggcacagatgctgagacagcctctccttctcagtgcagggacgtcacccctgccaggcaagcccagggcacagatgccaggatggcttctccctctcagtgcgaggcttcacccctgccaggcaagcccagggcatagatgctgagacagcctctccctctcagtgcagggacgtcacccctgccaggcaagcccagggcacagaggccgggacggcctctccctctcagtgtgaggcttcacccatgctaggcaagcccagggcacagatgccgggatggcccctccctctcagtgcgggaacgtcacccctgccaggcaagcccagggcacagatgctgcgatggcctcttcctcttaagtgtggggcctcacccctgcttttctttctttttttgtattgtcaaaattgtatttccatattgaagcagcttgagtttctactgaaaatgagcccgaattatttcactattactgtaaagggttcatcttactctggcattctgagaattagactgaaagtttaatttctgcagttccctcatattcagattctttctttgatgttataacacaaagtcattcctactcaaatgtaataaaattgaggctccacggaggcccgtgtccacatcagctgcagctcccactcagacagacggcctgccccacagcctgccctttgctgaagataccctcgctttatacttgcatttcgcttttcagtaaaaacagtcaagttactgagttctcacat

SEQ ID NO: 7720 - DNA, 1792 bp, Homo sapiens
atgaaataatacgaaatgacctctccagcacgagcacccactcctagttgccacattggagcactcagttcagcaggggtatgctgacttcagcagacaaagacttttgaataaataaactgaactcacacctggtaccactcagaacctccaactgactgaatgccaggagctgaacattaatatgtgcaaagattggctctccaacaagaaggaaagcagggaggaagggagaccactgtgtcacctggaggagaagtcatctcatgacaacagaagggaggtggccgggctgagcacgggagacccaccgtgcaggggcctttcatgggaacggcccacacgcagtttgaccccacgcccagcccttctggcacccctggggttcaatactggaagtgccttatttaaccagaccatcagggcatcatagaattgagcattgaatttgctactgtaggagtatttttaggagcagaaactgcaaacacatttcattgtgaggttttaccctctgtatgaatgaagagaacgctggaaggctgcgagaggactctagtatgagtctccaacatttggaacgtttcctgggctgtcacgtacactcctgctgccttacacagtgcattttagaatcttccagtctgtcatctcagctcttttgtaacatgcttcccttgtctgcgcggttgaaaccgtaggcttgttcatagtcgcatgctcgcatctttgtttttaatctggcttcgaacatagcacaagtaacttgaatagcacatcaataggttactggacaaaagcagaaaaacctgttacaggatagcctgcatttgcatgtgtgtacatatctaggcatctatttatgtataaataataacagagccgacgtgtcctcgcccaggagggcttccctgtcagcaataaccggcatccgttttggaacctgcgtctggggctccagtcgctgctcttgctggcgtccatcgccgcctcggacggccgtgcattttctcgtctcacgcagttcgaggaggaccctagaaagccaggagctgtgattgacagtagctgtaggttaccagacggcaacattagaaagtgattgtaaataacatgcaacctaagtgtaatatatttgttcagttataagatgattgtttcacagaagccttaccactctctgcttcatctaagaaaaccaataccaaaaacgccactttaatgctcagccctgcgttgtgtgttttcagatgagttactgttaacaggtaggtttgtgtaggccttgctgggcactctgtacaattagttgcttattacgtatgattactcacagcgatctattgttccatataaccaaaaagcatggtttattcattgaaacacggttgacctgaactcgtgccttaggaattaatgcccccttatggaacctgcctgaattgcacctgcgggtggaggctccggctgtgaagtcactgaacagaacgtcgctgatggagaaagggctcccgcagaaggaacggcctgtaccgtgcgctccggcacaatcgcgtctcttgtgtctcactcacggaaagaaacaacctgaaggccatcccgtcggtctgcacgtaaccgtgaagacgtgtggccgcgtcccacctgcggctgggtaccctgcacccggcactgtaggagtcacgtgcagcctttctcaggggactgtcattgaaaaggaaacgtttgatgtctgtgtcagctgtctttgtagttaggaaatagatccaataaagccgtatttttttgctgg

SEQ ID NO: 7721 - DNA, 536 bp, Homo sapiens
agacgcagaaacgacgtcgccgtaaagcagcgtggcgtgttgcacatttaactgtgtgatgtcccgttagtgagaccgagccatcgatgccctgaaaaggaaaggaaaagggaagcttcggatgcattttccttgatccctgttgggggtggggggcgggggttgcatactcagatagtcacggttattttgcttcttgcgaatgtataacagccaaggggaaaacatggctcttctgctccaaaaaactgagggggtcctggtgtgcatttgcaccctaaagctgcttacggtgaaaaggcaaataggtatagctattttgcaggcacctttaggaataaactttgcttttaagcctgtagtcctgatgtggtctttaaggatggtgaatgagctttgtgctgggcggacgtccccgagacacttctccaggggtaacttcatctcctgggaccacgggcatccaggctggggcaccttctcctcaacctgcctgcccctcacccgccgtgggaatggctccttttcactcatac

SEQ ID NO: 7722 - DNA, 837 bp, Homo sapiens
atgaagaggacgccgccagcgagtccagcagggagtccagcaacgaggatgagggcagcagctccgaggccgacgagatggccaaggcgctggaggcggagctcaacgacctcatgtgagcgcgggcagcgggcagggactgaagcctgaccgacctccagcagcactcggacgtccccggaccagccctcagtctcggtccacgctgctttcttcccaaaggacatgtatatttgcagagctccacatacagaaacacattattttgcagaaataggtgtttttaagaagttttactacaggaatgtctacttttgtaagtgacaggtgttaaaggcccaggtgtgctgtgccaaagagctcagcagaggctcacgtggcccaggctggtgcgcccgctgtctcggtaaggggcgggttggtgtgttttccccttgtgtaccagagcacattccttaggggacggctttgggggtcccacgagacatggactaggagtttaagcaggacagtgtgcgtgcacgagctccgagcccagcacagacatgcctggaacccccgccgcctgctgctccctcctagggaacccatttccggggaacgccgtgactgtcgggcagcctggagcttcctgcagcctcctacgcagggtccacgccacgtggcctgggctgccatcctgccgtcctcccactggcatcctggcaagggggcgttgcttttcctgggcggccttttatgtcttggagacacctgatgtaaagtttctgtaaatctatttcatatctgacccaccaaacagatttctctttaataaaaatcctttttgtaagttct

SEQ ID NO: 7723 - DNA, 232 bp, Homo sapiens
atggagaggctctgcccatcccacatttgcagggaaaagcattggcacgcaacgcagcatgtggcttcattgaggcagttgatggagttaaaccatctgctcttctgctacttcaacattttctagcttttccgtgtatctaaacacaatttgctacacaagtcactgtttttttttccatgcactgtgtgtaatttaaaaattaaatggccatcttatcacagattctcac

SEQ ID NO: 7724 - DNA, 106 bp, Homo sapiens
cttcttttttttttctttttattaaaactgtgatagattttgttaccaagcagcatttgataagaggtccactggttttggtaaacaataaacatttttataacaa

SEQ ID NO: 7725 - DNA, 689 bp, Homo sapiens
cggactgtgatgggatcacatgagcaaattttcagctctcaaaggcaaaggacactcctttctaattgcatcaccttctcatcagattgaaaaaaaaaaagcactgaaaaccaattactgaaaaaaaattgacagctagtgttttttaccatccgtcattacccaaagacttgggaactaaaatgttccccagggtgatatgctgattttcattgtgcacatggactgaatcacatagattctcctccgtcagtaaccgtgcgattatacaaattatgtcttccaaagtatggaacactccaatcagaaaaaggttatcattggtcgttgagttatgggaagaacttaagcatatactgtgtaaacagtgccatacatttctaaaatcccaagtgtaggaaaaatatgcagacatacagatatataggccaactattagtaataatatgaaatatacttaaagagcttttaaaactttgtatttttgtacaaaatatttgtcttttacaatttttttcctttttttttttttgtcattttaccgacataatacatggagccaaagaaaacaataatggtactaataaaaactcctagggtttcctgtcagatttaattctacccagtggcaaagaattttttcaattgtggctttaaaaaaataattaaatatacatgtgtatatatat

SEQ ID NO: 7726 - DNA, 344 bp, Homo sapiens
gatttccaggtcccagatgaagagataattctacttactggatataggatgcattagatcttcttaccttaaaaaaaaaaaaaaaggcagcaatgatcaaaatactaataaattactcacagactcagtgtattttttcttggagtaaaagtccaggatgggtaatagaatacctgctgttggcttttggaaaaattggtactgtatgtagcaaaataatgtgaaacccatatgcatggatattcttaacaatttgaagaaatcgtcacagctttcctgggttgttgagcctctaagatggtcttttcctctgatgtgataataaagtgtttattctgaactct

SEQ ID NO: 7727 - DNA, 390 bp, Homo sapiens
gtgctcagccccaacaacttttttctttctgaagtgaaagggcttaaaatttcttggaaatagttttacaaaaatggatttaaaaaatcctaccgatcaagatgagttcagctagaagtcataccaccctcaggaatcagctaagtaattattacttgattcttttagcaaatcaatgcacgttatcctacttaatccttaaataagtttagatttaactaacccaaagtccaggaggatgttcttacaaaaatagctatatcaagggctggcacctagacattaaactgtaatttgaaaataagcaacatgttgcataacttgttggaataattccttgttctgtttaacacttgtcataaattagcagaataaaaatagtcgtgcaac

SEQ ID NO: 7728 - DNA, 2830 bp, Homo sapiens
ttcaagtagcctattttatatgcacaaatctgccaaaatataaagaacttgtgtagattttctacaggaatcaaaagaagaaaatcttctttactctgcatgtttttaatggtaaactggaatcccagatatggttgcacaaaaccacttttttttccccaagtattaaactctaatgtaccaatgatgaatttatcagcgtatttcagggtccaaacaaaatagagctaagatactgatgacagtgtgggtgacagcatggtaatgaaggacagtgaggctcctgcttatttataaatcatttcctttctttttttccccaaagtcagaattgctcaaagaaaattatttattgttacagataaaacttgagagataaaaagctataccataataaaatctaaaattaaggaatatcatgggaccaaataattccattccagttttttaaagtttcttgcatttattattctcaaaagttttttctaagttaaacagtcagtatgcaatcttaatatatgctttcttttgcatggacatgggccaggtttttcaaaaggaatataaacaggatctcaaacttgattaaatgttagaccacagaagtggaatttgaaagtataatgcagtacattaatattcatgttcatggaactgaaagaataagaactttttcacttcagtccttttctgaagagtttgacttagaataatgaaggtaactagaaagtgagttaatcttgtatgaggttgcattgattttttaaggcaatatataattgaaactactgtccaatcaaaggggaaatgttttgatctttagatagcatgcaaagtaagacccagcattttaaaagccctttttaaaaactagacttcgtactgtgagtattgcttatatgtccttatggggatgggtgccacaaatagaaaatatgaccagatcagggacttgaatgcacttttgctcatggtgaatatagatgaacagagaggaaaatgtatttaaaagaaatacgagaaaagaaagtgaaagttttacaagttagagggatggaaggtaatgtttaatgttgatgtcatggagtgacagaatggctttgctggcactcagagctcctcacttagctatattctgagactttgaagagttataaagtataactataaaactaatttttcttacacactaaatgggtatttgttcaaaataatgaagttatggcttcacattcattgcagtgggatatggtttttatgtaaaacatttttagaactccagttttcaaatcatgtttgaatctacattcacttttttttgttttcttttttgagacggagtctcgctctgtcgcccaggctggagtgcagtggcgcgatctcggctcactgcaagctctgcctcccaggttcacaccattctcctgcctcagcctcccgagtagctgggactacaggtgcccaccaccacgcctggctagttttttgtatttttagtagagacgcagtttcaccgtgttagccaggatagtctcgatctcctgaccttgtgatctgcccgcctcggcctcccaaagtgctgggattacaggcgtgagccaccgcgcccagcctacattcacttctaaagtctatgtaatggtggtcattttttcccttttagaatacattaaatggttgatttggggaggaaaacttattctgaatattaacggtggtgaaaaggggacagtttttaccctaaagtgcaaaagtgaaacatacaaaataagactaatttttaagagtaactcagtaatttcaaaatacagatttgaatagcagcattagtggtttgagtgtctagcaaaggaaaaattgatgaataaaatgaaggtctggtgtatatgttttaaaatactctcatatagtcacactttaaattaagccttatattaggcccctctattttcaggatataattcttaactatcattatttacctgattttaatcatcagattcgaaattctgtgccatggcatatatgttcaaattcaaaccatttttaaaatgtgaagatggacttcatgcaagttggcagtggttctggtactaaaaattgtggttgttttttctgtttacgtaacctgcttagtattgacactctctaccaagagggtcttcctaagaagagtgctgtcattatttcctcttatcaacaacttgtgacatgagattttttaagggctttatgtgaactatgatattgtaatttttctaagcatattcaaaagggtgacaaaattacgtttatgtactaaatctaatcaggaaagtaaggcaggaaaagttgatggtattcattaggttttaactgaatggagcagttccttatataataacaattgtatagtagggataaaacactaacttaatgtgtattcattttaaattgttctgtatttttaaattgccaagaaaaacaactttgtaaatttggagatattttccaacagcttttcgtcttcagtgtcttaatgtggaagttaacccttaccaaaaaaggaagttggcaaaaacagccttctagcacacttttttaaatgaataatggtagcctaaacttaatatttttataaagtattgtaatattgttttgtggataattgaaataaaaagttctcattgaatgcacctattaatcgttttagttgctattcatattctcattcgttttttaaaaactgatatattctgaatttattcttccattgagaaaaaaatgttcagttacttgtaactactgagcagaatttaatcaatcctttattaaattcagaacattattg

SEQ ID NO: 7729 - DNA, 1475 bp, Homo sapiens
ctatgatcttgattaaagtagtggtttcttcattgtttcctcaccacttttcccttaattctaagtcatttttttattttgttaccaacccatattcttagaatataaacaggacttgtttttttcagtaagggaccagaagtgactagccttcatgtaattttaagatgaattttacttgagttgcactaacattctatgttattctagactatacaaattaagtggtaagcagttataaagacggcaagaccatgctattgaaaaagttcagaaaacatacaccgtggaccagaggtcttaatcctatctatggatgtgttttgtgtgacccatacagtgttgtaaaaaacacttagaaccattattctaaaaaatggggctatttcacattaaagtccagatttctgcttctttttaaacatcagaggctctggctacacagaggcctttgttctttcctggcatcagtctgcaggaccaagcggtggtggctcacttgggaagagccttgtgctctccactttgccacagtaccactgccaccatgctgctcacttatgtcatccacttggcccttgtatgacctgaatttgcaacctctggtatactgttatgttctggagaaaatattcaaagatctgccaaatactgcattagtatactgagtttatacagcatttttgtagggttttaaattgcattcaaggtcactttccaagcactttctggttttgcttgtttttctagaagaaaatgaaaagctattccttataataaacatggcagcaagtaaacagtgtgattgtgaaaaaaatattatttatagattttctacaaataaatatttgtctaccaagtaaaatattttgactgaaatgattctttgaaatgcatattgatttattatgtattgactttttaaaaattgaggtataattttcacaaaattctccaattttcagtgtcaaattcagtgaattttgaaaacatatatacagttgtctgtctgccacagtgatcatgatacagaacactttctttaccctgaaaacttctcatttttccttttgcagtcaatcccctgctcctatccttggcccctggcaaacactggtttgctttctatcattagttctgctgtttgagaatttcatataaatggaatcatgcaatgtgtaatctattgtgcctggcttctttcacgtagcattttgagaaaagcatttatactatttacagattgttgacaaatatttatccactaagtaaaatgttagactgaaatgattctttgacaagcttgccaatttactgattttgtcaaagaaaaatatgttatttttgaagtttgttcatcctttgagtgtgtgagtatagtatcagaggcttaattttgtatttatggagctattctaacttgttatttaaaaggaaaaaggtattaaacttgaagcaaacttctcatgatctca

SEQ ID NO: 7730 - DNA, 3298 bp, Homo sapiens
ggcggcacctcagtgggtgggcagggcttggtccccctccccacagcaagggaaggcagctggctcttctgctgacctcagataccagccttccccagcggggacgggtgcttctggagctggtcccgccatcctcctttgccttcccaggccagctgctcaggctcggcaggtctgcagctcagctcctggaaggagaagggaggaactgggcctggggctggaggcctgggatccctcctttgtgggtcgcacacatgtttcctgctgtgagctggggcctccttccattgcatcattttaaaggaagaaaaaagcagctaaaaaagagtggaccaaaacactgcacacagtgaagtgttccagtttccactgggcagttgaggtggcttctgtaaccagggctgtcttcagatgtcagggtccctgaactgctgcgggcccagtcagtgatgctggctgaagctgcctgtgcacgtttcttctctggtcgcctcatttcctgctacactgaaggggtcagctgctccagtgggccaagttgggcaggacccccgcccctgcagggcccatgcaccagagccactgagcccagtcccataaacctggccctctttggggaaagatccccacagagcatcctcctctcatctgtgacaactccacgagcccttaatttcttagtcctcaccagaagaacaggtctcacaagtatatatttgatgtctgtaataaaagtgggaaggtgggtcttaaaacagaccaaaccccgccccgcccccaacaactctgcttttagggaggcctccgaaatgcagataggcggttgagtggggtcctgggaagagcgctgaatccctctgcttgctgcctggtgtgggcctttggaaagcatcttgccttgggacaggatttctaaaattctgtgattcagatttgtcagggaagcacagtgaagcttgcttaaaggcactggccagcagtgtgtgactttggcttttgggatcacaccctgtaatcgggcccgtggaagcagcgtcaaagaggggtcttggagctcctatggagcagactgccccccgagcagtgtccccagcctagccctgtgagaccccatggggacacgggtgcctatgtattttcactaaaatatacatggtagctccatttactgatgcggttgtaatgagctcacatcgtgtctgaagagatggcaccagggaaaggtgtgccataagctgctccagagcttttggtatgctgagtgttgacagagctgcactcttaacatcaagagaactgtcaggagcccagaaccaaccccaggtcttggtctccattggcgagaacacaggacgtggtggttcctgagcagagagggatctgcagatacaggcttggcgctcggggtggtctcgtggccaactcttcatgcccctgccgttgtagtggaacctctacatgttttagtttgcttcacctaaaataatgctgatctagagatagagaaataggggtggttatttttccagattggagagttgaaagtccctgactgatttcagccattttcctagtgcttgtcggatgcagagacaatgttgaaatcccctaaacacagttctcagtggcaaaacctaggaaggctcatgttcccagagaagggaccacatgagccttctcccatgcaaagcttcccccagcttaaatagttgataaggactaattgtttaatgagtttatttatctacagtaggttagggatcctgggttctgtttatatgaagttcttcccagtttgtgaattctagtacagcagccatgcagccaccttatttcatagatgccatctgtgtgtcctcttgactaccttctatttagaggaagaatgagagctttgtgtgtttaactgagcttatagtaggacttctttgcatatgtatggtactgaaaaatcttaatatacatctttaatcctttttaggttgtcctttaaagagtttttgactagtttctttttcttgacagctcttctctttggacacatgggccttcttagagggttcagtctaggacccggctctcctggccctgtgttgagggtagctggtccctctgtccctgtgtctgctagcactagactttgttgctgcagattgatccagtgggtacataggctaattaatgtgagtctttttccttgtttaaaggagtccctcttgctgaaagtagatgattactattgctgtagtgttaggaaagtattaagtttgtgctgaaaatccattgccatttggtacaaatgacatttgttctttctgtgaaagagatgccctcgagtgtgtttgtacacaaacccttaggatggtgagttgaagcatcaccctcgcgctatcttcagtgacgggtgacggctcagggagatggcaggcagattgggctctaagtcattattctctcagttactccattggtgaaatggccctttccctctttgcagttcagtctaagtctcgtatttgctttgctgtctgtgtgctgaagctcgtcccgtgtgagttgctgtctgccccttgtcaggctgtgaggtgctcgtgtagacctggagcatgcaggctgcctccgtttttgggtactgtgttgtgttttgctctgtctaaaaacatctgcatagttttcaactggaaaaagaaaaaacttaaaaatgggatgtcctaaaatgaaagctgctcaaagtcacagaacaaccgagggacaaaggagattggatgactgggaagcgctggcccggaacagcccctgcaactgtggggcctgcacacagcccttccacagttggcactgcaggtgcaggccaaccctttaaagaataaacaaggaagtcagctctttcactttttacaagttggcaaaaacagacttccggggaatttcgatgttttcccgtgttgtagagcttccagggtttaataaaactggttaaaaattgagtctttccctgaagtaagtgctctttccagatgaaaactactcttttggttttgtttgaaagtaagaaagggaggggaaactttgctcttttaataattatgttcagcctatgatgaagtatttgattattagacagcaatgtcactaataagttttaagttgtccaaagttaattgtaaacatcatcagtacagtactcttagttacagtaaagcaattgttgcaagatgaatggctaatattttggtgcagtgtttgatgttcaaaacaaaatgttacaacaataaacgaacataacataaactga

SEQ ID NO: 7731 - DNA, 455 bp, Homo sapiens
ccggaggtgcgaggagagccagccggcctgtgtgacttgggtgtgaatggtttgggttaaggatgagacgtcttcatgctttctcctccctattattttctggcttgaggggaaaataatgtcaggtctttcactcatataaaaaagcaccaactaatgacactttaattgtttttctttatctacaaaattatgtgttaagaaaataccattcatagcatgaagattaggaaacagttttaaggagaagacttgaatgaagttggagggacattgaatgatggtcagagggcagacgaatgtgtcgtggggcgaattgggatttgctgcagctgtgaagccatggccgtgtctcgtgtgttgttacagaggtgatgtgcttttcgacgggcgcctcgtggcttggaacctcctctgtatgaataaacagttttcacgtctgtcctcttccccga

SEQ ID NO: 7732 - DNA, 346 bp, Homo sapiens
gcgccccgcagcccggccgccgccgccaagcatctgtcccctcctcccccggccgctcctctgccggctgcctctccccctccgagcccgtccgctcccgagctcggtgacttccactgtcgcggtgtagttgtccacctcgcaggagccgccccccgggcccccctcagccccccacttcccgtacccgtttgcccatctccttcttcaccgagcttcgccccctgtcctgatgccgtcgccctgcctcatactgagatccaaccctttattttctgggcaaagccaaacccacctgtgtagaagtgatgcctttaggtcacccgccgtcctcagttctctcgag

SEQ ID NO: 7733 - DNA, 1478 bp, Homo sapiens
aggcggtgggacagggacactttgcctggaaagtggagactgagatgacgtggatcataatgagtgaatgccagttacaatatttttgtggaaacgtatggaacattgtactcactggacttaaggcagtgcttggttagctatttttaagacttttcaaggaaatggtgttcctcagttctgaccaaaccgtttcactgtcttgtctggtgtctagtattaatgttgcccagtaagcacctctctcccttttttttttttattattttaatttgagaactcctgtgtccagtttagaagtgagagacttccatttttagttcctttacactcaccaccctagcaagtgccctgcacagagtaataagtaaattgatttcctaatcacaattctatgtgacttatggtcaaaagagcagttttaataactttaaaagtacttcagatagacgcagaaaattggtgagtggttgaccaagaacactgcacaaatataaaaaaagttctggaaatgcagaatggcgttagatttatatttggtttgttaattttatatcactgtttttcactgtttttgtggacaaataatggttgctttgctgaagtgttcttcctcaatcttgattgccctgtacctacccaaaagctgtagtcacacatcctaaaggccaagcaaacccaccgggatggtggggggtcttggagccaagctcttaggttcctcttatttggggcagtaccagtccataccagctgcgatttgtgagtggacctgtggtaagaagaatagaaaaggctctcagagataaggttttttacatgtgtaacaatcccaagatttcctagattaaaatcttaattgattttgaaattggatttttatttagaatcaaaattaggacaagaacagataacttcttcagatacatttgtgtaactttacagaatgtcatcaagctttggggctctgtggggcacatgatttatccataaaggagatgcagtatgcttacttaaattaataaatttaaaatcttttaagtgtgtaaatagtagtgttggtcttacgtatttcaagtaaaaagtagacagctgcactttttttgcacattggattaaaataacttccatcagcaacaaacatcagactgtttttaacaaatattaaagattgtcagaccaaatgtttatgttttcgaaatatatttcatcactggttacagttttaaatagaagttgattgccttttcatagccgtaaatgagaattataaactctattccagttttggtatactaaatgttcttttaaccatctttaggaatatattgaaatgccaacaatagtttgaattgtgttctgtaaaaaagtattagtcaattatttttcaaaatgtagaattgtagaaaatgtcaatttttcaaactcatttttcattgctaggatttcttttaaaaaaattaaagtaatttcacttc

SEQ ID NO: 7734 - DNA, 1090 bp, Homo sapiens
gaataacttagcttgcacatgaatgcagtcatgcaaaccgttaggaaaaccagagcctatatggagttccctcttctaacccaactgacttgtatctgtccgtggaaaatttcagtccagaagaattgaccttgaccattaataaagacactggcagagagatcttcccataataaagcaatctgattcagcatcactaaaccgataatgcatgaagcaacgataaaattacaaaagagcagcatttttaattttcacaaaatgtctcagttttcagctatacctgcacgttcataaccaacaatataaaccgtggtctcatgtaacacataaacaattcatgcctttcatagtttattattattaaagtctaaacaaaattgcaatttcttaggtaaccttatatttacaataaatgaagattaccctcaaatgctagaagctgtctaggtccgtccggtgtgtcagattttcctcagattagatgtgccaataaccaagtttattcagtaaacaacttgtacttgtttcatctggttttattactctcacccataaacagtaatgactctctgaccctctggaaatatgtaatgcttccaatcttgctttgtgtatctcatttaatttgttataaggtagtactgattttagcatattaatgcgatttcttccttgttgtttgctttggtctgtgttcaatccagagagcttaaattgtcattattttgggaagaaaacctgtatttttgttagtttacaatattatgaaatttcacttcaggagaaactgctgggcttcctgtggctttgttttcttagttactttttccgtgccgtgtattttttaattgatttttcttcttttacttgaaaagaaagtgttttattttcaaatctggtccatatttacattctagttcagagccaagccttaaactgtacagaatttccactgtaattaaaactatttagtgttagttataaatagccttcaaaaagagagattctccattacacgatcacctgcatcacagcccatggtgaatgtatgtttctgcatagcgaaataaaaatggcaaatgcactg

SEQ ID NO: 7735 - DNA, 2727 bp, Homo sapiens
tcccacctactggggaagctgaggcaggagaattgcttgaacctgggaggcagagattacactgacctgagattgcaccactgcactccagcctgggcaacagagcaagactccgtctcaaaaaaaaaaagaaagaaagaaaaaatggtggaaagggtggagaaattccttttaatgggtacaaaccacacaatgcaggtgaccattactctaaaagcccaggcttcatcactatgcaatatatctgtgtaacaaaactgtacttgtgcctgctaaatctgtgaaattaaaaaaaaaaaaaaaccatgaatctgatttgcctttagtcaccagatgactgcagataggcacacagaggtgtgagacagcactttccatttgcccttcatctcttgttcctctgccattccccatgaagccgtgctggggctgacctgctggaggatgagacctgtgaagctgagtcagctgccctggtcatcccagccaaggccatgtcctctctgctcagccaacaactgtccaacaaacatgtgaatgagccctgctgaaatcagaactgaccggcccacctgagcctaaattcctgacaaacagatgtgtgaactaagtaaatacttaaaaaaatgagatgctgatggtccctgaatttctcaagaggcaaagaatggtcccacctcgcaacttataaatgttcagaagttagacggccacaaagaagtagcacctcatatacattctcttgctatctacaataaggtgaaggaaggcatttatcttctctgcaaccagaaaacctataacccaaatgcccaggaacacaagaacactgttcaccattctgctgtgcttattagcagaagatatatcagctcacaaaatcccctttgaaacagaaactaaaataatgctcaatgatcattctactcccacgggggaggagggagaggagcataaatcaggacaagagctgggtttagaacttggatcacgtgtggcttttctccatgatcacaaaccccagcttcctataattaataattggatgtattaagtgttttatggagcagtccagccagagagcaactataaaatggaaacatggaccagcttggtaaagggaaagatgaaattgtagaattaatttgtttgttcgttcattgagtatttcataacaataaacttattgtatttataaagggaaaaacctctgggtgtaatttggctgcctggttgtttatatcctacagtgcagtttcagtatgtttcatgttagtgtgcctgttttaaaatgttttacttcattatcgtaagacgtttttaatgcaatgaaacttcaagccagaaaaatcttagaaaattaacgaaatagggagtagagagaaatggagatagcattaaactaaatacaaagaaaaaattgaaacaaatttttttatttgacaaaaattagccgggtgtggtggcaggcacctgtaatcccagctactcaggaagctgaggcgagagaatcgcttgaacctgggaggtggaggcagtgagctgagatcgtgccactgtacatcaccagcctgggcgacagagtgagactccttctccaaaaaaaaaaaaaagagtctcttcattaaaataaacctaatacttcacttgtttagtaaagcaatgcaaattaatacctgatgataaagtcagaagatgtatatatgtttgtgttcctgctttctttcatttcacagtctaattctcccagactaggatttttgctagctatttgttctatcacccagaattttgagaaggcttaaaagcatattattgatttgtgcatttggtgcaaaattcaacaggtataagggggtatctctccctgaacctgatcctcagccttcagtttcctcccttggaataatcactgtatacttctcttgtgtgtctttctaaaaatatgttctgtttatttaaatatatgtgtgtatgtgtatttacacaagtgatggcataccacatacattgttaaacagtttcctcgtgtcctttagcaataaaatctgacgagcagttcttaacacatggagcggcacactataagtgaccagtccctgcccatggccatctggatggttttcatgttgctgtgtaaaggaggcttcaaagtgtcttctgtaggtgtcagcttgactggaaaataaaaagtgtcttctgtactcatcactcatgcttgtgagaatctacaggatagattctgtgtgtgaatctatcctattctaatccttttcggcatttcctcagctacccttactcgttcatttttccaaatgaactttaatatcagtttttctggtacaacttttttccattccagttggttaatttttggattgcaataaatttatgatttaacttttaattttaccctttgtgaacttgaccatagtaagctgttcccatactcaaatatttcctgtcctgtaattgcattttaagttttcctttatgtagaacttgcgtccttcttacgaagtttattcctaagcagtttatcgtttttgttgctgcaataaatggacgtatttcttccttgatgtcctccacctaagattgtctgtatggaaagattgtatatttctgtgtattacatttaatcctgccactgtaatctcttctaatttgtaatttttttcatgtaattattttgggtttctaggtaaataaacatgtcacctacaa

SEQ ID NO: 7736 - DNA, 190 bp, Homo sapiens
acttcaagcagaatcctcagttggaatcattgctaatattttgaggagaagtgtatgtgtgaattaagaatctcttcagttcatatttcatttccaactcaggttaagtgtttctggggagagatgttgtgtttacgttacactaaaaccacatgtgcaacaaatacctccattaaatggtctaaaatgt

SEQ ID NO: 7737 - DNA, 995 bp, Homo sapiens
aaggcttgaatctcggtgtctttcctgcttccatgagagccgaggttcagtgggcattcgccacgcatgtgacctgggatagctttcgggggaggagagaccttcctctcctgcggacttcattgcaggtgcaagttgcctacacccaataccagggatttcaagagtcaagagaaagtacagtaaacactattatcttatcttgactttaaggggaaataatttctcagaggattataattgtcaccgaagccttaaatccttctgtcttcctgactgaatgaaacttgaattggcagagcattttccttatggaagggatgagattcccagagacctgcattgctttctcctggttttatttaacaatcgacaaatgaaattcttacagcctgaaggcagacgtgtgcccagatgtgaaagagaccttcagtatcagccctaactcttctctcccaggaaggacttgctgggctctgtggccagctgtccagcccagccctgtgtgtgaatcgtttgtgacgtgtgcaaatgggaaaggaggggtttttacatctcctaaaggacctgatgccaacacaagtaggattgacttaaactcttaagcgcagcatattgctgtacacatttacagaatggttgctgagtgtctgtgtctgattttttcatgctggtcatgacctgaaggaaatttattagacgtataatgtatgtctggtgtttttaacttgatcatgatcagctctgaggtgcaacttcttcacatactgtacatacctgtgaccactcttgggagtgctgcagtctttaatcatgctgtttaaactgttgtggcacaagttctcttgtccaaataaaatttattaataagatctatagagagagatatatacacttttgattgttttctagatgtctaccaataaatgcaatttgtgacctgtattaatgatttaaagtggggaaactagattaaaatatttgtcttttaacta

SEQ ID NO: 7738 - DNA, 664 bp, Homo sapiens
aaccttagaacacagactgcaaataatgttaacatttgaattttttttaaaagcacaatattctcataagagctaagcatttctagttcgacggaaatggtttgtttctcttctgataggtagacaaaaggagctgatatccttctgcagtaaaagctaccttgcaagttaaggcactgttgaaaatgttatttgtaactccatttctctgaaatcagggctacttgctttatgttttagtcaacagtgtctcgcattctgattgatcatgtgaaggaatcatttatgggccccgtccctaagagaaacagaagaggagtcagaaagaaagatgcctgtgttttcctctgtggggcccgtgcacttcctggagagatgctacaatgcaatatacagcgctccatccccactggggaagctgctgtgatgagactagatgagccttcaacacactcagaaaatgcaacagcaatagggggcagacagctcctacctgtgtttctaggagcaaaagagagggaactaattgcccgtgaagacgccagtggaaggatcagcctcattctaagcaaaaacatagtattagtgatactcttactgccttatcttaaccaaggactaataggatacctttccattaaacaccagtgacttctcaggaaaa

SEQ ID NO: 7739 - DNA, 970 bp, Homo sapiens
agagcaggcgccattataaatatcaaagcccaagaaatggaactttgggcagagatcatgttagaatcaagtggatgatgagaccaattacaggccgtctctctgcacagcacagaaattctcaatcactgaaatgagtaactgcaaaataaatagttgattgtactgttctcatgctataaaagtggacaggtactctacaacaaatctgttttctcatttttatcaaatatatgtatcatcaaaggttgcatctgtacagtatgtaaatgctattaatgtcgtcactcacatgcacgacagtccttgttcccccaggaagggcctggtggccccagcacacacttgggattatgtgtatacataaataaatattgggctgtttccctcttcctgtgaagtggttctcaaattcctatgtactgtaaagctgtacccttaaaagtacagatgtggccgggcacagtggctcacacctgtaatcccagcactttgggaggctgaggcgggtggatcacttgaggtcaggagttcaagaccagcctggccaacatggtgaaacctcgtctccgctagaaatacaaaaattagccaagcatggtagcaagtgcctataataccagctgaggctgaggcaggagaatcccttgagcccgggaggcggaggttgcagtgagccaagatcatgccactgcactccagcctgggcaacagagtgagactccgtctcaaaaaatatatttaaaaaaaaaaaagtacagatgtgatgtgcagaacatattgttttcgtagatttttatacttgatcaattaatggaatcagatttttagataagtgtaattttctctataggagaccacgttgctacatctgttaatgcctgtcagtgatcaaaagaaacttaaaaagtggaatgggatatggcttttggtacctgaaaataaatgctttaataattgtaagccagat

SEQ ID NO: 7740 - DNA, 456 bp, Homo sapiens
aggcccagagggaggccatctcagtctgtccactgtggtttcagctggtgcattatttcagctgtggctttcagaagaatgggaatgctgcgctgattttagccagccactggcccagctgaaatgatggggaaaggagtccttagtcctttcagcctcagaggtcacagtgggtggcaggtgactttccggaggccttgagggaaatgcacactgtcccatagcctcattgggctcccagacgtgctggaaaggttgagcccagagtggccgaggctggaccctgtggcaccaagtggggtcggctgaccgtgtggcagggatcgttgcactggactcttggcgtgtgggaagggatgctttctctttgtcgcccactcttcattcctgtttctcctcagttcccctgtgcagatgggctgtgaaattaaattggagtcttgataagaacatttt

SEQ ID NO: 7741 - DNA, 3125 bp, Homo sapiens
gcctcgtgcctttcagctgcttttgtgctacgagtcagcgtccgtgcgcgaggacactgagccgggctggctctcctttctgtggttttatttaatgggcttgaatttgcattagatcagatttttgccgcatcacattgttccacagactgaatgctgtgttcgtatcgattgatgaaacgtgacaggtccgccaattgctcgtttgcactgagagaggacaacagtttgaaacttacttttgtgtgtgtgtggctttggaagccagtagctacttccttagttcagttctttactgttcctcgaataatctcctgactaaggcaaaaaaaaaaagcttctcctacgagaatcagtctaacagagatgccgatgtcagcacagccctaagcagtaagtcatattggcatttccacgtgactgtgtttctatcccgtgtacagagagatccagagccctacactccacgacctgggggctcacagcacagaacctagaagcacctgctgacactcttcaactgatttttaaatgttgttgcttggagataaaaattacataagggactttttgcctgcattctagtgcaaaacatctgaagagctgtacacccacaagggtgactatttcccctgagtggccgtgttgtcccagtgccctggttcagtgtctcctgagtggatgacaggtcttcattctctatcttgaatgtattatggttactaatagttttataatggaggtctaagaattaaagttgtgtgggagtttcaggacaaaggaaggctaaaagtttgtcaagacgttgagcgtattttggttacctatgagaagggttgtgacagtgtacagtggcagctgttggccacgctgcagaaatgagctggagctcatgggttttcagctacatttttcataactttgtagtacatccatcttgagtaaattaagccacaatttggtacctagggtctcaaactaaaatttatttttataaatgaattttaaaagaaaaaatatctacttcttttaaagttagaagaaaattaacctgctgacaggcaacatttttggggtgctttctgcactagttttccttgtaaatgatttgagtgagtaggtttggtttctgacgaaagtagactggagggtagcattgtatgcctcaaatgtctcagtgtgtttggctcatacgtgggctatactgtattattttggtatgcttacaaatgactaaccaatcaaattgtcattaatgtttggaaaatctgttaatgcacatgcacaataatttcctgaaagccataggacatgtctgtagtcagcaccacgatagcaccgtttcatgaaaggcatggcggctgcatttcataccacatcaaaatacagtaacatttctatactaaattaacagtaatacctcaaaactgctccggtagtagtttttaatggattgaaatttacagtttagtaaaaggcttaaaattacttatacttatgaaataaactttaccagttgactaaaataatgcatgttaacagttggtctgtatttgcatgtaaaagtgggccaccagagaacccttattgattacttaagtgtttacattattttaaagactcctgtttaagagctttcagaattgtactgggtgaatctcatttataaaacttcctaagagactatctgaactctatactccagacagttaggtgggagtataaatctaccccttttgatgaccccaggcttgagtttttaaaatgactacccagaagggcacaagggggaaggaaatggtatttgtatatgtatataaatatgcacctaggagaatgtgctttttaaaataatgactactgtttttattaaaacataagaaactacacccccaaaataagactttcattcacattcacaaagcaaacatctagtacatgtctttcacttcactttatgatagtgtattggatgatttgggcattacgatcacctcttaccacagcacagaacatacattcttcaacagcattaacggagtttgccaagtgcattaaagaggtcacgtggagggtacgttcatatgaaacaatctgcagaaagtggggtaagaaagggcacatggcacagttaaagttgtagaaatcaaattactatcattttttgttgccaaaacaaagtcttacatttaacccccctttctaccacccccctccacacttcacgtcagctacatagtttccacagggtaattcactaagagcttgtggagcttggttttaaaatccttagcctggtctgactttaggcatagcttccagttcttccttccgtgtcctggtttcttgttcagttttacttctaatccaacaacaaaagaaatgtctggctggtctcagctagagtctgatgtgtcttagagcatgtgtgcgtatctgaaccatcatccctgctctcatctcagctccctccaggcctgagcaccggttccttttgtcccatacgtcatgaagtcacactattgggaaacctgtgcttccctctccatggcttaactccctgtcagtgtcggagtgtataagaatgcttgtaaatactgtaatatatttattaatatttgaaaggcattcattcagtggacagtgggaattaactctcccaaggcaagtgaaaatgaatgattgacgtacgttgatttaacaatcttactagattttaattcttaaggatttcaaatgaaaccagaaggtggttatgtaagaggcttaaaatgatcttatgtttaaagagattctgttattagcaccatgaactcgtactatgaaatttttaagccttttatttttctaactatattactgtaggactggatattaggtgtcatataggaaacacaaaagtttattgctgtttgctaaagcaaaatagcagaaaattttgtatatgcaaaactgttgaaggaccatagagaaatgtgtactactgacggggcttttactaggcttcctgcgtgtgtaaaagtcgaggtattgctggcattcagggtgacatgatggtactaaatgttttccattaaagtcttctattttaaaatttagagaaaaataaaatggctttccatcag

SEQ ID NO: 7742 - DNA, 732 bp, Homo sapiens
ggccaatatttatataagatttatacctgtgtttaattggaattttacacattgtacattacttagctatttagaggtttgttattttaaaatcacaatctggcttgaatggcatacttcaattttgtatatacttgactggtaatgtttaaaaaaaatcatgcattcctttaaaaattaaggctgaaaaacttgtataaatctccctggaatttagtataaattaagtgtatattctattttaataaatgctactttgtttacagttatcagtagtttaaatattaatataaaatgcattcagttttctttacacaaacaggtaatcaaagagatgtttgtctaagggtttgagccctagacaaatcagtatgatcattacttttcacaggttaatggaattattttatacagattaggagaaattaacctcatgacagatttatttattgcattggtgaaaataaatgttaatgaattaccacttttgtggtttattcgtggtccttgggatatttgagactgtccagaaatttatggttggaccttgaagcaagagtaggaaaaaactaataccagaaaagcataaatattaataacctcatatgaaagtacatgaatcatttagaaatatttatcactgtgatttgttgtaaaaatgaattgggtattttagaaaaactttattatacctctttgttatgatactgataaattgtgatcttgcagtcg

SEQ ID NO: 7743 - DNA, 1029 bp, Homo sapiens
acaattaattttgcccagcaagcttctgcactagtaactgacagtgctacattaatcataggggtttgtctgcagcaaacgcctcatatcccaaaaacggtgcagtagaatagacatcaaccagataagtgatatttacagtcacaagcccaacatctcaggactcttgactgcaggttcctctgaaccccaaactgtaaatggctgtctaaaataaagacattcatgtttgttaaaaactggtaaattttgcaactgtattcatacatgtcaaacacagtatttcacctgaccaacattgagatatcctttatcacaggatttgtttttggaggctatctggattttaacctgcacttgatataagcaataaatattgtggttttatctacgttattggaaagaaaatgacatttaaataatgtgtgtaatgtataatgtactattgacatgggcatcaacacttttattcttaagcatttcagggtaaatatattttataagtatctatttaatcttttgtagttaactgtactttttaagagctcaatttgaaaaatctgttactaaaaaaataaattgtatgtcgattgaattgtactggatacattttccatttttctaaagagaagtttgatatgagcagttagaagttggaataagcaatttctactatatattgcatttcttttatgttttacagttttccccattttaaaaagaaaagcaaacaaagaaacaaaagtttttcctaaaaatatctttgaaggaaaattctccttactgggatagtcaggtaaacagttggtcaagactttgtaaagaaattggtttctgtaaatcccattattgatatgtttatttttcatgaaaatttcaatgtagttggggtagattatgatttaggaagcaaaagtaagaagcagcattttatgattcataatttcagtttactagactgaagttttgaagtaaacacttttcagtttctttctacttcaataaatagtatgattatatgcaaacctt

SEQ ID NO: 7744 - DNA, 341 bp, Homo sapiens
tattcatgacttgagaatattctgcagctataaattttgaaccattgatgtgcaaagcaagacctgaagcccactccggaaactaaagtgaggctcgctaaccctctagattgcctcacagttgtttgtttacaaagtaaactttacatccaggggatgaagagcacccaccagcagaagactttgcagaacctttaattggatgtgttaagtgtttttaatgagtgtatgaaatgtagaaagatgtacaagaaataaattaggggagattactttgtattgtactgccattcctactgtatttttatactttttggcagcattaaatatttttgttaaat

SEQ ID NO: 7745 - DNA, 3133 bp, Homo sapiens
ggtgccttatatagcagtatagaaaattcctgcactttaaccctttggaaactatgggcaaagatacatgtgtctgattatttttttggttagttgccgaaatatactagttctctgagggttaaagaagtaaaatacctttttaaagttaaatatcactagaaaaatcagtgttattacaagggaagaaatgaacccagtttaagaatttgccatcagtagcagtattaagcagtggttaatgtcttagaagtcagacttctttttcaaggtcttcagaaccacacttgatttctgttttgttgcagctgtaattgacacatactaggcagctgactccttgaatatccagtgtgacccataaaatagtctgttaataccggatcttaatttttatgttattcattaagattttaactatattcagtacgtaatttggagacaaactagcatcatcaaaactgcctgtaaataaggtgtttagtctttctataaaaacagaatagagcagttacctaccagttaaaatatcttatatgaagaaaatagaataaagatccagtcatatatgtaaataagatgtactgattgtacgtaaatgaaaaatggaccctttaaaaattatttttacctgaagcttgtcataatttttttaaagcaaatatatatatggtgatggtacttttcaaagtgtgtattagtggtgatcacctcaaacataaacctctgttgtgaatcatttgtgtccttttcaactgtctttcagaggaaaggtaaaaaatcattaaaccttaaattcattgttaaaatcaaatatttgtcagcagtaactcaagctcatggttctcaagcagaaaaaggtttgggagactaaaaatggagtcaggttttcatggagactgctaactccttggggtagacatgggccttgcctcagcaaaccagtgcaatttcccaatgtcttagtttcagaattcatgctgatttcattatggagtaaagttttaaattgtggctgctgctttttgtcttacattgaagggaaatatccttgtttgagcattctacttgattttttttttttttttttttttttttgagacggagcctccctctctctctcccagactggagtgcaatggtacaatctcggctcactgcatcctctgcctcccaggttcaagtgatcctcccgcctcagctttccaagtagctgggagtataagcgtgtgccaccacactcagctaatttttgtatttttagtggaggtggagtttcaccatgttagccaggctagtctccaactcctgacctcagcctcccgagtagctgggactacaggcgcccaccaccacgcccagctaatttttttgtatttttagtagagatggggtttcaccatcttaacaaagctatcattaaatcatttgcttgtaatgaaattcagccgttgtcagctgtgagcgttgcggggctggtggggtgtgtttgagtatgtaagtgtctatttcctgtgctctaacagtgactatttcagttctaacccttcaattgctaattggatgagggaatggcctcttagattgtccttgttttgacttatctgctaaggcgagagaatgtctgggtttgccacacagtcccgcagggacccctgctctttgccaggatttttatatcaagtacttagtttggccaaatttagagtatagtttaaaggggaaaaaaagtttgtatttgatgagtctaattactatattagaatgctttttaaatgaatatgctgtgattggaatctcttcttgggggccggggagagtgctgagagatgcagctgtgtctctgctctctgcagtcttgggcaggcagcaccgctgtctcctgatacagagggttgaatgcactgcttcacattgatgccacattttcaaatctaaacatgattaacatgttttttaagtatttatcaaataattcacatttttgcaggtttaagtgctgttttttaagatattaaacatgttccttgtttcttttttctttttaaccactggagactatgtgaaaatcttgtgttatatggaatttttctaaaacaatttccttttacttttcatgttgcatattttccagtggggataaattggaggttcttattactaataatcctgaaactaaaatttgcttttcctgcatagacatcttttgttagtccatttgagttttgttgccatccagtttcatgatcatgttgtgttagtctaatagacaatgagttactgcttgaatgatatgaaattctctagtaaaaaatgctctgaagatgtgagaagctctgttgtattacttggcaccaggaatgttacaaaaatgttgttgctagcatattgctaacctagtccttaagtttcagggattcctgtaatatgttgagtttggagtattaatagcaggctaacagaatacagtaccaatatgccaagttaaataattgagaatatatacagtatagtttgctatgtataatagacctcatttcatttacagtacacctcacacttgggattaattcacctataacctctgtgaactgcgagtgctcggcagaagcagccctgtgtcttacatgtctacatttatatttatatttatatttatttttttgagacagagtctcactctgtcacccaggctagagtgcagtggcatgatcatagctcacttgcgtcttgaactcctggctcaagtgatcctcccacctcagcctgctgagtagctgggactacaggtgcacaccaccatgcctggctaaaggcatgtctgcatttatgcgaggtgtgttgaccgggtggggagggagctaggactgagattcgcctgtgtaaaatgcacaaaaagggtttgctaagcaaattgatatttgaaatgaaagatggattaggtgagagacttagtttattcaggaataagagcaaaaccaaccacatcaaaaaatgtatttcactgagacagccttttgtacatacagcagggtgctgtttacagatttcaagaaaggagaaaaagaatgcttatactgagattacctacctcccagtagtgaaaataataaatttatcccttgaaatataa

SEQ ID NO: 7746 - DNA, 2581 bp, Homo sapiens
aatggctgatccctggttttagaatccatgggaataacgttgccaagtgccagaatagtgtaacattccaacaaatgccagtgctcctcactggccttccttccctaatggatgcaaggatgatcccaccagctagtgtttctaatagctaggttctatgtgaacagtcttattgtaggggcaacctcttaactttgtgactggacagataaaacgatgtagtaaaagaaggatagaatacaaagtattaggtaggtacaaaagtaattaaggtttttgccattactttcaatgaccaaaaattgcaattacttttgcaccaatctagtaaaacagcaataaaaattcaagggctttgggctaaggcaaagacttgctttcctgtggacatctaacaagccagttctgaggtggcctttccaggtggaggccattgcagccaatttccagaagttaagtacctggacatgcgactccaggcagaagatgtagggtctctgtaagccaataataaattggaaggaatgcattgctgcagctgaatttgtctgtctcccacagccatgtggaatctccaccctcctctttctccctgttagtctgatgtattgatgccacctcagtttcagaaagtaggctgagtataaactataaatgtcaaataacgagcttcgagtttccaatgataaatggaccttctctgttagtcttctttgctcactcagtatcccactggccttaaaaccctttcctgttacatttcctcatgctttatgagcatacatttcaaaggaagaaatgaaaatttaatccatttagttcccatgtgggaatacataaaggccagatgaaaattgtcactatttgaagaagctgtaaccaaactatgtgtgttacaatgtagaagtacaagaaaagagccccaacatgtattttaagaaataaagagagagagacagagacagacagagagagagagagagagagagagagagagtgtgtgtgtgtgtgtgtgtgtgtgtgtgtgtgtgtgtgtgtgtgtgtgtgtattttccccatgcttttggactatggggaaaaccaaaaccaaagcaagacatcaagcaatggtgctgttattatagccccaagtcaaagacctgagggaggcaaacaccacctcattctgcagatgaatgtgaaagcagacccagtcactgggaaatgtcatcctcccatcagccaagatgccagcaatggaagagtggcaaccccagtaggaataaaagaaacataatttgcaagttcattcatttttaatagctaaaaatcagcttaaaggagaagcacatcctgattgtaagtccccactaagttggagggtgacttgaatggggtgaaaggtgaaagggacagaggagagcagtggggcttcagaggccaccaggctcaggatctgcaggatggatggtatcttccagaacaggcaatgctttgccctcaggagaatttcccagagctgctgaggggagaagacagccacacacaggacagaccatttggtgatgggtttgatattagaagtggcagggacaggaacttcagaagcaaaggaggcaaggcagctggagtcaagtgaggacagtggcaggcgtgctttcacatggcctgtcccacagatggaggtgaaaggtgcaccttcttgtcctctgttctgtagaaatccttccctgtttgatccttcccctgccaaatgaactatgttactctaatactaacctgtattaattaatatatgagatatatataagttaatttttcatgaaatctaaagcacaaccctagaactaatttttaaaagtgttatttctaccattgaaaaagtaatgtataacatattttatgtgattaaagtgcgtattctcaataagaggtaacctttttttgatgctgcaatgctctgtgataccacagaggtaagcaatgccacttaacctgtatcataaatagtcccaaactgctcttcctataaaattctgcctttgtcaacagctttgctgtctcctaatcactctcaagctctctgctgtgcatgtgactgttgtcagaaggaaaatcaccaagaaacttcacctctcactgcctttgatttgttgcagttaatctaagaaacaaaatgaagatggctagtctaatggtggatgaaacaaaaatgaagtctgagtgctaattcagagaacttgcaattccagacattttcaattctaggtcttctgctatattccaatcagaacagaagcttcagggctcatagttactgagaaaactcacgtttttctacctctaacttcatatagaattccaaatgaaagcaccaccaaactgcacatatttgtgtgaggaagatcaacaagcttcagacttttcccatgaggacttaattcttttatcaaattacccaatttttaaactgctgtgtggatactgtgagtgttcagctttatcgatgacctagccttggaccagatagctgaaaatgttcaggatgtgtactcaagctgatagtaattctgagccctgtctaataaaaaaggaaggatgt

SEQ ID NO: 7747 - DNA, 192 bp, Homo sapiens
aaaccctgcaagtgtaaagaatgtgctaaaaccctaaactggtgctcacaccttactcaacattagaaaatcaatactggatagaaatcccatatgtgtaatgatttttgaaacatcaaaatgaagattaaataaaaattagaagtgtcactttagaaagaactaaggtgctagcacttccgtaaattactc

SEQ ID NO: 7748 - DNA, 1640 bp, Homo sapiens
ccatgtgactgagtgccctgtggaatcgtgtgggatgctacctgataaaccaggcttctttaaccatgcagagcagacaggctgtttctttgacacaaatatcacaggcttcagggttaagattgctgtttttctgtccttgctttggcacaacacactgagggttttttttattgcgggtttgcctacaggtagattagattaattattactatgtaatgcaagtacagttgggggaaagcttaggtagatatattttttttaaaaggtgctgcctttttggatttataagaaaatgcctgtcagtcgtgatagaacagagttttcctcatatgagtaagaggaagggactttcactttcaagtggaacagccatcactatcaagatcagctcatggaaggagtaaagaaaatatctcaaaatgagacaaactgaagttttgttttttttttaatgacttaagtttttgtgctcttgcaagactatacaaaactattttaagaaagcagtgatatcacttgaacttcagtgccctcactgtagaatttaaaagccttactgttgattgcccatgttggacttgatggagaaattaaatatctttcattatgctttacaaaatactgtatatgtttcagcaagtttggggaatgggagaggacaaaaaaaagttacatttaatctatgcatttttgccaagccatattgagttattttactactagagacattaggaaactaactgtacaaaagaaccaagtttaaaagcattttgtggggtacatcatttctataattgtataatgtatttctttgtggttttaaatgataaagacattaagttaacaaacatataagaaatgtatgcactgtttgaaatgtaaattattcttagaacactttcaatgggggttgcattgtccttttagtgccttaatttgagataattattttactgccatgagtaagtatagaaatttcaaaaaatgtattttcaaaaaattatgtgtgtcagtgagtttttcattgataattggtttaatttaaaatatttagaggtttgttggactttcataaattgagtacaatctttgcatcaaactacctgctacaataatgactttataaaactgcaaaaaatgtagaaggttgcaccaacataaaaaggaaatatggcaatacatccatgatgttttccagttaacataggaattaccagataaatactgttaaactcttgtccagtaacaagagttgattcatatggacagtatgatttattgtttatttttttaaccaaatacctcctcagtaatttataatggctttgcagtaatgtgtatcagataagaagcactggaaaaccgatcgtctctaggatgatatgcatgtttcaagtggtattgaaagccgcactgatggatatgtaataataaacatatctgttattaatatactaatgactctgtgctcatttaatgagaaataaaagtaatttatggatgggtatctttaatttttactgcaatgtgttttctcatggctgaaatgaatggaaaacatacttcaaattagtctctgattgtatataaatgtttgtgaaattccatggttagattaaagtgtatttttaaaagat

SEQ ID NO: 7749 - DNA, 1042 bp, Homo sapiens
aacaaattcttgcctacaccactagaagacatctattgaagagaatggattggttgctgactttaaccaggaactagggccatttttattacaatgaactcaggactggcaacaaccatatggttgttccattttcataaaattggaaacaatgcagtaatagcttattgttttgttttttaaagaagatattttattatcttttacagaaatttatgattgatgtattttatctatagttatttagacatgtttacatgcagcagataattgttcatagtggactgaaaactaatgcaaggactatggtctcagtgataagtatattttgaagttcttaatatggaaatataccagtgtagcttggtactgtatttttttatattgatctgctgataccagtgataggcttaaagattgtattttcacagagtggaaaccaatttttttagttattgttcaaggagggtgcaatattaagtgttttggaatttgaagctaatttttaaaaggcctgaactatactttgaagaaacccctatagaaaaggaaagctccagctaaataggaagaattagaatattgagcttttttttcctgatttttctctttcctatctttgatggaaggaggaagtagaaagtggtaaagaattgaggctttccttcttggagagctgtaaatgacaagcattaggaaaggtaccctcctagattcattattctttcattctggtttcacttttaaaataaatggcaacttggcacacctaggctgttaacaaatctcaaagaggtttataaaaacgtatagaatacttggaagcaaagtatggatgactcggtatctgctttgttattcctcagaaatactgcactgagtatatgccctcattactggacttcattttgatacttgtctatccttcatagtgccctctacttttaaagggtttatatgttgaaaaactgctgtggccttttatgacctgtatataatgtagaataaaaataataaaatacttgatagctttttctaagtg

SEQ ID NO: 7750 - DNA, 694 bp, Homo sapiens
catgtagttctttgggtgcattttgtctgaaccacaattgtgaaggcagctcagcttagtgcacaaattttaactgttgtatataaagcaaataagccagcagatgggtgaagaggtccagaatgatatgcaaaaactactttttagagaaacaaaacaactttgtagcaacaaattaaatatagtattagattgttacttacgtagattttatttttactatgccttaccaagtacatccttaaacaaagtagtatgtacatgaaattgcacttaaccaaaactattgtgtaaaacaaattttaattcctcagggttttaatttaaactagtatttttttagattatttgttttaggtgatttaatggtactttaataactactaagaaatattggctatttcaatgtaagttataaggtggtacattcctaagggtatttatagttgatgataacatgaaaactgaaataagataaaatacaacgtgctaaatcttttatgtattctaactttaaaagacaagtgcaacaaagttagactgacttctatatgtgctcttttactctgataatattaaattaggactaacttatgttttataatgattataatttacatgcttatttttaaaatagtatatgtggacacatatatatcattatattaaaataaattctaccattttaaattgg

SEQ ID NO: 7751 - DNA, 1973 bp, Homo sapiens
aggtagaatgagtttccatcagggttgagtccgacttcaaatgagcctgctgctgaacatccagaacgacagcaagaaacctaacaacatgtttgccctcttcaaaagtaattttgactgatctcattttcagtttaagtaactgctgttacttaagtgattacacttttgttcagattgaaacttaatggaactataattcccaggatagtattttgtaaatgaggatgatttaaatatgaatcttatgagtaaattatttcattttattttattctagatagtataacttttaatttgattaatccactattatataaagaatggtgggagctttatatatgtaatcttgcaggtggggaggctttaaattgtctttatgtcaagaactgtatttactgtggttgtagacaaatgtgaaagtaactttatgcttaaataagttttagttgattaaaaaaatttaaaaaatttaaaaaaagaaatatataaatatgcacaggtgggaaggtagaatactatgtaactgttagaatatttcactttaaaccaagatgatcttggatctcctgtcttatagattttatatcctctttcagtactttgagagtgtaaaacatttatagcagaaagtattcgtgtttcctctgttttcctcaagaatggtttcttcgccctccctttccttcccttcgtcttccctaagctaatttcttcctatgtttgtcatcatatcattacataattgtgttgttatttcttttgttttatttttatttggtgggaacaactttatccagaacttttacttgccccagaattatatagatcagtttctcctgacttctttcccaacctttacctctgttggtgttctaatagttttagttttatgttctgcttttctcttgctgtggcaaggggaaggagtaaatctaagatagtgcttaattgcagttggtgaatttgatctctgattgagctctcttctctggaattctgttaaaagatgaaatgtatcgtgttccctgagagacgccctcaaattttggattagtccttcatgcaagctgggccaccaagccattgcttcttttggggacaacctgccctcacttttaaaaagcatcctagctcacatgcctcccctagcagttaatgccactccagtctctgcttgaatgtaataaaataaaagaaaagtaactatttgagacatgaggtgcccttattgtacactggggcttcctatacattttccgtcttcccttgaaccaccactatcctcagctactttatgcttctgttctgttaaagccctatttgctagtggaaaaatttaactcctggtgatttttttaatactaggcctcttgccttccttccagtgagagaaaaatagaatggtaagcctagtggtttcttccttcactgttgaatactatttatccaaggtatcaaggaagaacttctaatcagaaaagacatgtattattttcacaactgggtagcatatctcactcccagaatggaagttaggtgggaattgcaagattaaggagatttttctggatttctgtctatgtatcatatccacagaactctttctagaggaattttatattgagccaggcatccatttccacagtcttgcatttctagatacttccaaagttatagcactgttcctaaatcatttttggctttatttattaatttattgttcacttcatttcattaggttcagtatgaaacaggtattgtcatctctttgtgtctactttgccacctttccccagaataggcctgaatgagattgaaaacgttacttcagttccttgtgtctgacattgcttgtttgtaactaagaaaaataatatttgcttttgttgaatgactactaatttttttccatgaacctaataaactaaaaagaaagttgaaataataaagagtgaataagtataaaaatc

SEQ ID NO: 7752 - DNA, 1990 bp, Homo sapiens
acaagacggtcaagagaaagactcacaggctgctgcgggagaacagcttgtacacctgtgtacgagcccctggtctcatagctccctgttggatgtgtcagaaagaggaatgcaaggacagtgaggccaggtgggcagtgccatcaccctcacccaagtgaatgtggtggtggctgatgaggccgaggccctggtgcttcaaggagcaccctttctgggggtctgcaggtcactgcagaggagcggtctgttacatcttcccatttggagaacctctctcaaccgtgctgtagctggttctgcagaaacaggaagtacaggatttcatgggctggctctgctcgcctcgactgagcttcacacctctggatgccacatgctctctcccaaacactgctttcagtgcaaggtagtgggcctaaggggtttggttgtcttttttttttttcatttttaaaattttaaatttttatttattattattttttagagacaaggcctcactctatcgcctaggctgaagcacagtggtgcgatcacagctcgctacagccttgacctcctaggatcaagccatcctcctgcctcagcatccacagtagctgatgtgcaccaccagacccgtctcattttttctatttttattattttagagatggggatctcactgtgttggccaggctggtctcaaactcctgggctcaagcaatcctcccaccttggcctcaaagtattgagattacaggcatgagccactgcacccggcctttctcatttttatttttaaattgacagacgtaacagtgcgcatttatcacgcacaacacaatgctttgggaatggttaaatctagctcacaaatgcattacctcacacggttgtcatttttgtggtgaggcttggttgtatgttttgtttcattcatgtttttacatccttggagtctcctctgggtccgtcctttctttgctgtcatgctggcttgcctaaggcccaccgccacctgcgtacgagcattttaaactctagagtgagtgacagcctttttatggttggtgttactatttatttcctgcctctaaacttctcgtggtccttataaacttgtcaggatgtgtgttgcgttgaattctgcatgtcctttttttgcccaccctcaggttaagctggtactaacttatccccagaggaaacagggtttatgagcactgacagatgtcttccctgggcaaaaaaaaaaaaaatagtatatgtatacacacacacatacacatttatatttatatttcttaaagcttttaatccctttcattccctgatatctcagagatttcaaatcattgaacactgaagtatatttttcaggccagatgaaaaattgtattaaaaccctattcctggtcaggcgcagtggctcacgcctataatcccagcactttgggaggccgaagtaagcagatcacctgaggtcgggagttcaagacaaacctggccaacatggtgaaaccctgtctctactaaaactacaaaaaaattagcctgatgtggtgttgtgtgcctgtagtcccagctacttaggaggctgaggtaggagaattgcttgaacctgggaggcggaggttgcagtgagccaaaattacgccactgcactccagcctgggcaacagagcgagacagtctcaaaaacaacaacaacaacaaaaaccctattccttgcctttgtaggagtcaaaataaatgaacttcttttttcttttttttattattatactttaagttctggggtacacgtgcagaatgtgcaggtttgttacataggtatgcacgtgccatggtggtttgctgcacccatcaacctgtcacctacattaggtatttcccctaatgttatccctcccctagccctccatcccctgacaggccctggtgtgtgatgttcccctccctatgtccatgtgttctcattgctccaaaataaatgaatttacac

SEQ ID NO: 7753 - DNA, 703 bp, Homo sapiens
ccctctcgcagggcatcctgactgaactgtgtctaagggtcggtcggtttaccactggacgggtgctgcatcggcaaggccaagttgaacaccggatggtgccaaccatcggttgtttggcagcagctttgaacgtagcgcctgtgaactcaggaatgcacagttgacttgggaagcagtattactagatctggaggcaaccacaggacactaaacttctcccagcctcttcaggaaagaaacctcattctttggcaagcaggaggtgacactagatggctgtgaatgtgatccgctcactgacactctgtaaaggccaatcaatgcactgtctgtctctccttttaggagtaagccatcccacaagttctataccatatttttagtgacagttgaggttgtagatacactttataacattttatagtttaaagagctttattaatgcaataaattaactttgtacacatttttatataaaaaaacagcaagtgatttcagaatgttgtaggcctcattagagcttggtctccaaaaatctgtttgaaaaaagcaacatgttcttcacagtgttcccctagaaaggaagagatttaattgccagttagatgtggcatgaaatgagggacaaagaaagcatctcgtaggtgtgtctactgggttttaacttatttttctttaataaaatacattgttttcctaa

SEQ ID NO: 7754 - DNA, 1212 bp, Homo sapiens
cttagctccatatttgacagaaagatagaaagcttaaccacattgtccaaaaagaaattgcatttcaagcagtgttggaaattcttttatgaaaaaaaaagatgcccagaatgcccatcctgtgggtccctgacaaagaagagctacgctctgtgcacgaagtcaagaaccaaacagctcagggaccctcttgccccttcaccatggacttctcatggtgtcctgtaactcatctcccggggggcctggcatgttcacagattccacagaaactcattttcaacaatgctaacttggacctgtcagttaaactctaaggtggacagggttctcagtactaagcaaggagacagaatgctttgttcctttaaaagactgaaaagctgaccttcaatggattgaggcacttttgcttttgtgttaaatgtagatgtgctaaaatatatagatctatcatattttacctacatatgtatgtcattccagtataaaacattctcctctacccaagaaccatagccatgattgttataaatcaatgaagtgtaaacatacattattaaaaaaccacttctgacattccattatgtgctattcaaagatggactattgaactatagaaaagacagactgtgcatttgttcgttgatcctcatcttattcctgacatgtaaaaatcaattttacgtagagtcaacattgtaggtaggttaaaataccagtggcaaatttggaaattcagaaacttataaaccacgagaaatatataggcttgtctctttggtcttttattttggctctattgttgggaatctatttcctattctataagtaagtatacctaacatgctgtggaatcttgagtttccaacaccgtgctgcttgatagaatgactttgaggtccttggataaaatgtgatatatgcaagtacagtatgttgctattactattgcaggaatataaataataaaagactgttattagcacttagtaagtcttcatctatgcatgtttttgagttgactgattccaagaatgaaatatgaggtttattgaattattcctttgaaagggatcaaaacttatattcaatgcactttataattaatggtgtctaaatgcctcagtcagtgcctaactgcacatacaaaaataaaaccttctttctgtaatctaccaaaataaacgcaatggtatttctgctatttaa

SEQ ID NO: 7755 - DNA, 1131 bp, Homo sapiens
aatgcatacaagtcagggtgtttggctaatctacaaataagtcttaaacctatgtttttaaatttttttcccttggtttctacttatcttttaaaaaaaaaaatgaaaaaacactcatgagataactgcatttcacccaacaaaagcagggtataaggcgatattggtgatgaaagtcttaggaaaaatgcataattttgctataaaatgtacttatttggaatactattttatatagaggtaagagaacactgctggggaatatgctttttatggttgctgttgccatatttactgaaggtttatacctaaatgtaactttagctttatggaactatatagtaatcccaaatcaagttattttgaatatttttatgctgtcatgcttgaatgttttagatgtaacctttgacatatttagaactctcctcctatacaatgtttattctcagatatagaggttatgtcattttataaagacttcattgataagatggcttttattcatactaatcctcccaatgttaccccttccatcttccaagaagaaaaaaaatgcctgaatattcagaatagatatttctgatttgaaaattctaaagaattaaactggaaaagtatttcatttacttagtgctctgaatttacttttacagttttctgcagtcagtatcattaaaatggttaagtttacatttgaactgaaaatatgtataaaatctagcaattcacaaaaatgccctagaaatatagattttaatcaccattacataatgacaaaccttgttaaatgcttccacttccagtggcaaatgccactagggaaagtaagttgcactcatgtaagtatcaaactatataaaaggaggccttgtgcatttcaagtttgcaaagtacctgtgtacttaaaatatgtgtggagacctactgtacagtagttttgcccctttaattggggcacattcatcttaaatcttatagtatttatccacccaaaccccagactgagatactgctcccaggggcctaggtagctgccagtccgtgattttaattgctgtcttgaagttaacaagtgttataatgaaataatctacctgatgctaaataaaggctttagaatgttcccca

SEQ ID NO: 7756 - DNA, 785 bp, Homo sapiens
tgcaagtacagtctctcaaggagaattgattttgtggcacaaaaagggaacatgttttactctttgcacgaaactttcattgttaatgtatattattcagaaacattgtattgtaccataaaacttgtattatcaaactgttggatgttcatgtgtttgaacttttgcgcaccggatagaccccttgtatataaagtgttgcacatgtattatgtcgtctgatactaaaatggtcttataaagacaagtggacttgggccctattcaggcaagattaaaaaaaaaaaaagactatgaccaaaatggcttaagataaagtatttttaaggaagaaagattaaaaacaactgttatacatgagactatggttggacttccttttctttacacttaagcctagaatttctctttaggtatatcagcgcttaaatccaagactattttttattgctgaagattcttgcaaaccatgaagagatgttctcacagaacagaaccccacagctggataaggcccgtatatatatatttgtaagccttgcaatgtgacaggtagcatcactatatatgcaatagttgttatgtagactgtcaaagaatttttttttccctggatacatttgaagctttgagtgttcaaggttttccttaatgatttcacgcagccaaattcttgaatcagttgaactaacctgtatgttactgttattaatgtttactctgcagtctgaacctggagattactggaattgttttccaagaggaaataaattcagtttaccatt

SEQ ID NO: 7757 - DNA, 2099 bp, Homo sapiens
aaaagtacttacattccagtagccagtatctattagcagccatattgtcacctcagcactgtggacacctccctgtgaagagatccttccattccatctagtttttggaaaaaccttgtggataagtggctgtttcatcagtaagcagcctttgtggtttagttataaaaggctttagtagctcaaaaatactcttgatttcacatttctactctagatggcaacattggacagaaaatgcaatgacataaccaatttgtaatgattttggaactgtgtttcaaatggactgttacagactgaaaggtgtgaacagctttgtatgtttatgaagggtaagggaatttaatacttttccacagatttttttgtaaggggaagagggaaatgtacactttttacagcagcaatattttgtatattatgtttatttcatgtggtgaatatgcaaggcggtacactacgcactggacagcatcagaaatcctctgttaatgtggactggaacatggtagatgcttgattgttttggtctcaaaatggtgtgctataaagataaaggtgaggggaagacaaagcacaccatatgtccactgttctgttctcatagaggaaattcaaatcccttttatctattagataatcaagggcactgtgatacagttttgagtaaaaagacattttttaaaagccttccagttttgtggattaaacctttttataaagatcatttataatactgttttaaaatgtgaggcaataagaattactttgtgttggatctgaggaggctttggtaaaacagtttcatctaaatgaaagtggtaatcctcttctaaaatagcaataactgaaaatgaaagtgttaattttaccttgtttgagttatcagggaacttagtaagtaatatcaaagcattttataaatgatatcaaagaagagtcaacattgatccagtcattttattttgtaatattgagggataattggttattaaactgaatagttcaggagactttacaaacctttgtttcaactttcttatctggaaataatatcatttataaagggacacttttatgtttttcccttttttatgttggttgatataacacaaagagatatttaggaaaatgcttattgatgaggtttattctatctgtttttaaagcaccgaggttgcattctagataaccttgtttattagcatggcatattttaatcattatttgagactgtcctgtgcctgattattttagctaaattcagggagattgcgtggggcaggaaagcatgcattgaaaaatttctaaccacggttatttaagcataatctgaaaacatctagcccaaaggtaagttgctattttcatcacagttgcctatgcccagggaataagatgtattctttataattgaattggtttttcccacgtctaactggaaacaaaacagaaggggcgtcataaatttgaataagcagaacatactgttctcaacatactgtaatcaaaaggaggaatttcagtgggtctctgtgtgtgtatgagagagagagtgtgtgtttgtgtgtttcaaggtcagaacaggtttttttgtttttgttttttgttctttgtttttttttttgagatggagtcttgctcttgtcgcccaggctggagtgcagtggcgcaatctcagctcactgcaacctccgcctcccaggttcaagcagttctcctgcctcagcctcctgagtagctgggatgacaggcacccgccaccacacccagctaatttttgtacttttagtagagacgaggtttcgccatgttggccaggctggtctcgaactcctgacctcaggtgatccacccgcctcggccttccaaagtgctgggattacaggcgtgagccaccgtgcctggccagaataggttttttctttcaacttgatcagtagaaaatggacatcaagtttgaacagataaatcatggacagccttattgtgattgaaatgcttgtaggttctgtgccaattttccaccactgtgtactttgttgctatttaaaactgtatcaactctaacggaagaataaattatttgtgatttt

SEQ ID NO: 7758 - DNA, 833 bp, Homo sapiens
atggacatatttcttatgcaaaaaggaaaacacacacaaccaataactcaaacaaaaaagggacatttatgtgcagttgggacagcaaaccaagtcctggacgtaaaatcgaataaaagacacatttatatccaatagagaccacacctgtattcatatgggaacaattggaatagtgatatcctcaaggtgtaaaaaatatataaatatatatatatatgtcaaaaggtaggaaatgcaaaaaagaaaaaaaaaaaaggtgacagccgcagttggtgctgtgatggccgtgaagtgtcctgggccttccgaggcctctgacaaataaacaagccatgagtggtgaggacacagtctccttacagtttccattgccaacaacagccatccatatttcttttttcctttgtctttctttttcctttttttttaaaaaaacaaaacaaacaaaacaccttgaatcaagtttgtttgtatatggaggttccacgtctttctttaggcagggaccaggcaggacttcagaaaaaccctcatgagcacattgcaaagatgttagacatgaaattttaaatgtagtttgtacagaagtcacacttttttgtccacctcacagatgtgaactttactttgttttaaaactgatcagttttgccaaggggccagaattattccttgttagaattgctccagttcaagtctgctgctttcctacaatttttcaaattttataatgtattaaatacaataaactctgtttaaaaaataaggtctgtgtgaaacacacatgtgggggtgaggctggattaaagtgaaattttttctttttgaaa

SEQ ID NO: 7759 - DNA, 4168 bp, Homo sapiens
ctagaagatcgcactgaaagcagacaagactccttagaactgtcctcagatttccttccacccattaaggaaacagatttgttataaattagaaatgtgcaggtttgttgtttcatgtcatattactcagtctaaacaataaatatttcataatttacaaaggaggaacggaagaaacctattgtgaattccaaatctaaaaaaagaaatatttttaaaatgttcttaagcaaatatatacctattttatctagttacctttcattaacaaccaattttaaccgtgtgtcaagatttggttaagtcttgcctgacagaactcaaagacacgtctatcagcttattccttctctactggaatattggtatagtcaattcttatttgaatatttattctattaaactgagtttaacaatggcaaaatacagtatgtcacagtcatgcacattcaagagagaaaatataacaagttcttttatgagcaatcccttatgcatagactaccttggcaaaagagcattagcaagtgtcactgctcatcagttacttccttccatttatatcacaaatacccaagtttcaattctaacttcatttcatggtatttcttcctcctcaatgcccaaggtaatgtgggactaaagcccagaaatttgaaaagaatattcagaaatccttcccaaatcataagggcacctattgagattcaagacaagcagactcgtaaaatcttgtagaggcagaggcaaagttatcatcatacaaaaatcacaaacaaaaaggagatctgtattcgggtatcaaacggttgatctgttttcagtgcacaccctcaaatgcaccacaccagttttacgatctaagcttttaacccctttaccactttgcttatttttaaaaaatttattggcaaaactggggattttgtttgtaactttggttatctatatttaaacattagctgagacatatttttgataacaagaacttagctagttgagtcctggctttttgttgattattaagctgtgttcactctagaaggtgtaaaggccctgtcccaatctctgctctctcacttctcgtgacatttgttgataatctttactgcaagtgtaatgatatttgagtgaattaaaatgcatgacagacaaggtacaacatggttgcagaataaaagggtgaggacatcagatcactctgtattcaaagcttactagacgaacaatctttcatttctggatatattgtagctaacccaacacatttttaaactatttttgttactgactcacttacttgtcaaaataattggtttttctgtcctgctttgccttttgtcactagaatgttctccagaaaccccagtttctgtcatcttaactgtctagtctagccgttaacttagacaaagaagtgcaaatgtcaatttcactaaacaaaagctattagaagtaaagcagaaacctatcactgcaaggagtgacttgtaaataactgatgatcaagggctgtcttctctcaagcatggttccaactctgtgtcactttttagcgttaatggcagttgtgtgtctgtggcagtgagataatggaccactattaaacctgattctcttcggtgctaggaaagagtgatgtgtgagattcccagagagtcgtcacaccagtgttatgcctgggagtgccactggcataccgcaggtgcctaaatcccaggcccctttctcagggggcgtggccacaccacacactgcgccagtgacacatagttacttcctggctgggacggcacctatagaaactagggtacaaatctcccaaagatggtttgcaccgtcatttcaaatgtttgcacaatataccacttagaggcttaaaatcagggtggttcagttcaaaaggtaatatcaaccgtcagcaaacatgtcagtttaaaaataagttcggttaacaaggaagtgttaagcagattttttgaatacacttacaatatactggcttataatcatttttattctgccatatggtttatttcatatacactcacttttacactcacttccaattatagcattcaataagttacggttaaagaaaagtgaatggtgtttttgtaatttgttttctagtagctagcagagagcctggcacatagtatgtattcaaaacaagtgtgttaattaataaaaatatataaatctcatttgagatttaagaatataaataattttcttttaatctttattttgctcaatatttaataggaagtatgatttcaaggactactaaaggaaggcaatatacatgtgaaaaccataaaatacattttttgcattctactatttttaggggcatgaaatgaatgaaagctttagcacttttttgcccctacatatgagacaacatattttgtatttcactcaaggctctgccagtaaaaagtaatgaaattgtacctttctaatgacatctatgcagcaggggtctatcgccttgtggatggcaccaaattatccaagtgtattaggagactggggcttttttctttaatcccttcttattaatgaagtgcatagtgctgctcccaggagaccactgctgacagatacacagagaagagatcagagaggaaaaactgggaagacataaatgaattatacccagccatgaaacaatgccaactgtctcttccctaaggaagagtacaagtaccctaaaattgaaaggtggtccctacactgaaaacgcacatagtttgtcaaaagtgtacaaaagggaaagagtcttattttaagctttcaggctttcttaaaaacttggggaccagaatttcaatgtatgtttccattgttgaagataacattttcttcaaagagccttaaccttttgtactggaaggaaatattttctggacttaagtagttgcctaaatttaagattcctacactttatttctgccattgatgcttttcctaaacccttatactatctttttattatctgagccttttcctaatgcagctcataggtgctagctagagctgctgctcagtattgaagactttacaaggagattagaaatctttggaaaacatatgtgatgaaattgagctatatgatttatcagagatctgattccaaagagcacagaatactgttctcagaccatgaaaccagacaacacatgtattggtttaaactcgataatgacaggaaaattccaaactagagcagtaaattcaaatggtaagatgaatcctagaaggcctctgattgcagcatgttgacaccaacctcacgttacgaacaattcacagagaatttgcctttgtggcaactgaagatggaagtctggggggcacagacaaccttatcaaacaatataaaagccaatataaattctcataagcactatagaatttgcaaattcagaacattttatacctaaaagtaattctgtctttcctaaagtgtttttaacatgaaaattagtaggaagatgtggttactatttggaaagtgtaatgtaacaaaactctcttttgttaccacaaattttgtgagtttagtactctacagattgccccataagagcagtagcttttgaaactcataattctctgaaataaatgaaagacatttaattcaaggatcaaaaattgtggccatctttgcaaatgactacctatagcctgtgaaaatacatttcaaaaaatgttatgtgcaatgaacactaaatttaagagcagttacagtgtgactcactcatgtttaaaaaaaatcgaagagctaaaaaatacgtctaatttatgtaacccattggaatgtatttctaggttctcttcaggattaattaaataaacatgcaatttatgaaaacatataaacaattatttatcacttttatgacccaaatcacaataaaattgtcatttaggataaactggggagaatagactgaacatatggttatattcacagttatttattaacttaaatgttattccaacattagagctaatgttaaaaagatttaaactgtaacgtctaatatttggaataatatattaaagtattagcactgtggttgattttcttgaattatgttgcatcttgtactactaagcttgtgaaaataaacatttggatgttttaaaaggtaaa

SEQ ID NO: 7760 - DNA, 607 bp, Homo sapiens
tttgcattcattttctaaaaccctgtatatacttaatgatgataagttcaaatcagctgtaatttttctataattctctgtatgacagaaatttaaccaagtgcagttgtcttgatttaatgtagatttttaccaaatagtatgacaccaattggcacaaagttataggaaaatcacctacaggagatgtaaacaacttgagttgctctaaaatgtttggaaaagagctgcttttgcattatgaattatattgttgaagcaataacctagccagctgttgcattagctaaagcagcctcttgcaatggtaggaaaaaaggatctcaaatagcatgagtgtatgtctatatcctgaaatttattgtctaaaatgcatgaatatatttttagcagtctgtggcatattaatcaaactgttgaattgttttcttacaccctggaaatctttctatcaactataatgataaatccattttgaagtgatattttggacttaggcattttactttagattggaaggcattatgtgatttacaatatgagaatatagcagaaaaaccagatgaggctgtggctttttatattcaacagccaataaaaaatgcac

SEQ ID NO: 7761 - DNA, 1181 bp, Homo sapiens
acttcagggtgaacttggtttttggacaagtacaaacaatttcaactgatattcccaaaaagcattcagaagctaggctttaactttgtagtctactagcacagtgcttgctggaggctttggcataggctgcaaaccaatttgggctcagagggaatatcagtgatccatactgtttggaaaaacactgagctcagttacacttgaattttacagtacagaagcactgggattttatgtgcctttttgtacctttttcagattggaattagttttctgtttaaggctttaatggtactgatttctgaaacgataagtaaaagacaaaatattttgtggtgggagcagtaagttaaaccatgatatgcttcaacacgcttttgttacattgcatttgcttttattaaaatacaaaattaaacaaacaaaaaaactcatggagcgattttattatcttgggggatgagaccatgagattggaaaatgtacattacttctagttttagactttagtttgtttttttttttttcactaaaatcttaaaacttactcagctggttgcaaataaagggagttttcatatcaccaatttgtagcaaaattgaattttttcataaactagaatgttagacacattttggtcttaatccatgtacacttttttatttctgtatttttccacttcactgtaaaaatagtatgtgtacataatgttttattggcatagtctatggagaagtgcagaaacttcagaacatgtgtatgtattatttggactatggattcaggttttttgcatgtttatatctttcgttatggataaagtatttacaaaacagtgacatttgattcaattgttgagctgtagttagaatactcaatttttaatttttttaatttttttattttttattttctttttggtttggggagggagaaaagttcttagcacaaatgttttacataatttgtaccaaaaaaaaaaaaaaaggaaaggaaagaaaggggtggcctgacactggtggcactactaagtgtgtgtttttttaaaaaaaaaatggaaaaaaaaaagcttttaaactggagagacttctgacaacagctttgcctctgtattgtgtaccagaatataaatgatacacctctgaccccagcgttctgaataaaatgctaattttgg

SEQ ID NO: 7762 - DNA, 4384 bp, Homo sapiens
aaattaaacataaaaggtaaataaaaataaattttatgttcatatatttaagttgtttaaaactataatgcaattcattttttaaaaaattttacagaaattgcatcgatgtaatcagaatgaagaccgcatgccatcccaagattatgtcctcacttataactatgagggaagaggatctccagctggttctgtgggctgctgcagtgaaaagcaggaagaagatggccttgactttttaaataatttggaacccaaatttattacattagcagaagcatgcacaaagagataatgtcacagtgctacaattaggtctttgtcagacattctggaggtttccaaaaataatattgtaaagttcaatttcaacatgtatgtatatgatgatttttttctcaattttgaattatgctactcaccaatttatatttttaaagcaagttgttgcttatcttttccaaaaagtgaaaaatgttaaaacagacaactggtaaatctcaaactccagcactggaattaaggtctctaaagcatctgctcttttttttttttacggatattttagtaataaatatgctggataaatattagtccaacaatagctaagttatgctaatatcacattattatgtattcactttaagtgatagtttaaaaaataaacaagaaatattgagtatcactatgtgaagaaagttttggaaaagaaacaatgaagactgaattaaattaaaaatgttgcagctcataaagaattgggactcacccctactgcactaccaaattcatttgactttggaggcaaaatgtgttgaagtgccctatgaagtagcaattttctataggaatatagttggaaataaatgtgtgtgtgtatattattattaatcaatgcaatatttaaaatgaaatgagaacaaagaggaaaatggtaaaaacttgaaatgaggctggggtatagtttgtcctacaatagaaaaaagagagagcttcctaggcctgggctcttaaatgctgcattataactgagtctatgaggaaatagttcctgtccaatttgtgtaatttgtttaaaattgtaaataaattaaacttttctggtttctgtgggaaggaaatagggaatccaatggaacagtagctttgctttgcagtctgtttcaagatttctgcatccacaagttagtagcaaactggggaatactcgctgcagctggggttccctgctttttggtagcaagggtccagagatgaggtgtttttttcggggagctaataacaaaaacattttaaaacttacctttactgaagttaaatcctctattgctgtttctattctctcttatagtgaccaacatctttttaatttagatccaaataaccatgtcctcctagagtttagaggctagagggagctgaggggaggatcttactgaaagcaccctggggagattgattgtccttaaacctaagccccacaaacttgacacctgatcaggtctgggagctacaaaatttcatttttctcctcactgcccttcttctgagtggcattggcctgaatcaaggaaagccaggccttgtgggcccccttctttcggctttctgctaaagcaacacctccagcagagattcccttaagtgactccaggttttccaccatccttcagcgtgaattaatttttaatcagtttgctttctccagagaaattttaaaataatagaagaaatagaaattttgaatgtataaaagaaaaagatcaagttgtcattttagaacagagggaactttgggagaaagcagcccaagtaggttatttgtacagtcagagggcaacaggaagatgcaggccttcaagggcaaggagaggccacaaggaatatgggtgggagtaaaagcaacatcgtctgcttcatactttttcctaggcttggcactgccttttcctttctcaggccaatggcaactgccatttgagtccggtgagggatcagccaacctcttctctatggctcaccttatttggagtgagaaatcaaggagacagagctgactgcatgatgagtctgaaggcatttgcaggatgagcctgaactggttgtgcagaacaaacaaggcattcatgggaattgttgtattccttctgcagccctccttctgggcactaagaaggtctatgaattaaatgcctatctaaaattctgatttattcctacattttctgttttctaatttgaccctaaaatctatgtgttttagacttagactttttattgccccccccccccccttttttttttgagacggagtctcgctctgacgcacaggctggagtgcagtggctccgatctctgctcactgaaagctccgcctcccgggttcacgccattctcctgcctcagcctcctgagtagctgggactacaggcgcccaccaccacgcccggctaattttttgtatttttaatagagacggggtttcactgtgttagccaggatggtctcgatctcctgacctcgtgatccgcctgcctcggcctcccaaagtgctgggattacaggcatgacccaccgctcccggccttgttttccgtttaaagtcgtcttcttttaatgtaatcattttgaacatgtgtgaaagttgatcatacgaattggatcaatcttgaaatactcaaccaaaagacagtcgagaagccagggggagaaagaactcagggcacaaaatattggtctgagaatggaattctctgtaagcctagttgctgaaatttcctgctgtatccagaagccagttttatctaacggctactgaaacacccactgtgttttgctcactccctcactcaccgatcaaaacctgctacctccccaagactttactagtgccgataaactttctcaaagagcaaccagtatcacttccctgtttataaaacctctaaccatctctttgttctttgaacatgctgaaaaccacctggtctgcatgtatgcccgaatttgtaattcttttctctcaaatgaaaatttaattttagggattcatttctatattttcacatatgtagtattattatttccttatatgtgtaaggtgaaatttatggtatttgagtgtgcaagaaaatatatttttaaagctttcatttttcccccagtgaatgatttagaattttttatgtaaatatacagaatgttttttcttacttttataaggaagcagctgtctaaaatgcagtggggtttgttttgcaatgttttaaacagagttttagtattgctattaaaagaagttactttgcttttaaagaaacttggctgcttaaaataagcaaaaattggatgcgtaaagtaatatttacagatgtggggagatgtaataaaacaatattaacttggtttcttgtttttgctgtatttagagattaaataattctaagatgatcactttgcaaaattatgcttatggctggcatggaaatagaaataattatgtctttgttgtattaatggggaatattttggacaatgtttcattatcaaattgtcgacatcattaatatatattgtaatgttgggaagagatcactattttgaagcacagctttacagatgagtatctatgatacatatgtataataaattttgattgggtattaaaagtattagaaggtggttataattgcagagtattccatgaatagtacactgacacaggggttttactttgaggaccagtgtagtcaagggaaaacatgagttaaaaagaaaagcaggcgatattgcagtcttgattctgccacttacaggatagataacgcctgaactttaatgacaagatgatccaaccataaaggtgctctgtgcttcacagtgaatcttttccccatgcaggagtgtgctcccctacaaacgttaagactgatcatttcaaaaatctattagctatatcaaaagccttacattttaatataggttgaaccaaaatttcaattccagtaacttctattgtaaccattatttttgtgtatgtcttcaagaatgttcattggatttttgtttgtaatagtaaaataccggatacatttcacgtgtccttcagtattgatttggttgaatattgggtcataatggttgagaagcatggacactagagccagaatgcttggatatgaatcctggatctgtcacttacttctgtgtgacctttgaaaggctacttatttcctctcttagctttctcattaaaatcaatgaacaatgccagcctcatggggttgttgaatgattaaatgagttactatacctaaagtacatagaacactgcctgcacatagtaaaagaattataagtgtgaggtagttggtaaaattatgta

SEQ ID NO: 7763 - DNA, 2268 bp, Homo sapiens
acaatgaaaggtaaatcaaagcaattacttttatgttagtaaattttggtgtttaaaataataataataaaaacgttgtgtttttccccttggcagaaagtgtatctgtgtaatcaagatgaaaatcacaagcatgcccaagactatgtcctgacatataactatgaaggaagaggatcggtggctgggtctgtaggttgttgcagtgaacgacaagaagaagatgggcttgaatttttggataatttggagcccaaatttaggacactagcagaagcatgcatgaagagatgagtgtgttctaataagtctctgaaagccagtggctttatgacttttaaaaaaaattacaaaccaagaattttttaaagcagaagatgctatttgtgggggtttttctctcattatttggatggaatctctttggtcaaatgcacatttacagagagacactataaacaagtacacaaatttttcaatttttacatatttttaaattacttatcttctatccaaggaggtctacagagaaattaaagtctgccttatttgttacatttgggtataatgacaacagccaatttatagtgcaataaaatgtaattaattcaagtccttattatagactatttgaagcacaacctaatggaaaattgtagagaccttgctttaacattatctccagttaattaagtgttcatgtggtgcttggaaactgttgttttcctgaacatctaaagtgtgtagactgcattcttgctattattttattcttgtaatgtgaccttttcactgtgcaaagggagatttctagccaggcattgactattacaatttcattttggtggagtttagttttaggttttattgtatataaaatcctgcactgaatctgtgtctcctctgttacctacttttgccagtgaaatttaagttttaaaatactttcagaatgtatttttactactgcaagtttttggtctttaaaatgtcaagtagcatctctctctttctctctgtctctttctgtttctctctccagttttttttttttttttaatttccatatgggctaaagaatccaaatattttaaaaatctgtctctcttttcttctctcataaagtgaattattccttttttttgttttatgtaagtgtatatattcttagtttttcttgaaatcattgtaatgttaactttgttgtttcaaatatcttggtgattgcttcattatctcttcaacaaaaaaaacctttaattttgccattgaaactgtagaactatgccatgcttttattagaagcagtgctctgtgttaacaacaagaatggtgtaattagaattgggatgtggatatttactgtatgacaacacatttacagttctgtaatgcaaggatgcagtttaaaaatgtgaagtagtgatggtttttgaaataagctttaaaatatagggatcttgaaggctccctggggtaactattttataacttagataaaatggctagtcatatctgtgtgtttgtaaagttatttttttaatattttaagattacaattttaacaaatgtagaaatgagccaaactatttaaattttaaaacagtaaaacaaaatgaaacttaatagctcacaaaattccagtccatgtttcatgacttattttagtcaatgaattttctatttatactaaacatatggacattttaaatgtgtttctaatatttttgattatctataatgtgcctgtcttcaattcacaagattgggttataacaattatttgccagattaacactagggaattatttgataaccagcttatcttatcagtagttttattgctgatcaggcaaaaatagttttccaaagttatttttaataaagtatatacaaaattcttatatattactagtcatgataaagtaaattaagcagtttttaaaacttagtgtgagtttgttcatcacaggtctgatatgagtttaagggatttcgcactccctgaatcagagaagtaagaccccttccttagattcctgttatacattttttaaaatgtagagtttgttttggagacattttcagtgcattgttattgccatatttatataatatgactattctaaaggctgtgaggccatggggtattggttaagttgcttgcttttgctttgtccattttcatcattttaaaatgggggataataacagaacttgtttcctagggccattgtaagtcacttgaataaaaaatagttttgaagc

SEQ ID NO: 7764 - DNA, 1550 bp, Homo sapiens
acagtaaaaggtaaatcaaagacatcatttttctgctaatatgtttaggtgttttttaaaaaataataaaatgtgctcttttttgatacagaaggtgtatttgtgtggacaagatgaggagcataaacattgtgaagactacgtttgttcgtataactatgaaggcaaaggttctctggccggctcagtaggttgctgcagcgatcggcaggaagaagagggactggagtttctagatcacctggaacccaaatttaggacattagcaaagacatgcatcaagaaataaatgtgccttttaatagtgtaatatccacagatgcataagtaggaatttattacttgcagaatgttagcagcatctgctaatgtttttgtttatggaggtaaactttgtcatgtataggtaagggtactataaatatgagattcccctacattctccttgtctggtataacttccatgttctctagaaatcaaggttttgtttgttaattctcttttatatgcatgtatatattgcccttttcacgactgtactgtacaccttcttgcaccttttatttgcaaactgatgttactttttgtgctgtggaagagcatttgggaaagctgggtattatagaggccaatgaaagatgaatttgcattgtagatgtacgaattaaatatgttcttcaaaatcttggggagaattatgttcttagaacatagttggtgccagataattgcattctctccacctgagtggtttaaaaaggacttttaagtattcttcagtgcaatcttcagttttgtgattaagttcatttctcttttacacttttgtactcctcagagcagtgctcccagcattgttttctttcaggatccttcagagctcagtccctggacctctgcccatgtggatttgttgttaggtcactccaacttctagggttcttggaaagataaggaccagaacaagctcatagcaaattgaggggcagagattttatgaagattacatgagaagatttccatgaaagaattgcagccctgaggtccatgggttgacttatgctcacaaatatgtttcgtttgctcaacatggtttactactaacattttaaaaatataaatactttagcaaaaacattcactcttgagtttgacataggcctgccttatctgtggttgccacctgccatctccaagcatttggacaactagccctgatgcattaggctgcaactctgatatacagagactagcaccttgaatatgccagaaattgaattaccatctgtattagaacttaagactcagcctaaatttacagttactttaagaaaatgggcagtcagaattagggactagaatgtatatgagaaacccccactctactaaaaatataagaaattagccggacatggtggcgaatgactgtaatcccagctactcaggaggctgaggcaggagaatcgcttgaatccaggaggcggaggttgcagtgagccgagattgccactgcactccagcctgggcaacaagagcgaaactccgtctc

SEQ ID NO: 7765 - DNA, 2444 bp, Homo sapiens
aagaagtggctgtcgtggcaaggtagaccacaatgctggatcataaacttggagcgcgctcttagtggaggtcagtgattggctgtgtcacagtgcccttttctctgagaagagccagcagtccacagtgtttacagagtgggactatatacagtcacccttctctcacccgtcctccctgctctgagacacacccctgtggcgagcaccgcagaaacgggaagccactacttaagatcggaagttaagagagctccctccgaagagaaaatttttatactaaaatctataatttaattcaagagaatgcttttatttccgtttaaacatattttgtatatatgtgatataaattaatgtgtgcaaattgtttaaaaattagatgtgttgcagttttgcatgtaatcggttatacctttattggacttttatagacattttttatttgcatgaaaaaaactcactaaatttacatcactaaacaaaggttaacccttgtgtgaaatgaaggaactgtcaataattgacagccaactaatacagtaaactgttatactagttttgagctttagacctcagccttttgtgtggaagaagtcacagctttcttaggctttaaaggaaaagaaggaaggacttaaatagcttttcttcctaccgggattacctatgtttttccttgcttgcaatctcatctgattttgctagaaatcacaaccatattgtttatgcatattgcatgagtattaccaagaaaaatcttaaaagttgtgatgtgacatgatataaaggatctctttatgttaaatgtctttccatgtacctctggtgtgtcagggattttgtgcctcaaaaaatgtttccaaggttgtgtgtttatactgtgtattttttttaaattcacggtgaacagcacttttattatttccagttcagaagagccaaaaaaaagtatcttcatttaaaaagaaatcaagtcagtttttttaaaagaatgatctatggaagaaaacccaatagtacttataatatacaaatgaattatactattagataagaattaaatattctatttttataaagataaatacttagtagataaaaacaaattttaagtttagttttcagacatagaatttcacttttggaggggacccttgaatgttagtttcattcaaactatattttgtttttttcacttttaagagattatatctctggtgttaattactaaaattttctttctaaaagtataatttaatagaattatcttaaaatacatgatcagtattcagtgcgctgatattataatgtcttctatatgtagtatctaaaagcataatttaatagcattgtcttaaaatacgtgatgagttatttggtgcactgatgccataatgtcttctatatgtaatatcttacatgtttgcatgagtgtcagggctttgtccagttatcttcatatgactgttctctgaaaaaaggtcttactacctgatatcaagtacatatcttaattttggatgaatttttccacagtaaagccgaacagtattcttttttgaaaattagcaattataaagattgtttaaaatatcttgatattttcacaaattttaaacaaaaaattaaatatctataaagtgaatgttcaacaacaatgatgagcaatagaaatctatatatgagaaacgtttggataatatttgcctcaaggattgtttacctaaaacagaactatggttatttatctcagattgtaagttttattttgaagtgtcatttttatggcaatattgataacacaaatgaccacaaactaaatcataaaataattgaatccttacactttgagaaaatggatagcttctgtgttatgataccaaacaaaatattttcatatttatttcttagaactatttccaaaatatttatatttcagtttttttatggtactcgaaaaatcaaaccttctgaaaattatgatatttgtacttcatttgtgtattagttcattttctgtttctattacatagtttttaaagtcaatgaaagagattgagaatgttaacatttgttgatcaatgtggagctgtccacattcggtatcttttcatttttatatatattttacagtttcaagaaaacttagtactactagtatctgccttattttcttaagtctgatgttaatttttgtttcaggagtgagatataaacattttgctttttttcagttttgaaatatagtttgtcatcctgtgaaaaccacctcgtttgctttttgtttgtttgttttgcttttttagtgtagacctaaaattatttttgcctataaacagtgaacttaatatgtttctgtgagagtgacagagctgtgcccgtttatcttcattgtattaattattacataaagattaacaaatacattgcaaatgcaaatt

SEQ ID NO: 7766 - DNA, 72 bp, Homo sapiens
aaaaaaaccatcagttaagtgccatttatcaactgaatagaccttctaagaagaatgcagtttggcctcttt

SEQ ID NO: 7767 - DNA, 1582 bp, Homo sapiens
caacttggaaatttgtactgaaatccacaataatcagtttttgctggatgggttttacagcagtatttgatatacctaacttgttatggaggttgattgatatctgatccctgcaaaatactttgacttgtcattttgttgatgatgcaaagcacgttggactgagaatacttaacattctttttctgtatttctttaaaccctgagaataatttacatgctcataatacaggatatcagcatatttgtgcaccttattaagccccatcttaagaaaacacaaagtctaagtctgctgttacaacttgtcaatggtatacgaatattaggagatgattctgagaaaggaaaggccttgttggcagtactcctgttaagccattagtctctaaattccagctttactgtgaagttctatagagtgttaaatacaaattttcctgtcttgcttcacacagttccttaaaatcagttttgaactttggtcatagagtcttcatatttcagtatttggtggtccctatgacttatacataactttgtaaaaagaaaaaaaaattttttctgatgctttgaatatagttttgaaaggagttttgacttttttcccctcattcatctcagtatagagtgcgctatttcacaatacgatttttgtcattaaaattaccatattctttattatataacgttaactattgagttgatctgtttaaaatataaatctcaagttaattaaaaataagcttttcaaaaatgtattatatttataacaaatatactgtaaatagaataaagacatgctattcactgtatagcgtattagtatctgttgattagaaagtctggtttcaaaatatttttttattcagagaatgggcatttggacataagaaatttcaattcagccctgctgcagatagagaaatgggagcaaggttgtttcaatgaatatctcttgtcattggagaaggagggaagacagggtgtaggagtgggtggcagggagtacaagagccagggtcagtcaagtctggagcagatggggtccttgtgccattgacagctaccatggtttgttccagtctcaatctcggcactaatcggagcagactgcaccaaagtggggagagatcaaaagaccccgttttcagactgaagattccaaacctgtacttggaacaactcttcttgagagatgggtggctagtctgtgtgcctctctgcaactgctgcttatgcttctggatcttaagtgggtctctggcttttcagctccttccactctgtgtcttagcaggtgtgggacaagttggagaggaaggtcacattctaaggacactcatttccttcttgagagtttagggccatgggcttataaaaagtctgaggaggaaagacaagaatgaggaggcataatcacagtggtatctcatatttaaaccactcagctgaatattaaattgaaccgattgttaaacagacactaataaaaaaattaaactatataaacctacaactgaatatattaaaaataaaggtaataaagcactcaaaattacttcctgaatattactcagga

SEQ ID NO: 7768 - DNA, 355 bp, Homo sapiens
ccaaataacccccggccagcatggaacaaaactgatcaatgcgtgtgctagaaggggtgggctgggacacaatttcatgtttttgcactaaaaaccttctctgtaaatagggataagagaaactcttactatgcagattacgtttttgaatggtgaacaggctattttgtacatcaataaaaatgctgtacagaacacttggaggtgtgccttgtacgtcactcaacaaacactcagcagctgctaaaagaaaaaaaggcatgtgcagagaaatcattcttacccaagtaggtttatgtgagaaggtatgatatttattacaaaatagccaaagctggaagacataaaaatcttt

SEQ ID NO: 7769 - DNA, 1986 bp, Homo sapiens
caccaggaaactctggaatgaacagtatcacattctaggaagcaatggcaggtgacatcactattataataggaacaatgcattctaatggtacaactgccaaaacccacccttggtttctgatgatttataagtaactacaaaagaaagagacctgttcttgaacagatactatgtctataactcagatcgcaccaaacttcctgtggtgacagactcttccatttcagactggttttaacttatcccagctttacaaaaactcttcatgtgaatcttaacttgcaaaaggagaaagataaaatacagaagactggccccagagagacctcagatcagtattgtgcattgtagtctacctgcatgtgatctatgttgacatttcggggatattgtgttcaagaatgattccaaatttgagccaccaaaatacactgcattacagaaattgccacttgattctgtactcttaacctttggctacttcacagactccattggcaacactgttattgaaaatcatgtaagattaaagagaggcattttcgtttctatacaacttcatttcatacaccttctgcccttacagcacctcatgggatcagaaaagagaaagatgttggctcttgtaataaatgctttctaccctataggttctaggctagacagagtcgtcatttctgtgtcctcaattttatctgaaagattaaaacaaaatatattatgtcactattcagttcatggaggtttgtgctttttcatattttgtgatatataagtagtgaacacacatgttatttacttcaaaagacaggattgacaaattcagtcaatactattttagagattctgttagatgatatgtctgacccaaatttaatccataataaaaaaaaatgggagattgttttcaggaattcagggatgaaaagaaagaataatttccattaagtagaattccagttgtctttctgtttctaaaacacagaacttacaagagccacaggagccaattatagcacctgacagaatacttctcctcttcctcaccttcgggtgcctctagacacttgacttacgatcgttattcccccaattcatcatattttgtttgttatcaccagagatgcctgaactcagttaagcgagcaattgctagttgtcttgaggagcatgaggaattcaggagcagaaggtcaggatagcatgagatagtctcaatgtggccaaccaaaaggacaaaactgacaggaatgcacattcgattttcaagccctccagagcttgaacaacaactttaggagtaaataaaagcctaaaatatattttaaccatccagagatggtgttgaatccttcaacaaatgtgtcattcaaaacagtaattagggaaatcccacagatgaaaaatgccttagtgataagctttcatggcagagcacgtcaagataaatgggtatactggaatccgatgccgtttctacagtaaagtgcaatcttcgttgtttttgtatttatttgtatgttcagatccaaaggatccgttgtaaaaatatatatatataaatatatgtatatccagtgcaatcaactgtcatttctttttccttaaaacatatgagtatatagaaagaaaagttacagtactctgtgggaaaatctcagctgacatcatgaatagaatgaggtctgcttcagaaccttttgttgtcaactgtcactgtttcttccaaaagtcacaatttgtacaagaacctttgctttccttagacttgttctgcattttattttttatttctcaccaaaataaaagcatttatgagaattataagtaaagctttctgtatttcagagagacataagttactagaaagtgaaaagtgaataaataagtcacagagaatgtaaattttgtacagtattagaatgtgtaaatgaagcttgcttggaaggggaaaactttaaataaaaactttatgtactaatt

SEQ ID NO: 7770 - DNA, 386 bp, Homo sapiens
gcaaacaaccaatgtatcttggatgctgaaataaaagacaagaaaagtcacacagttcagataacagtgtaattggacattcacctgtttgccatttcacacttccatgaacgaaaaactcactcacctcccagcatgctttgccactcttttactcacagcaaatccataacaatgaaacaggtgactttcatgctgctgtcaggaacgatctaatttcagctctgggtgactgattgcaattggctttgcctcatctgataattaatctatgtcaccattaattggaagagagaataattactggcggtgttgacagtgactgttcgcttccccagatttccctatcgtcttggcccaaataaaggctttgccattcagtactt

SEQ ID NO: 7771 - DNA, 1742 bp, Homo sapiens
gacagacgaccaccatattcactgaggtctaaatttgcagtttccactaatgacattttgatttcccaacagagatacttctggtcttactgcacagtcttttaagagaaatacttccattatgccacattgtccttgatccgtaagtgatgtgttaaggtgcttcaaaggaactctgacctctgaagtacttgagctactttagtatgtccagcctattgctttttgttttagtgtgtcaccataaatatcaggggcataaaaggctatctattcttaattcaaggataaaacagaagaagcttgtggtataaaacaatagttcaagatccagctgaaatattagtggaatttgctactgactcattggactgaaagctgaagtacctggcaaaaaaaaaaaaaagaaaaaaaaaagccaaatttcttgttgctacaggatataacaacaatgaaaaggatctcgtattttaaaaaaatatgtaatttttataaaaagaaaacttgtttttcattcaaacttgtcatttttactttggtaactttttcataggtcctaaaagaaaactgttttgagaaactactgtaagtaccttttccacatccctttgccttctcctctttccaaattctttctacaaaaataacacttgatgctggaaaaacccttgcctacgttctttcaatcgtcacatcaggaactacttccaagagaagcctgcatttctgctctcatgctgatctcaaaaaccccactcaacactgcaactttatcatagcagttttcatcccagaattttttttttaataatgacaagacatgttgttgaaaaaaaatcacaccttggtttcttagagctgctcgttcctgattgccgctgctgtctccaggcatccctctagcagcacctggatgtagatgactgaatgttaagaggttgcaagtgacaatctgaaaatttgcactcttgtgtgtagttttcttttcatttctttcagaaatagtttccaaaaagaccattacatctcctgatatgatttgtataattttcagttctagctaaaaataatgtaaggaactctcagcggatgcagctgcaacttacaatgaactgtgccctcctatcccccatactttacccttctttcttattttatagtgtgggatacacatgagtgatgttttctttgtgcactgagacaagcctattttttaaatatttagggagaagtactttagttcatgcttcttatacaacttttttctgttgtttagctttggttggattacaaattctttgtgcattcctgaatttgccttatttcatgtaaaatttatgtcattcagtttttgacaatgagtttgaggcatcagtgatatttcttatctacttgttacatatagtttttcaagtaatgactgtgattgtgaccgagtaatgtgcactttttcttgtaactgtggacattgctatgcttttttcttctagtgtttctagaattactgttccttacaattatgtaaacaaaaaacaaaaaaaaaacttttgtgatactgttggtgaatataatgtgaaaaatcttattgaaatatgagtattttggaaatacatagctgcacaaacatcttttaagatgtggatttagagtttgcttatttaaatgaaaattcaaaaattgagggctggtataattttctctgttttgtttggtttaataaacagatttctgtgttaaaagaa

SEQ ID NO: 7772 - DNA, 1237 bp, Homo sapiens
gaaattgaaaaaaaaaaaagaatcagcactcaggtctttttcttcagaaatgaagacaaaatttaaaatatgaaatgatgcagaatagttttttccctattgactgtcagaaaatccactgggaaatgtaaaaatcttcactcaccattatgatatttatcttgaaagaaatggtgtcatacctgcctagaaactgaaattttaaacttaattcaggtcttaatgcctaaattttccatgtgatgtttatagtctgtattacttctccaaataatgaactacctgattcattgtccctttcttgaaagtttcttttttaagacaaatacattatttctgcattgatcattgaaatgttctttatatggatacattcccttatatattaaaaggcaacaggaattacaaagtctgaaaaccattttaaaccatcttttaaaaatttacccttatttccttttacctaatttgaatatgcatttgagaaaataagaggataaaggatggctaagagcctcaaaatgaaccataagatctcagataagaagtgatggtgataaaacatcaaaaagtgaatggaacaccttgattggggaagatatgcaaatactttgatctaagaattgaaatgtatcaagaatttatattttgcctgcaggaaaattcaaaagctactcatcctctctataatttggagtcatcttactaatgaaaataatgttttcccatatattattaaaaagcatacagtctaaataataaacagttgtaaaataatgaaggtagaaattataacactagggaaaaatttgtagcggatggcagtgttgaaggcaaatgtaaacataagggtaatggtctgtcatggcttttagaaaaagatgatagagttcatcattattttgccttcatctttgttaaggacagaaaattccctgacaggtgggcaagtatcaggttacctattttttattcctttggtacaaaagggttgaacgtcaggctaaaaaagcagccatgcatttattattaaacattttctaccgacaaggcactgtgctaggtactgtaatcctaccataagtaggtaggtatttcttccactgtaaatcataggggtttgctgttttatgtgagttagcctcttccccttgtctgagcattcctcaggggaggtcacctgtgaggttcccagaactgtagttttttttaccagggtgttgtatttggaggggga

SEQ ID NO: 7773 - DNA, 1654 bp, Homo sapiens
ataaaggccttatcttatgaaagcacacaagagcctccatactattaatatcaagttaatttcccgtgttggaaaaaaataatctcctttgcaatgtaatttggaaataagtcaatggaaacatgaaaatgactgcttgtctacaaggagtcagctaaacataaggaatgttttcataacaatattaatctatgggtgcttctgtaagatggatgatcatcttaatataaagaaaaaagggagatgaacaaaattgtcaaacaagactgatgtaccacaagtgttgtcaagtacagtgtgtgtcggagagatgtaccacagcttaactggaagaggaagcccgtaactgctgatgacaatactttcagtgtccccttttctggcataaatcaactatgaatatgtttcaagcatcacaagacaaccttttcagagtcttctgtattcttagtaagatgagtttctagacacgctgtcatgaaatgagaccctggattttgatgctcttgtacatatggacaaatcactgaagttcaatttaaagggtccactgcagtcccttataaacaattgttgaacctaaccattatagtttataagttttaagacatttatgggatatcttatttggcttatctatgggatatgagtaactatgttttacctgcatttaattcagccagattccctgtttaaaattactgaatcgtacattattaaaattattctgacagtatacaaacaacaaaattatctattttccagagattcttgataaaactctgtaatgttactacaataatacatgtattgtgttttccatggtgctacagttacacaatatggaggcaaacatcagaaatcaaagtccttggaataagggaagagactcatagtaaacttctttgtctggttgggttcctcataaagtataaaacatttcattctcagaaaatccaaccatatcttagagtatctccagaaactggcttagaggagctccaaatatgtggaattaccacactctgcttagttagtatgctgataaatgtaagattagtaggaggagaagtgaatgtaaattttattatagaattttctgatagtgattatgatttgtagctctagtgaatatgaattttatattgagttgtgtgtatcttgagtcactaaaaatgtaggatactttttatttggggctcattgtctttgtaattacggagaggaacaaaccatctattgaaacaacaagtgcctcagagatgtatatattgtgaattactgcttaattacggaaagagtttcttaggttctatgtgaataagatggcagaatctaaatcaagtattttgaaggaagcacccatcttcacttggtgctgccatcaactttgtaagattgcattctatttattgtgaataatttgagtgtttccacaggaaagtggtatgaatcatatcgtctaagtatatgatgaatctttaaagggtgtctctgtgtactttgaattattttgcagttatgtaggtatcctaatgagtgaatggtactagtttatataaaaggagaattcattgagctaaccttggttttaaaaattagcattagcacccccattatattaattttcagggatagtaaatactccaaaatg

SEQ ID NO: 7774 - DNA, 284 bp, Homo sapiens
gccccagaaagggagatgaagtggaaagctgtttcaaaaacagactctggactcatgattttgtttcacggaaacaaactcgttctgctgtcaatctgaaaatgccagtgctgtgccttggaaagaatgtttggctttaatttaagggttttttttttttttagtgtgtgttttccctccaagtgtgatatttcctgctgaattaaattatacttcagttgttgcctcaagtaaaggtgtttgacaagaagatacaataaaaccatacttttcatttatcccaa

SEQ ID NO: 7775 - DNA, 3322 bp, Homo sapiens
tggaccagcctctttccaggtcccaggactttgcaagagatggagacaggttaggtggatagtcctgtagtgttatttttgtatattgttgagaaagaaacactaacaaaaggaacaacgagtaatttataaaattgtttaaaatgttggtttgtttactattttattggtaaattaacatgacttaatttgaacaaagtgatgatttgtgtgtattaataagctcacaaatagtgattattttcaaaagatctttttgtaaattttttttttgatccaaggccttgtgagaaatctcttgtttgtatttcttcaggtattttcaattgtttttctttattttcttcagcatttaatcactgtatactatgtaattcctgaaggggaagaactaattaggagttgattgagactttattatggtatagttaggacttgattgtagaagggactaaatgttccaacataatctttacccttctccccaaacaaaatatcaattctgtgtctctacatgcctttgattccttagaggtcggtaatttaacataaaacagggatgtcactttgaggggcagatgaaagtctagagaactgttccttaatagcattgtaaaagttccattccaactgccagtgtagattttaaaagtgttaaatagtgactcccttgattaaactgtttgtaattatttgagtagattaataatgaaaatactttggaaataatatacattttgacattctaccaagaggacaactttggttctggaactggtttctatttgtcaaatcagtttccttttaacataattaatccctttaacaaaaagccgtctatgggattaaaagacacgtgaaatgatacttttattattcccttgctcatataactttaaaaataatacttttagctctaatagctcaagaacacaatattcgttaatgttcagtaaagtagcctgagacattttcaatgtttccttaaggtttttgaatgactgtatatttggcagttaagcagtgccacactacagggtagatatggtaaattttatatttgtatatttacagttacaaaacaaatgtacttttaccttttatttctgaccctgtgtgttagagcagttgcatgctctcctgctgttaaaaacacattgttaagctgtggatttgtactcaataatgacttaggataaacatttattttcattcattgctttacatactagacatttttcttctctttgtaagtagattcaaattagatagtcaataaaacatcttgaaaatcccacaagccaattatgtctctctagtctgaatggcttcattgtttctttctcagtattagaaattatagttacaatgaattgcatatgaagaaggcagacatttatttttaatagccaagtagttctgcaaatagttcttttaacaatttgacctctctccaaaacagagacacatataagtagtgctcatccatgcactactaataatacatggcttattccaaagtttttagtcaacttttgggacttggggtgcattttctcacagaaagaatagtagttaggttccctaacactaccgctgatagctcacctgggaactgaatccacctaaccatgaatgtccttcacttgtaacgtggttcacaggttactaatcatagatcctgaccagcatttgtaacactgctctaactaggacacagcatgcagcagccacactcacaccctgggatgtctgtgtacctctgtccctaggtgtaggaaatggaagaaaaagattcagccaagtggggaggtgacagatgcacaattatgaaacctggttgtacatgttatgaaagtatactaagtaagttagtttttattattaatgtgaaagcaaaaacttgtatgttaacttattttcaatatcttgaccttatttatgatctgctaaagtggtgatttatccattcaaaatatatatttttttccatttaaaactaatttataaactatgtactcctgggaagatttgaaatcttttagaagtttgttgaaatattttcaccatttcagacagacttctgacttagatactgattttaatgccagtatctgctctaaatatttatgataaaaatgcattatttttttaaagagcttgatgagatttgtgataagtgatagtactcaaaaacctgaatcccacccctcgaccaatcctccacaaacttcagttgttggttaacgtattaactgaacacagacaatacagtctgatttagaagtcatcttttcagccgtgtgataattaacatggtaagccttagcagcaaacattcttcctaaaaggaagacttcattttctcaagaaatgggattagttgggggtattataataccaaattgtaaatcatgagcgttttctccactgtgcacctgaggcagatcatgcatctttgagtgcagtttggtctgacccctcaagagaaaagcatggtgccgtagggctgctatggtttgaatggatgccatcactcttttctccacatacagtgcagagagctgtctggagtcacaatctgaacagattctcgggcgctccttctctccttccatcactacagtaagtaaaaggaccatagaggggaaccaggaatctgagaatcagctgtgctcaatagccaacctccctgtccagatgcagctattttggtatctcctatcacatgcactctgaatcagggtttttctataagaaatctttcagaatcagcaaaagtggggatgacccaggcatcttgatttgcaaaatcacaaaactaagttgtcagttatcactgtagatgagcaactcatctttttaaagtatagttactgaactgattctgagaaatctttagagagaaaaaactcaacagtacaaattaactaattgggaaagttagaatgtcctttctgaatttttcattaaaaaaattacattatctgaaataacataaagctactaaactgctttgtattctattaagaaatagctcctaaggatgtagtcttgtttcatagttgttgcactatatcaaaacttaaaatgtaagcccagttcttctctgtatagaaaggaaacattgtgttacttaatgaattatttatacagagcatttgttgccaactgttgttccagccatccacacaggagtctgttctgaggtggcaatagcacatgggaagatgaactttccctgtttgtttacccgttcttctttggctgtatctgatgacagtataagatgttcttaataaagttttatgttctttttgaa

SEQ ID NO: 7776 - DNA, 1062 bp, Homo sapiens
ttaaggtttaaatgctagagtagcttaaaaagttgtcatagtttcagtaggtcatagggagatgagtttgtatgctgtactatgcagcgtttaaagttagtgggttttgtgatttttgtattgaatattgctgtctgttacaaagtcagttaaaggtacgttttaatatttaagttattctatcttggagataaaatctgtatgtgcaattcaccggtattaccagtttattatgtaaacaagagatttggcatgacatgttctgtatgtttcagggaaaaatgtctttaatgctttttcaagaactaacacagttattcctatactggattttaggtctctgaagaactgctggtgtttaggaataagaatgtgcatgaagcctaaaataccaagaaagcttatactgaatttaagcaaagaaataaaggagaaaagagaagaatctgagaattggggaggcatagattcttataaaaatcacaaaatttgttgtaaattagaggggagaaatttagaattaagtataaaaaggcagaattagtatagagtacattcattaaacatttttgtcaggattatttcccgtaaaaacgtagtgagcacttttcatatactaatttagttgtacatttaactttgtataatacagaaatctaaatatatttaatgaattcaagcaatatatcacttgaccaagaaattggaatttcaaaatgttcgtgcgggtatataccagatgagtacagtgagtagttttatgtatcaccagactgggttattgccaagttatatatcaccaaaagctgtatgactggatgttctggttacctggtttacaaaattatcagagtagtaaaactttgatatatatgaggatattaaaactacactaagtatcatttgattcgattcagaaagtactttgatatctctcagtgcttcagtgctatcattgtgagcaattgtcttttatatacggtactgtagccatactaggcctgtctgtggcattctctagatgtttcttttttacacaataaattccttatatcagcttga

SEQ ID NO: 7777 - DNA, 733 bp, Homo sapiens
gcacccctccctccaactccctaccagctccagagtggtggtttccatgcacagatggccctaggggtgacctccagttttgcgtgtggaccgtaggcctctttctagttgaatgaccaaaattgtaaggcttttagtcccaccgacattagccaggctcgtagtgaggcctccagagcaggttgtgctgtcccctgcctctggaagcaatggggaatttggaatcttgtgtaagtgcccaaataagtctgagtgctttcctcttcttcaacactcaaccctcaatcccttagcactgattgattagagaggtcccccaaagaaaccactggttttgacccatgaagcattagaactgcattgttcattcaggagccactagtcacatatgactatttaaatttaaagtaaattgtatgaaaaattcatttcttcaattgcattagccacattttgagtattcatgtggctggtagattctgtattagcacaaagatatggaacatttccatcaccacagaaagttctgttggacagcactgcattagaatattttcatactgctcttcctcaattaatttttgttgttaatgttgatgtcttcattggatgggtcataatgttccatgaaacctctcaagtacacaattgtatgttctttgtatcccttaccacaaatatctcgctctgctcatttcttttgcagcttcctataaagtttgtcttcctcatc

SEQ ID NO: 7778 - DNA, 1331 bp, Homo sapiens
ggcaggatgctgaacgggctacattaaaaaacaaacctctctctatatatatttataaatgagaactgttggatgacacctttgacatatcagccaatatcaatcaagctgaagactccagacactgtctgtgtgactgtaacatttcttcaaggaaagtatagcgtctatggagttcagagggcacgtgtttgggggaaaatatatatgacatgaagaagaagatgaagaaaaatgagaaaaaaacacacaaaaggcaactttaaaacaaaatatcacgagcagacggggaggctgaagggctgggagctgggaggagacgctgcttaccgatcccggggcttttccagcccacgggcgcctgacgcaggctggggcaagtggtgcgtggggcctggtccccaaggggcggctgagaggccgccactgagcatctctatctgtcattcctttagctatttagggaccaaaggaccaaactttttattgcagatgtgtagctctatgtcaaatagagggggaatggaggaccccctccttcctgcctcatggctgttcttgaaacagcttagagcgattctatgaaaaaatgtaataaaaaattaaaaaaaaaacaaaaaacaaaaaaaacaacaaaaaaaggaaaaataacgcttcaatgcttttaaaacagcaagataatagttctttgatactttgagaggcgctttgatgaccctcatccaagtctatgacactttcctatggttttctgtattctatgtctggatggagctgttaaaagatgaacaaattggtggatatttggggaaagcaacacaaatcttaaaactcacccgtgaagtgtgagaaaacaaggaggggaacaaatgggacttaccaagcaaggtcattgttgtgaaaagtctgtaaatgcttctaactcttccccctcttaaaatcataatagttgtacagaattttaaaaaggaaaagtttaaaatacctatataatagaagaaaaattagaggaaagcaaaaaataaaaaaaaaaaataaaaaaggaaaaaaaaaacctatagaagttagcattactgctaaaatcccagatgttgtaggactgtacttttgtagagtttagacagagcatcaatcccttctccccgcgagtgcagtcggatgccgttgtccccaagggccaggccgaactcgccccacacctgcgggcgcctggctgccgacgccggtggaggccacgccgtcggtcgggaacggtcgcgtcgcccgggtcgccgccgccgccgccgccgtcatcctcgcctctcgcttccctctgggagctgcgcgcgctt

SEQ ID NO: 7779 - DNA, 266 bp, Homo sapiens
tatctttgcttttgagttcctcacgctctctgaattttattagttggacaattccatatgtagcattctgcttcaatattatctctctatgtgtctctctctctttaaatatctgcctgtaggtaaaagcaagctctgcatatctgtacctcttgagatagttttgttttgcctttaacagttggatggattttgtcaatcagctggatatgctgtttagtttttacaacatagtactaaataaaattgacattccaattgcctca

SEQ ID NO: 7780 - DNA, 2449 bp, Homo sapiens
catcctagccgtgagttggaacttaaaggtttttactaggcaaggagaaattttctttctttctatattggattgcaagcttgggaaatcaagctacctttttgttgttgttgttgttgctagaaatggattgaattagtagaccagaaagtaacttcaaatgtgtattatgataatttccctatttattagaagagttggataaattttcataagatattcaatatctccttcagattaccagtgatataactaggaatagtcagacattttatgaatactgtgccagaatcccaaattataaatgtgacaatctcattggaacatgtcacaaaaagttaatgtgattaagatttaaaaacgaaaagtatgccttgccttgtgaaaatttatccatttatcttcaggttggggaaatcaatttttctttaaatccaaagatactaaaaaaatgtcctccagtttgtatttattaattctgtcatgtgcaaatggttgtcctgcatataaaagtatctggtcatttcagtttggtttgtaattatttgatgcaattttatcataagagtaactcagattcatttcaaaaggacagtgaacaagctgagaaattattttatcaaagggctgagttgagaacactgtggctgaaatataatttttctcccccctaaggttacatgtgagtcaaaattttgtaaaatataacctcacataagaaccatggccttggattattcactgcctgtcacaagcctcagtgtggcctgagaaatccctatgtacctttgtgaaattgttgaattagttagtgaataaagaaataaacttcaactagaaatccagttagaagtgcaattttcttataggaaataggtatagtgtgcaagtgtacttttaaggccatcgtttgtacccagagtcggcatggccacctaagtcttcatttaatttattgtcccccagaaaagattaagatgctacttgaaaagactgtgaagattttttacattgccagataaaaagtgttacttaaccaacaaacaaatgtaagactacaaaatcgttcaagagcaattctaatataatttacatatgttcacgcaaaatatgcttaggctgtcaaattagcacaacaaagaatgtgtttcactatcttttctaggctaatttgtcttgagctgttgtctatagagcagtttacagacttgtgtcttgtatcattttccagtgccagggttctgaaattcattcagaacctgttagattaaagctgcaccctgtgattatttgaaaagaattagcttgagagtaatgtcactatatttgagttcttagagaagtatgagtggaacttgagtacagttgaattattaaatatgcaagttagaaattaagtctactgaaaaatttacattttgagtcaggttttgtgtcagtactttagcagtttttgagaatgtgtttgatatcacagtgtttgtaaattctatgaaaaatgcattttccaaacaacttatacatgctttttatgactatgcctaatgtaaagaaaatgtattacattctgtatgtacaaagattaaaaatcaacctcttttttgtgctttaaaatgactttgggattaaaaaagcatatttcccaatcattgtcttcattccactacaaagtcacctcacagcatcttgctccactcggcatctctgtgaaagcaacatgaaatgaactgtagtaggtgtgtagtttggggaagtcaaatggccattttatgtatgtgcatttggtatcatgggccgtggaacagaatatatgttggacctctgaaaagttgtaaggggccaattctaagtattcttcacggcagccagaagttaatggtggtagcagctgaggtatggttgttggacgaggccgatttttttttttttaacatggaacaatgaaaccaacaacaaacatttttaaaattaaaatggataatttgtaaatagtttttagcttttaaaatttaaagtgtttttgagtgtgaaaagttgagtaaaactatttgcaactggttttcagaaaagagaaaagaaacaacaaaggaattgaaacaggcagggagatcttaatacctaatttcatcatttctgaaaatgtactgttttagaatgtattacaatatcaatgtgaatatcttgaatcctgttacaaatcctgcactgtattaaacatgtaaattaattgtttgtctgattagccaatctcaccacccaaatggggaggtatacatgtttgaagaactgtgtaactcagtaattgatttgttctgatgttgtaactcaatagaagtgttttggaaggaagcatggtgtgtgagacagtgtctgttcttttgtgccagctctgtatgatgtttgtaagaccatgtttgtaagacatgaataaattgctgcttttgcccaa

SEQ ID NO: 7781 - DNA, 138 bp, Homo sapiens
actcctgtggattcacatcaaataccagttcagttttgtcattgttctagtaaattagttccatttgtaaaagggttactctcatactccttatgtacagaaatcacatgaaaaataaaggttccataatgcatagtt

SEQ ID NO: 7782 - DNA, 4857 bp, Homo sapiens
ttaacactgaggctcttgaaaaacccattgctgtttatgtttacatttaactttgctgttgcacaagtaactttgctcaattgcactgtagagctcagtttggccaatgtgtagttgactgagatgcaagttgggaggcgttagatattagataattttggggtgtgtgtgtgtgtgtgtgtgtgttttcttagctcttaagaccttctggggactctttaagtttttatatttatccacaagagaaacttactaagttccacttgggtgcagagccactcacagttgccgaatgtcccagtcatctcacaagacctccagatggagttctttgtatgtttccacttctgtctctgttttatgtaaatgttccagatctgacaaccttggaagtcactcagtacccttacttttaaaccccatttgtgttcctccaaagtaaagaagtcaattttgaaaaatttctgcatttctcaaatgtggacaaatacaatagttttaaagtattgtttttctcagaagggagataaaaatgccgagttagttaaagtgggtcatgtgtaaaatacgaccacttgatcgtgattatagtgggcagtagagatgatgacaagtcaatttccatccagccgtgtatcctcatggagaagctgcctgtctgaatcaggatggcaagctggcagtctgggaggagcatgttttgcacagatgttttgtttggtccacttggtgaggagtgcagacagggctgcctctctctagtcgggagagtctgtgcattccctcgggccctgaccctagcctcattcacatcacttgcccctgtcgacacctaagtttgcaccctttgatagacaccatgttcgatatctgaaaggctcagtgtcaggagacagagactgagggagactgaagacctgattctctgttccctgcttgttttttaacttcaaactcagatgaagccaatggacctgctgaaacacttgtctgtggaaactgggtcaggtcgggagatctactgaaatttggctttttttccatagccacgtgccttctgttgttgacagttcattcattaccaaagcctgtgtgtaactttgccttgttctgtggccatcttcttgctcatgttatttctcctgggaatgagcagtttgacttctgttcccacgttcctcattctatcagctctagatggattttgcctgcatagctggcttaatatgtctttgtgtatgggtagtctgtagcctgagaatatttacctaaaaatgtctaaacagccaccaagaatgtttataggggtataggaatatagttaacagagtgctaatctctcctcaaatgtccttttggaatgcttcccccaaaattgggaagttggtaggagcttttctttactttgaatttctttacttggacagaacgattctgccttaaagacacgctttgcagctctgataaagaacatccctgtttagtctcttgagttttacaggccacaaaatgtccgtctcagagggatctgtctcagcttttcttatttttgcttctctccgttttcaaaattaatcatcttgttctctgtataagaaaatttgagaagctgtggacaatttaatagtctgatctggcaacagcgatttttgtttggaaatattttgtgttttctttgaggaggatataattactgatatcctaggatgtgaaatttttgagtgacagtatgcacattttaaagaaaattatgattaatctgtataatgttttttggtctgtaaaaattataaaaaataaaatcatttatctttggttgtaactgtttaaaaaccaaattatagggatatcacactatcttgtaaagtgtttcagctgttaaagttgctgtaggtttttatgcctgatgtcatttaatttatttgacattgaacttcattaataatcagagatggtcagtgaaagcgcttcctctttaactctttcttgcttaaccttggaaggttgactcaactcctaggtgtctatgggaaactctgggctaggaacgtgctataaagacactgagctagttcagacatggccatgctgctgtagcctcctgggaaagaagggcggcagagagaccagcccgcctgttggcttgcaggggtaatgagccttggcttgaaaaaattgttggcctccagagagcacggggctgtggtttcagaatcagtgatgggtgccgcacatcaagacgggaatcaagcaagaccaaggccctgtggactgagcagcgtggagggcgaacggctgcaggctccagacttcaccacagggtggccaacagtggcatcgggaccaaataaagatgtctaacagcttcctgggagcaggaggaggcaggattctggttgccatgaaaaacatctctctccctctccatcactccccatgctgcagtgcacaggtgggttgcagaggcaggctgcatcccggaatcatgttgtcccactgcctattaatagaacaagtgaagggcagaatgctggaacacaccagacatagagggagggaggtcctgccagatgtgtctacacaactgtctacatagcatgacagtagcagtggattcgggacccacctgtacatgtttccaaagctccttcctgcacactcgggacctcagctccaaggcgtgactcatttctcagtctcaccatcctttgttggctcagacatcgcatgcctctgccccactggggttgtgtgcctgcgtctctcacttctttgaggttggggaaagcctagtccagaaaatgaaaacccatagaccagcctaacttcctttcaaccaagtgacggcctcctggttcctctcagttcatcatcaaaatcagtgtgtacatgtcatacaagccaagagtgttcatgtcctcgttcctttcaaatgaaggtgatatatactttttcactgagtttttattcctgaaattctttcttctggagcaggaagcaaatgtcctggaatcgtagacttttacagtcagaagggtcattcacgttcatctagtgcccctctcactctgcagggatcctcctgcctctcctctgcccctgtccagtgcctggtggtccagcctgtgatgggcaggcctaggctgccatccgcaggctctgtagttctgctttctattgaaccaagatgtttctacgttgcctattggtcgtggttctgtccagagcagttcaggctggggctgttcacttgcccctccttgaggcagacctttagatattttcagttttcatcacatgtctaacaccacttccaccccacccctcacctcttaggctaaatccaagctaaatcccccaatgtcttttttttttttttttttttgagacgagtctcatctgtcacccaggctggagtgcaatggcatggtctcggctcactgcaacctccgcctcctgggttcaagctattctgcctcagcctcccaaggagccaggactacaggtgcatgccaccacgcccggctaatttttgtattttttagtagagacagggtttcacccagccattgagacaagctggtttcaaactcctgaccttgtggtccgcccgccccggcctcccagagtgctgggattacaggcgtgagccaccgcgcccatctcccctgcaatgtctttagttagaccttttccaccatcatgtctaactgggctacggtttggggaaagtgtccaaattagtccgtgttatcctaaaaggggtgtgccccggattagcagggccagggctagggtgagacaaatgaggcacctggggcatacatttaagttggtgcttgcttgcaggtgccaagagagtgcttccttgggtttacccccgtggtgcctcctttacctcattctggccccagccctggggttagagtcgcaccagtgtggtccaagtggcataattatctccctaaatgcttgggcagcatcagctttcagtagctgtgccccatgggaggcacattaagctagtggcaagttgagactgcagacctcagcttaatatcagttgttgcccaagacagatctcaccccacatcttcatgacaggcctaacaacaaggcactttgcccttaatcctctactactgcctgctcttcattttgggccaactgtacagctcattttgagatagtagctgatcatttttctgatcagttaactttgtcttattaagcaaaatggagaatataatgttgggaaataagtgtgttgattaaaagaaagtatccccttctaccatcttccatttgtgtctgggttgtgctgggtaaagttctagacttactaacgcagacttcattttggtccggtttccacagcatgcctcgggcatcagtgtccaggagtagctgtatttgaggtttccttcactctggtaggttcctgattcctgatgaaaataacttgaaaaaaaaataattatactactgatcctcttttgggataatgaaattgcgaaggaatgttgttgattataacttttattttttaatgtacagatgtactgtctctcattgagcactgatagaatttatttttctttcaatagtttaaaatcacttatgtggagacacatacttaagtgtgttcaactcgttttcttcccacatatctagtgtgacctttaaaaaccacaactttattttggacattaaatgtgcaatattcactacttattcattgttccacatttttcatacttgtacaaagggtaagtttttatataatggtgagaaacaggaagaaatgacaactggttaagtaaaattctgcaaataaactagattcgaatttaattt

SEQ ID NO: 7783 - DNA, 1891 bp, Homo sapiens
tgcttctgtgatatggaaagggcacccagagcagcaggacctatagccacgttatgtcagcaatgaagactttgaagtgaacccttgctataattttttagagatttaaaatttatggtagacatttaggacaacataagcaagtagagttctgcagttttttgaagtttacaaattgccccattctgaagaattattctttcccagttactcaggttatgaatgaattaggttttcaacatgggaagcatgaaatccacttctggatttggagcatccacttgaggagcagaggtggcagcagaggattctgagccaccaactgcagtagtggctcctttggctttgggcagcctggctgtggagtttccacggcgacacacagcctcagtggtgcaagatttaaaattaccttcctttttggctggaagacttagaagccgcctgatcatactttctcattttacagatgaggaaataaagcctacaagtgtgaaattaatttccttacagttttcctagctgatgagggacagaaccagaactagagcctgagcccaacccacatcactattcttctaacccttcctgaagttgtgatgctcatgctgaaatttaagatgccaaatatttttgccagcactttttcagttgggagaatcaccagggtttaaatgtcagatttatttttatgtggatccctgtgtatgctgaactacagagcatgatgtttaatctaatttaaggagccactgattgtaaaacatgccattattttatgttgcactaagaaggtggggtcgaggagttgccaataaacttgggacagactattgatggccaagcccatctgaatttaagatgctaaagtatgaaaaaaatacatcttagaatcaatgaaataccatattttgattccattcctcaagataattttagagttataaaaccagtcctcaattttgggtcttcacagagaatctttcccttgctagaccccagaattttaaatgcatccgtcttacactttcacaaatatttgggttttcctttttcactcacaaacagcagggaggtcatgtactttttgtacaacacctgtgcactatgagaaaatggtaccttttagttattgacaagttaaaatagcactctcagtttttcagtattacagagagcaaatagtttcctctcctgctctgtgcagtagcttttccagaactatggacaaattgatcagaagaagattgattatttcctcatctttttttcttttttttgagacagagtctctctctgtcccccaggctgaagtgcagcggcatgatctcagctcactgcaacctctgcctcccgggttcaagtgattctcctgcctcagcctcctgagtagctgggattacaggcacccaccaccacacctggctaattttttgtatttttagtaaagacagggttttaccatgttggtcaggctggtctcaaactcctgacctcaggtgatccacctgcctcggcctcccaaagtgctgggattacaggcgtgagccactgcgcccggcctatttccccacctttcgtgtaaggtgctactgaacatgacagcttcttgtcatgacaggaaacttgcatcagttggatatccttttgagaaactgaattttgcaaagggccaaatttccccaaactgaacgggctcaggaaatgttcctttacactcagaacattctattttaagtatattatttattgttggcagttcctcagggatttcccttttctctgtattggtcagtgtagttgatgtaaaaccgttttgtggatggaaaatatttttattttattgctcttttagtttggtaggttaaataaaggttcttggtaatttggg

SEQ ID NO: 7784 - DNA, 26 bp, Homo sapiens
aggatcattacatgaacccagcccat

SEQ ID NO: 7785 - DNA, 924 bp, Homo sapiens
tggctgccagccaggctgcccggcaagcggcgccccctctcctgctgtccctcctggtggaactgggagccccgaaccgggcagcgtggggtcctggcgttcaggctgtctctccctccattgttcagctctgtacttggatcctggggtagggaggcagggttaggaaccggggcagagtcagctctgtgctgagcctcctggcctggcccccaccggtgcatccgcccagtgcgtccacctgccctggctagcatgctgctgggccacaccccaagatcaggggccctggggacggcaagtgaataaagcacatttccacccaattttgtcatccgagagagagcacaaactgcaggcccttgttgcagctgaaggaagaccctacagagaatggaattgagagtggagacaggacacttcacaggacacttgagcacagtcaagattttattcacacttttggttcctgtgttttatatcgaagacttagctatgaattgctatctaaatctcagagcttagaagccaacccagtgactagaccttccagtgaagaaagtgatctcaagaggtccagggacttaacagccaagccacaccacccgacaggttcttctgtgacaccgagagatctaacccaaggcctgggttatgtcttagtcgagacatcatcatctgagaagcaccacatcctttcagacacatcctcggacacacatgcggtcttggtgcccccaggttcaatcctgcgttagctcttttgatgagaaggaaataaaccaaaccagccacttgcactatggcttccaagccaatgttattgactcaataagtgcttagcaattggcttcctcttttgtcttcctattttcagctccatttaaaccaggagttatttataaagacctcttcctctcatgt

SEQ ID NO: 7786 - DNA, 335 bp, Homo sapiens
aggaggactcacttgattctgggaatcattcatcagaactgctttttcttggatctctagtctgtggaaacgttcttttttttttttttttaataatttggtatttattgaaagtcagatggattcttttgctttctgaggggtgaacacagaagactgcaacaagaaccaaatgacatgcaaggatttttcttaattatgctgtactctcagcatcagatacattcaaccataactgtatcttcctgagagatggatttcactttcatacgttaatggatggagtctacaaatcagtgaaaaaagtttttgttaaaataaagagcaataaaatt

SEQ ID NO: 7787 - DNA, 25 bp, Homo sapiens
atacaaaataaaacaaataatttgt

SEQ ID NO: 7788 - DNA, 431 bp, Homo sapiens
actcaggacttgccttgcagataaaatctggggggatttttgcattggcaaagtcaatgcgggttggggaacgaaacttccaatggacaccagaacctttaacttggtgcaaagttgagcctttgaattctgcaggtgtcatgtgctggccctgtgattttgcctcccacacccagccactacctcccagcttggagaacacctcagaattcagaagatatgaacgcattgggaacaattctattttggatgttcactgataatttttaaaaacaccctagttgtaatcataaataaggaaaaagatgtgagatttcctttttcctttcttttttttttcgaaatcaagtagataagaacttcttagacaaaaacacacaagccattagttgacactgataactccgaatacataaaatgtttgctgttgc

SEQ ID NO: 7789 - DNA, 1271 bp, Homo sapiens
agcagtgtgtgcatctgaagcaacttgaaatgcagcttcttattgtctggaatgaatcccttaccaactcagtgccagcatcggtagacaccagtcagtgctgatcgctttttaaccctcttttgttgtgcattaattagaaagaaaggtattgaattgcggctagccagtaagccttgctaatctcttttattttgtaactgaagatgagacccaaagaaagggaaagctgagattttgtgccattccttttaaaatattcatcaggttaggtggggctgtgggggaaaagctactacagggaagagtgttctctgctgtctcttcactggaaaacagggaggggggatttcagactgtgaagaaagttgaatggtggtttttaaattataaagtaatgtattaaaaggtgcattaggctgtagttctaatattgagttcaactgtgaaatccatcagatgtgccaaatggagaagacagaaagcaacaaagtgaattgttctttagcccaagtggtacagtgaatttgctttaacagatgttgaaaactaaattttctactgtattcccagcacgggtgacttctttttctcttcattagccagagatgactaatttaaatttagaaccagattttaatttaaattaatatttccattaataacctattcattgcagatacctattatactgtgtaacagttgttttggaaattttatgtaaaattaaaactatcagtattttacagatgttttaattagacattgttattaacaggaacagtgcagaaactagaatcaagccttataatatcttatagaccatgcatttttgaagttagtgtccactagggtcctattaactgtacatttgcaagatttcattatttttgcctctgacactatgggaaaaattttttagaagctattgggacagattcaagcttttatgcacttggttactacagctgtaaaatgaaatctcgtcttgtagcatggattattcttctcatgttaaacccaccaaaataaaggggactaaataggtaatgattttcctagtgcatttgcatactgtgataatcctgggccttgcaatagttctacagggctcttgggcattgaattattaggatgtaattgtacatcattgtagtgttcaccttattgaagctcactctgatgttaatgagcttcgggttttgatgcttgtttagagatcagcagtcttggatgggagggaacaaagctaaataaatgttagtttggtg

SEQ ID NO: 7790 - DNA, 1133 bp, Homo sapiens
atatcagtggagaaaatggagactcagaagaggacatgccagtagaagttattactttggtcattattggaatatttatatcttagctggctgaccttgcacttgtcaaaaatgtaaagctgaaaataaaaccagggtttctatttatctgtttttttttttaatgttgcacttgtagtttcattacaaaagatcagatcatgaaaggcagtaactctccaggactggaatatctgattgctcagtgttaatagtagttcatgctgtggtgagattgttaaaagggtgcaagactgttgcttctctttttttagatatttttctatctctcacttctcagggatgaaattctttttcaaagttttgaagttccttgcaacttagccatgatgtgagtggttatccctagataaaattaaaaggatttttaaaaagtaattactgcacataaaatgataaataggtaatttgaataattttattttaagctccttggttaattattttgtctattgtctcagctataaattcaaatttatacatactattgagtattaatattctctgatttcagggagaattctgtcagtcacatgatgattatgtttttgtttaacattctttccatgcacttgttattttattaatttgcctgaatgatgagaccagaccagtgtctacagattttcattgtcagaaaaatctataagtctgccctttttacaatgatgatttaaaaaaaacaacagcgtaaatattagcccacaagagcagtcctaaacaatcacaattacactgtactacccaagaagactgtttattgtgaagcatttacctttcaaaaaatcattacatttctatttcttggtggagcagcacattgtggagtgtgattcttaattcttcattgagtttgtcaataggacattgatgctggataggttgtcttttgtttttatgtctcagaccatcttgtgagattgtttgcctatctcataatacagttttatgcagaaaggttgaaactatgtaaatggtttttatggaaattatcagttacaatattttaaaggtgtagaatggcatctttgtttataggagaacatttgtaaataaagttaaatttctaagtc

SEQ ID NO: 7791 - DNA, 8731 bp, Homo sapiens
agcttcaccaatcaagtcccatgaaaagacttaatgtaacaactcttctgtcatagcattgtgtgtggtccctatggactgtttactatccaaaagttcaagagagaaaacagcacttgaggtctcatcaattaaagcaccttgtggaatctgtttcctatatttgaatattagatgggaaaattagtgtctagaaatactctcccattaaagaggaagagaagattttaaagacttaatgatgtcttattgggcataaaactgagtgtcccaaaggtttattaataacagtagtagttatgtgtacaggtaatgtatcatgatccagtatcacagtattgtgctgtttatatacatttttagtttgcatagatgaggtgtgtgtgtgcgctgcttcttgatctaggcaaacctttataaagttgcagtacctaatctgttattcccacttctctgttatttttgtgtgtcttttttaatatataatatatatcaagattttcaaattatttagaagcagattttcctgtagaaaaactaatttttctgccttttaccaaaaataaactcttgggggaagaaaagtggattaacttttgaaatccttgaccttaatgtgttcagtggggcttaaacagtcattctttttgtggttttttgtttttttttgtttttttttttaactgctaaatcttattataaggaaaccatactgaaaacctttccaagcctcttttttccattcccatttttgtcctcataatcaaaacagcataacatgacatcatcaccagtaatagttgcattgatactgctggcaccagttaattctgggatacagtaagaattcatatggagaaagtccctttgtcttatgcccaaatttcaacaggaataattggcttgtataatctagcagtctgttgatttatccttccacctcataaaaaatgcataggtggcagtataattattttcagggatatgctagaattacttccacatatttatccctttttaaaaaagctaatctataaataccgtttttccaaaggtattttacaatatttcaacagcagaccttctgctcttcgagtagtttgatttggtttagtaaccagattgcattatgaaatgggccttttgtaaatgtaattgtttctgcaaaatacctagaaaagtgatgctgaggtaggatcagcagatatgggccatctgtttttaaagtatgttgtattcagtttataaattgattgttattctacacataattatgaattcagaattttaaaaattgggggaaaagccatttatttagcaagttttttagcttataagttacctgcagtctgagctgttcttaactgatcctggttttgtgattgacaatatttcatgctctgtagtgagaggagatttccgaaactctgttgctagttcattctgcagcaaataattattatgtctgatgttgactcattgcagtttaaacatttcttcttgtttgcatcttagtagaaatggaaaataaccactcctggtcgtcttttcataaattttcatatttttgaagctgtctttggtacttgttctttgaaatcatatccacctgtctctataggtatcattttcaatactttcaacatttggtggttttctattgggtactccccattttcctatatttgtgtgtatatgtatgtgttcatgtaaatttggtatagtaattttttattcattcaacaaatatttattgttcacctgtttgtaccaggaacttttcttagtctttgggtaaaggtgaacaagacaactacagttcctgcctttgctgagacagcagttacactaacccttaattatcttacttgtctatgaaggagataaacagggtactgtactggagaataacagatgggatgcttcaggtaggacatcaaggaaagcctctaaggaaaggatgcatgagctaacacctgacattaaagaagcaagccaagtgaggagccaggggagataagcattcctggcaaagagaatagcatcaaatgcaaaaaggttcacactaaaggaaactcctgattaggtattaatgctttatacagaaacctctatacaaatccaaacttgaagatcagaatggttctacagttcataacattttgaaggtggccttattttgtgatagtctgcttcatgtgattctcactaacatatctccttcctcaacctttgctgtaaaaatttcatttgcaccacatcagtactacttaatttaacaagcttttgttgtgtaagctctcactgttttagtgccctgctgcttgcttccagactttgtgctgtccagtaattatgtcttccactacccatcttgtgagcagagtaaatgtcctaggtaataccactatcaggcctgtaggagatactcagtggagcctctgcccttctttttcttacttgagaacttgtaatggtgttagggaacagttgtaggggcagaaaacaactctgaaagtggtagaaggtcctgatcttggtggttactcttgcattactgtgttaggtcaagcagtgcctactatgctgtttcagtagtggagcgcatctctacagttctgatgcgatttttctgtacagtatgaaattgggactcaactctttgaaaacacctattgagcagttatacctgttgagcagtttacttcctggttgtaattacatttgtgtgaatgtgtttgatgctttttaacgagatgatgttttttgtattttatctactgtggcctgattttttttttgttttctgcccctccccccatttataggtgtggttttcatttttctaagtgatagaatcccctctttgttgaatttttgtctttatttaaattagcaacattacttaggatttattcttcacaatactgttaattttctaggaatgatgacctgagaaccgaatggccatgctttctatcacatttctaagatgagtaatattttttccagtaggttccacagagacaccttgggggctggcttaggggaggctgttggagttctcactgacttagtggcatatttattctgtactgaagaactgcatggggtttcttttggaaagagtttcattgctttaaaaagaagctcagaaagtctttataaccactggtcaacgattagaaaaatataactggatttaggcctaccttctggaataccgctgattgtgctctttttatcctactttaaagaagctttcatgattagatttgagctatatcagttataccgattataccttataatacacattcagttagtaaacatttattgatgcctgttgtttgcccagccactgtgatggatattgaataataaaaagatgactaggacggggccctgacccttgagctgtgcttggtcttgtagaggttgtgttttttttcctcaggacctgtcactttggcagaaggaaatctgcctaatttttcttgaaagctaaattttctttgtaagtttttacaaattgtttaatacctagttgtattttttaccttaagccacattgagttttgcttgatttgtctgtcttttaaacactgtcaaatgctttcccttttgttaaaattattttaatttcactttttttgtgcccttgtcaatttaagactaagactttgaaggtaaaacaaacaaacaaacatcagtcttagtctcttgctagttgaaatcaaataaaagaaaatatatacccagttggtttctctacctcttaaaagcttcccatatatacctttaagatccttctcttttttctttaactactaaataggttcagcatttattcagtgttagataccctcttcgtctgagggtggcgtaggtttatgttgggatataaagtaacacaagacaatcttcactgtacataaaatatgtcttcatgtacagtctttactttaaaagctgaacattccaatttgcgccttccctcccaagcccctgcccaccaagtatctctttagatatctagtctgtggacatgaacaatgaatacttttttcttactctgatcgaaggcattgatacttagacatatcaaacatttcttcctttcatatgctttactttgctaaatctattatattcattgcctgaattttattcttcctttctacctgacaacacacatccaggtggtacttgctggttatcctctttcttgttagccttgttttttgttttttttttttttttttgagagggagtctcgctctgttgcccaacctggagtgcagtggtgcgatcttggttcactgcaagctccgcctcccgggttcacgccatgcttctgcctcagcctcccaagtagctgggactacaggcgcccaccaccacactcggctaattttttgtatttttagtagagacggggtttcaccgtgttggccaggatggtctcgatctcctgacctcgtgatctgtccacctcggcttcccaaagtgctgggattacaggcatgagccaccgcgcccagcctagccatatttttatctgcatatatcagaatgtttctctcctttgaacttattaacaaaaaaggaacatgcttttcatacctagagtcctaatttcttcatcatgaaggttgctattcaaattgatcaatcattttaattttacaaatggctcaaaaattctgttcagtaaatgtctttgtgactggcaaatggcataaattatgtttaagattatgaacttttctgacagttgcagccaatgttttccctacgataccagatttccatcttggggcatattggattgttgtatttaagacagtcagaataatgatagtgtgtggtctccagaggtagtcagaatcctgctattgagttctttttatatcttccttttcaattttttattaccattttgtttgtttagactacactttgtagggattgaggggcaaattatctcttggagtggaattcctgtgttttgagccttacaaccaggaaatatgagctatactagatagcctcatgatagcatttacgataagaacttatctcgtgtgttcatgtaattttttgagtaggaactgttttatcttgaatattgtagctaactatatatagcagaactgcctcagtctttttaagaaggaaataaataatatatgtgtatgaatttatatatacatatacactcatagacaaacttaacagttggggtcattctaacagttaaaacaattgttccattgtttaaatctcagatcctggtaaaatgttcttaatttgtctgtgtacattttcctttcatggacagaccattggagtacattaattttcttaatctgccatttggcagttcatttaatataccattttttggcaacttggtaactaagaatcacagccaaaatttgttaacatcaaagaaagctctgccatataccccgttactaaattattatacatccagcagattctgggatgtactaacttagggttaactttgttgttgttgataatactagattgctccctctttaattcttcttctggtgcaaggttgctgcttaagttaccctgggaaatactactacaaggtcaaattttctagtatcttacagcctgattgaaggtgattcagatctttgctcaatataaatggattttccaagattctctgggccatccttgacccacaggtgatctcgctggagtatattaacttaacttcagtgccagttggtttggtgccatgagatccataatgaatccagaacttcaccattgcttagatataagagtcccttggaagaataatgccactgatgatgggggtcagaaggtgtattaactcaacatagagggcttttagatttttcttcaaaaaaatttcgagaaaagtattcttttaccctccaaacagttaacagctcttagtttctccaaatatgctctttgatttacttatttttaattaaagatggtaatttattgaacaatgaaatccgtaatatattgatttaaggacaaaagtgaagttttagaattataaaagtacttaaatattatatattttccatttcataattgttttcctttctctgtggctttaaagtttttgactattttacaatgttaatcactaggtaacttgccatatttctggttctatattaagttctatcctttataatgctgttattataaagctggtttttagcatttgtctgtagcaatagaaattttactaagtctctgttctcccagtaagttttttcttttctcagtaagtccctaagaaaacatttgtttgccactcttactattcccaatcttggattgttcgagctgaaaaaaaatttgatgagaaacaggaggatccttttctggtgaatataggttcctgctttaagaatgtggaaatccattgctttatataactaatatacacacagattaattaaaattgtgagaaataattcacacatgacaagtaggtaacatgcatgagttttgaatttttttaaaaacccaactgtttgacaaaatatagaacccaaattggtactttcttagaccagtgtaacctcacacctcagttttgcttttccaaccctgacttgaaaggcatatttgtatctttttattagtgatagtgaagctgtgacactaaccttttatacaaaagagtaaagaaagaaaaactacagcgattaagatgagaacagttctgcagttgttgaactagatcacagcattgtaggcagaataaaaaatgttcatatctgagaatattcctttcgccatcttttcccaaggccagacctcctggtggagcacagttaaaagtaacattctgggcctttgtaatcggagggctgtgtctccagctggcagcctttgttttaatatataatgcaggactgtggaaaacagttggcatagaatattttcacctaaaaaagaaagaaaagacatacaaaactggattaattgcaaaaagagaatacagtaaaataccatataactggacaaagctagaagaacctttagaagatttgtctgaaaacagatttcaagagtgagcttttatacactgctcactaatttgcttgattactaccaactcttcttaaagttaacacgtttaaggtatttctggacttcctagccttttagcaagcttagaggaactagccattagctagtgatgtaaaaatattttggggactgatgcccttaaaggttatgcccttgaaagttcttaccttttctctagtgatattaaggaacgagtgggtagtgttctcagggtgaccagctgccctaaagtgcctgggattgagggtttccctggatgcgggactttccctggatacaaaacttttagcagagttttgtatatatgtggatttttctgataagtagcacatcagaggccttaaccactgcccaaaagcgattctccattgagagtacatatcttgaacttaagaaattcatttgctctgatttttaatcttgtaaagtttttgctaaactcaaaacaagtcccaggcacaccagaaggagctgaccaccttaggtgttcttgtgatttatccttacttccctatgttgtcatagttgcttctaaactcagctgcactatggctgtcaacatttctgatacttattgggatatgtgccatccagtcatttagtactttgaatggaacatgagatttataacacaggtaatagctgaaggtaccagtatggtggtgagactcacacttagtgatccagctaaggtaactgatgttataatggaacagagaagaggccaactagatagctaagttcttctgaacctatgtgtatatgtaagtacaaatcatgcgtccttatggggttaaacttaatctgaaatttacatttttcatagtaaaaggaaaccaattgttgcagatttcttttcttgtgaggaaatacatggcctttgatgctctggcgtctactgcatttcccagtctgttctgctcgagaagccagaatgtgttgttaacatttttccgtgaatgttgtgttaaaatgattaaatgcatcagccaatggcaagtgaaggaattgggtgtcctgatgcagactgagcagtttctctcaattgtagcctcatactcataaggtgcttaccagctagaacattgagcacgtgaggtgagattttttttctctgatggcattaactttgtaatgcaatatgatggatgcagaccctgttcttgtttccctctggaagtccttagtggctgcatccttggtgcactgtgatggagatattaaatgtgttctttgtgagctttcgttctatgattgtcaaaagtacgatgtggttccttttttatttttattaaacaatgagctgaggctttattacagctggttttcaagttaaaattgttgaatactgatgtctttctcccacctacaccaaatattttagtctatttaaagtacaaaaaaagttctgcttaagaaaacattgcttacatgtcctgtgatttctggtcaatttttatatatatttgtgtgcatcatctgtatgtgctttcactttttaccttgtttgctcttacctgtgttaacagccctgtcaccgttgaaaggtggacagttttcctagcattaaaagaaagccatttgagttgtttaccatgtt

SEQ ID NO: 7792 - DNA, 1518 bp, Homo sapiens
ccgcgtgcggaggggacagagcgtgagctgagcaggccacacttcaaactactttgctgctaatattttcctcctgagtgcttgcttttcatgcaaactctttggtcgttttttttttgtttgttggttggttttcttcttctcgtcctcgtttgtgttctgttttgtttcgctctttgagaaatagcttatgaaaagaattgttgggggtttttttggaagaaggggcaggtatgatcggcaggacaccctgataggaagaggggaagcagaaatccaagcaccaccaaacacagtgtatgaaggggggcggtcatcatttcacttgtcaggagtgtgtgtgagtgtgagtgtgcggctgtgtgtgcacgcgtgtgcaggagcggcagatggggagacaacgtgctctttgttttgtgtctcttatggatgtccccagcagagaggtttgcagtcccaagcggtgtctctcctgccccttggacacgctcagtggggcagaggcagtacctgggcaagctggcggctggggtcccagcagctgccaggagcacggctctgtccccagcctgggaaagcccctgcccctcctctccctcatcaaggacacgggcctgtccacaggcttctgagcagcgagcctgctagtggccgaaccagaaccaattattttcatccttgtcttattcccttcctgccagcccctgccattgtagcgtctttcttttttggccatctgctcctggatctccctgagatgggcttcccaagggctgccggggcagccccctcacagtattgctcacccagtgccctctcccctcagcctctcccctgcctgccctggtgacatcaggtttttcccggacttagaaaaccagctcagcactgcctgctcccatcctgtgtgttaagctctgctattaggccagcaagcggggatgtccctgggagggacatgcttagcagtccccttccctccaagaaggatttggtccgtcataacccaaggtaccatcctaggctgacacctaactcttctttcatttcttctacaactcatacactcgtatgatacttcgacactgttcttagctcaatgagcatgtttagactttaacataagctatttttctaactacaaaggtttaaatgaacaagagaagcattctcattggaaatttagcattgtagtgctttgagagagaaaggactcctgaaaaaaaacctgagatttattaaagaaaaaaatgtattttatgttatatataaatatattattacttgtaaatataaagacgttttataagcatcattatttatgtattgtgcaatgtgtataaacaagaaaaataaagaaaagatgcactttgctttaatataaatgcaaataacaaatgccaaattaaaaaagataaacacaagattggtgtttttttctatgggtgttatcacctagctgaatgtttttctaaaggagtttatgttccattaaacgatttttaaaatgtacacttg

SEQ ID NO: 7793 - DNA, 251 bp, Homo sapiens
gggcaggatgctctcccacccggacccctccagccaagcagcccttcaagttcttttatttctgggtaacagaagtagacagacaggttacttggtgtatcttctgttaaagaggattgcacgagtgtgttttcctcacacactttgatttggagaattggtgctagttggcaatagataactcagcgtagatagtattgcaaaaaggggaggaaatacacaacaataataaatgtaaaaacctgctattc

SEQ ID NO: 7794 - DNA, 685 bp, Homo sapiens
agaaattttcctaaaggaccccatcatttaaaaaatggacctgataatatgaagcatcttccttgtaattgtctctgacctttttatctgagaccggaattcaggataggagtctagatatttacctgatactaatcaggaaatatatgatatccgtatttaaaatgtagttagttatatttaatgacctcattcctaagttcctttttcgttaatgtagctttcatttctgttattgctgtttgaataatatgattaaatagaaggtttgtgccagtagacattatgttactaaatcagcactttaaaatctttggttctctaattcatatgaatttgctgtttgctctaatttctttgggctcttctaatttgagtggagtacaattttgttgtgaaacagtccagtgaaactgtgcagggaaatgaaggtagaattttgggaggtaataatgatgtgaaacataaagatttaataattactgtccaacacagtggagcagcttgtccacaaatatagtaattactatttattgctctaaggaagattaaaaaaagatagggaaaagggggaaacttctttgaaaaatgaaacatctgttacattaatgtctaattataaaattttaatccttactgcatttcttctgttcctacaaatgtattaaacattcagtttaactgg

SEQ ID NO: 7795 - DNA, 30 bp, Homo sapiens
attcagcattaaaataaatgtaattaaaag

SEQ ID NO: 7796 - DNA, 342 bp, Homo sapiens
agagaccagtgagctcactgtgacccatccttactctacttggccaggccacagtaaaacaagtgaccttcagagcagctgccacaactggccatgccctgccattgaaacagtgattaagtttgatcaagccatggtgacacaaaaatgcattgatcatgaataggagcccatgctagaagtacattctctcagatttgaaccagtgaaatatgatgtatttctgagctaaaactcaactatagaagacattaaaagaaatcgtattcttgccaagtaaccaccacttctgccttagataatatgattataaggaaatcaaataaatgttgccttaacttc

SEQ ID NO: 7797 - DNA, 185 bp, Homo sapiens
ttccgtgagcatcaatatatcttttcttggtcttttaatatttttaactacagtatgcttgtatgcttcttttaactcctggataaacttttcttttttccctgagtttgtgtaattaattgaacataattttcttcctttgaataaacctgtgcctattttggagttcacagacttacaaatcc

SEQ ID NO: 7798 - DNA, 973 bp, Homo sapiens
tctgcagggcaggcactcgggaagggaagatggatgtaaagtgtgggagaccgaggacacagtggagcccacgagcacgagctggaacccacgaggatggcctggaacccatgtcagtctctcaccacctccagcttcgatgatgtgggtgtcctgcagaagaagctggtgcccttcctcacagagttaaatatgcatctggcccaggaattagagaagctgaaaggatgatcctggggaaggtggagcagctgcaggcctggctgcaggcctgactactgcccacaccaacgaggtgatctagcagatacatggcaacgtgtgaactgcaacaacgcctggtgccccagcaccaaccttccaagtgtaaaaacaatgtgctgctgcttcacttccgccctccggttatcaagcaaaatgtctcttgtggcccatcttactggaagagagttccgggaaacatagcctcaccaaggtgacacattacaaagccaccctaccatgaatccgctcccaagggtctcactgctcacctgaggataactcaatataactatgtggctgaaaatgcaaagctgaagaccatggatttcatggtgattccagcaagtacagagattctatgaagcccacccagaaaaaacttgctggtcctggctatttttgtgtcatttattcaagtattgagaacctggcctgtggtaggcactgtacttaatactaggatacagaaatgcaaaagatacggcccatgcaattttattaaatgcatcaatatgtattacaaatggtgaatggatttccaactttatcatggaatttaatgctgaatatatagaattcagaaaattgttgggaggacagcccttttgtgaaccttgtttggggcacagtaggaattggaaataatttagtttctatctctaagctgttctattttaaaattatttttaaatttttattgtcccactta

SEQ ID NO: 7799 - DNA, 244 bp, Homo sapiens
gcctcctggcccggaccccttacaccctgcattccagatgggggagccgcccggtgcccgtgtgtccgttcctccactcatctgtttctccggttctccctgtgcccatccaccggttgaccgcccatctgcctttatcagagggactgtccccgtcgacatgttcagtgcctggtggggctgcggagtccactcatccttgcctcctctccctgggttttgttaataaaattttgaagaaacc

SEQ ID NO: 7800 - DNA, 1133 bp, Homo sapiens
gcgcagagcagcagggaaatggttctgtatgagtgcattgctgagccatcatgttcccctgttttatctcactggatgcctcttctcactgcttgcctcttgggattgtaatgggaaagagggtgctgggagagcaatcaaaggcaaaaataatacatggaattgtatgattttatctaaagtaaaattctagactgctttcacttatttcatttcctccccatacaaatttgatgagcaggtacacactttctttaaaacattccaagtgtatatagattcagtgcttatttctcagctttttctttcttaagttcatctctgtcacctagcttttatttttaatactcaatttctgaggcttaggagaatacttgttaccttaagcgtttttttgtttttttgttgttgttgttttgtttttttttagtgtatttgctattgatactttgctattgatacctttacttgccaagatttatttaaagttggccaagataccaagaaggtggcttgcaggggcatctttggcttctcataattttaaacagtcattgctttcaagatcatgctaaacaagaattaatagagagaaaaaaatctataaagcatgtgttgaaaatcctcaggctcatgataacttacgggataacaatagtaggtaacaccgagtgcttacaattcagtgggcacggtcaaagtgctttttgtaagttctatttaatacttgcgacaaccctgagatagtaagtattattattgttctcattttatagatgagaaagctaacacatagggaaattaggtaactttccccagataactcagtaaacagtggagctggaattcaaacatgtacggtctgacttcttgagcccatactcaataatcatgccatcctgcctttccatggaataactgatggatggttagaaatgttaaaaacaaagcaaatgcaaacatctctgcttctgctcctctactaagcccagttaacttttgattttatatgtactaagtatacatttttattaatttatgtgagctgagtgtttttattaattactttttggctattaatgtcaattattttggtgatcaatcctagttatccaaggagtcacatcactcgt

SEQ ID NO: 7801 - DNA, 1801 bp, Homo sapiens
ctatatatatatacataaatactatatctctatatggactcgtaaaggcatgggtataatggtaccccccagtaaacttcctaatgatttcttatgactgttatcaggctttattgggattaggctaaagttgttagtaaacttataaaaggctgctatggtaacactaaacctaagtggtctcttgtctattagtttggtttgaattattagtactatcctgtagacccagagacatagtttatataagaattgctaaagctgaagttcaacttggctgagtgaagataatcataggttgtgtgagcctatgaaaaagtgtatacgtctaagatttcaaaacaatgggtcccaaagcctaaccactttaagagtttatggagggtacttggcattacagacgattcatacacttccagtgctgccttctttacactgccagttttgacaaaacaggtttgttttttattttacaacaacatatgcctaattctgcaggattgcaagtaactttttaatgcattgtgattacttattggtaatgatagggctgatggcagtttactagatcactggttataatttgggacaaaaactgctacatcaactttcatctcgcccagagtgctcaaggctggtatgatcagtggatcaggaatgcaattgtgaattcctgcccattgcctctcttggtgaatgtggaaatggccacctgggttttcccatatcaggaagggctttgggatggcacctatattggctgataattgaggatgcaaacattccattcattagtgtgatcgagctgttaatttttagactatagatcaaaatgtgaaacattttatgttcaatccatatttgtcttgcacattataaatatatttttattttttagtaatttaggggagggaggagggagaaagggataatgatgcccttggcataattcacaaaagcagctgtgacaacctccaatcagtttacttcatttcaaaactatttccaatcacaaggaaagatttatttaaaatatactcgtacatttcacctgtggatgtctataacttcatcctcagtatgttcccaaatctgtgctggcattgaaaggacaaaacattatactagtgggtttttctactaattattttttgaagcattattttcccaacacaaaagagcttttttctcggtataatgaaaattgaaatcctatgtgtattcaatagtaaatagacaaattttattttttatttccacttgaagagttacatttcgtataaaagtttacaaataacggtttttattttgattttttcagtataaaaaaagttgccttgatggcatattatgatgtaatgctaattgcttgtaggatagtaaatggtcagtattgaaacctaatctctagctgccgtcttgtagatatgaacgaatgttcaccaagcatgtattttgtattttgttgcattgtacactgcaactaataagccaaggaatcgacatatattaggtgcgtgtactgtttctaaaaaccacaaactaagaatgataaattatcaatatagtttagtatttgctaattttactacactcttttgttatgtatatgtagggaagtcatagggattataaattcaatttgagtaaaatttaaaaccatatattttatgataaagggcctttaacttaagatggccaaagcactgatattatatatttgctgtaaagagaattataagagttttatttttctgatattaaaagttacttaataaagacttgtttccattaacttgaa

SEQ ID NO: 7802 - DNA, 1107 bp, Homo sapiens
gtaactttcgaccgactttccccaagagaaaattcctagaaattgaacaaaaatgtttccactggcttttgcctgtaagaaaaaaaatgtacccgagcacatagagctttttaatagcactaaccaatgcctttttagatgtatttttgatgtatatatctattattcaaaaaatcatgtttattttgagtcctaggacttaaaattagtcttttgtaatatcaagcaggaccctaagatgaagctgagcttttgatgccaggtgcaatctactggaaatgtagcacttacgtaaaacatttgtttcccccacagttttaataagaacagatcaggaattctaaataaatttcccagttaaagattattgtgacttcactgtatataaacatatttttatactttattgaaaggggacacctgtacattcttccatcatcactgtaaagacaaataaatgattatattcacagactgattggaattctttctgttgaaaagcacacacaataaagaacccctcgttagccttcctctgatttacattcaactctgatccctgggccttaggtttgacatggaggtggaggaagatagcgcatatatttgcagtatgaactattgcctctggacgttgtgagaattgtgctttcaccagaatttctaagaatttctgctaaatatcacctagcatgtgtaattttttttccttgcctgtgacttggacttttgatagttctataagaataaggctttttcttcccttgggcatgagtcagatacacaaggacccttcaggtgttactagaaggcgtccatgtttattgttttttaaagaatgtttggcactctctaacgtccactagcttactgagttatcaggtgcaggtcagactcttggctacagtgagaggcagcttctagacagagttgcttaatgaaagggtttgtaatactttacaaaccattacctgtacctggcctggcctccaaaatattaacattctttttctgttgaaactcgcgagtgtaactttcataccacttgaatttattgatatttaattatgaaaactagcattacattattaaacgatttctaaaatc

SEQ ID NO: 7803 - DNA, 219 bp, Homo sapiens
tgcttccctggtgctttgccattgtatttgtgacttgtttgtctgcttcagctagactgtgagctccatgagggcagggaccatgtctttttttgcttttgcacacggtaggtacttaatattgctttatgtttatttgatttaccatccacctcattctagaagtgtatagtggtaataaatgtttattaaataaataaattataccgtacattattt

SEQ ID NO: 7804 - DNA, 2796 bp, Homo sapiens
actggctggatgaagatctgatttagaaagactgcgtgagtcttatttattctctgaaacacagcccaagtttcatgttaaaatggcaaaatgccattatttaaatggaacttattacataccaatggctttgcaagaagatgacatttcagaaaatcaaacaaatctatatttaatggatggactcttcaaaacttaccaaatagttgaagaaaccaggtgccttctcatgatggaagacagattctgctttaaattaaaaaaaaaaaaaaatctgaatcttgttttcagatttttttttctactgggattgttttaagattgtcaattctgacttttttatagtggtttttaagagtataaatagaagggagagtgtatatgtgtatgaatgaacatacatttcctgcatatatatgtatgaagggcatgtatatgtatgaatgagcaaacatatttgaaagttaacttttggatgataggaaagatcgtacagtgacataagttcatctcctgatccattgtttgtgggagaattatacttgactgaattatgggcaggagaaagagcagattccttttagctaattccccaacccatatgcccctctgaagttgagaatcatggctgcctcaccacacatcagagaatgactgttcttcttagttctgggattaaaaattggtttctagaggtaacctgtacacacaaacgcacagggatgcacatggtttcctctgcctttgtgactaattttcttcttgatagttattaatagtatctaaataaaatattggggggatagaaaaataatgctgttagctcatacttccatgaaaatgtatatattataggctcaaaggaataatgactgctgtctgcagccagaaagaatctgaatttatgaattggaaagatatatatagtgtatttgtgaaagtttgcttaaattctgatacatgccttctttgtaggtggagtttgtgattgcagtgaatagaacaaattctgacttgcagaaatgcagacatacagtcaggaaagaacaaacttcaattaaatgtataatgagagaccttggtccccctaaaggatgaatttcctttaggcctttgatcttcctctctagtgtataactttaaatatttgctcagaaaagatgctgactctttcattatggaatgtgaaatatcagtgttgtctataaatatttgaaggtatataaaaatgagatgatgtaatgtatttataaatttatccaagtactgtaatccttgaattgttgtgtaactgtgtgtgagttttacgcttcatggtatttttggaaacatttttattgcttgcttattttgaaggtatatttatctgttaacatttagggcatagttaccttataccagcaacaagtctaagcactttacttgtattaatttattttatcttccccaaggccctcagaagcagattattcctgttttacagagaaagatactgagagtggttgagtaatttgcccagctgctaactgtgaagcaaaaatttgaaccttttgacttggctattgatattcattctacttgctcacatggtggtctaagaaatttcccagctatagaaatctctctatttttgccactttaatcaacacatagcttcctggatgactgcctgtgttattttgtggatgacagtaagaaacaacaaatactgataaaatcaatattttgctgaaatgagttgatctttcaccagctggactaccattgtgagaactcagttcagacaaacttccctgctaaaaatctgtttatcatacatttattatttatgactttatgtcacattgaagaatttcttcatgatacattttcaggcacacttgtaggaaaattaggatcatgagtcctgctttaagtatttgcagtgtagtaagagaatccatcttttactaggagaccagattccttttatacctcattcatcatgctggattgtaataaatttcagattttggaatgggcttatttaactgacctgacaatcttgatgatttccattagaataacttattctaaggtcaaaagtggaaagacactgttggtttttattttgatttcactatactcatttttgaacatggaaatacagtggtgaaaccacctatgcaaaaatgataacagtgaggaaattatgacagtgaaagagatctgacctaactatctatcttgcctcgaaactgcccttggtcgttcctgagtgtgggccaagctaactttgggagaaatttactttataggttaaattataatagcccttcccaaaactaaacgattctcctgcctcagcctcccgagtagctgtctttataataccatcagccttatcatttattcgtcatgtatggattgtttcctatatccactatcataaaattatcatttgaaatatttttttatgaaaaaaaaaacacttctcagtgaaaaaacaagattacaagggggaataatatttattcagctaaaatagtacttcacaggaaatataggaaaagaaacactagttcagttttattccaaataatgtacttctaattatactcttgaatttattggataagaaggtctgaggtgggtctgaaattcatacatgaagtcaggaaaagaaaagaaacttagttctaccttgattacatatgttgttacaaattatcattataaaatgtttaaacaattagtatagtatatcttttgaataattgcttataatatgccttaccataaagaaaattgatgcta

SEQ ID NO: 7805 - DNA, 5700 bp, Homo sapiens
gtccaagttgccacattgcttcattaaaacaagagaccacttccttaacagctgtattatcttaaacccacataaacacttctccttaacccccatttttgtaatataagacaagtctgagtagttatgaatcgcagacgcaagaggtttcagcattcccaattatcaaaaaacagaaaaacaaaaaaaagaaagaaaaaagtgcaacttgagggacgactttctttaacatatcattcagaatgtgcaaagcagtatgtacaggctgagacacagcccagagactgaacggcaatctttccacactgtggaacaatgcatttgtgcctaaacttcttttggaaaaaaaaaatataattaatttgtaagtctgaaaaaaaaatatttaatttaaaaaaaattgtaaacttgcaataatgaaaaagtgtacttctgaagaaaactacatgaacgtttttgttggtattcaagtcagctagtgtttataattactggatattgaattaggggaagctcggctgccctagtaacaaaaccagcaaacgtcctgatgacaacgaagtgatgacattagccattccttagggtaggaggaacagatggatcttatagacctatgacaaatatatatataaatatatatataaatatatattaaaaatttagtgactatggtaagcttttgttcatttgtttcagacttttttctcctgtaaaaaaatagtactgattaacttttttaaaagaaagattttactgtaaatatggatttttttttttttggtcttatttctgtccctttccctggtttgttatcgtaacctgtagtgccaactctgcttccagaggggtagtgcaggatgaaatgctgaccctgatgttgcttctcattcataaataagtagaaagttgtttctccagtcttttgggaacacaggacttaaaagtcacatcatgtgtagatattacaagcagcattaccaagacatggcaaaaagagtttgtctgaattgtaatgttgcgtttgtgaacctattctgggattttcagaggtacaaggttagaatgctacaatgttaccactgtgccttccaatgtttatatcatcggaaacataacataatcaaagtggctgtgatttaacaaaatgattaaagtgttacctacctgtgtagccgaagtagtgtgcagtgaggcgtttctgaatacatggtcagatttttggaaaaaaacaaaaacaaaaaaaacaagtaaagttcaaaaaccgtcaaatgagaaaattgcaagtagtgtgacagagctgattgattttgttgctttcttgattttttttttcaaaatgggtttactaaaatgtagatgacttaactgcctcctccttcgtctgaaaaatgccaatattcaatcatcatgcagcattataacaagccttataagtcctaaagcattaagttgcacttttttgaggaggggtagtgcagtatttctctggccagtatgaatgaagtttatacttaccatatttgatagaaacatagatcaagctatggcacagcgactcatcagatagctagctttgacgtctgggcacaattgaaccaacttccatcgtgaatctttataatgattgactttggtgtatagtgcagtaaacaaatagtgctcctagttaagtatttgtcagcatccttttgtctctaacttgtttctatttttacagccacacaattcttggcatgtattaagaaaaaaaaaaatccctgttcaagtagtttttccacctatcagcactgagtaaatgccataaatccattgaaatggtctaaatgttccatctgttctcctgttttgccagttatatagtaatgaaatacatttgtaaattttatgcaacaaatggcaaacgtatcattattttgaaattgtgtatgtaaaagttatatttttacatgtagactcttgttattatgtgttttaatacattgtatcagtttttgtttttttttaaaaactgtggtttaaaaagaagtctcatttaaatgaaatagctacaagaatcagaattttatgttcatttctgaaaatgtaagaacaaataagatagttaccacgtggtcatcttttacaaacccataaacattttgattagctgtgtgtgtgttgaaaaactgtaaatatgttcagtagcgataaaactaaaataactttgatttgttgataagttcctaaaatgtggaggtggattaaaaccttaggagaatagcagaaatcaaacttcatgaaaagttattttggggctttcctgtgaaatgtatgaacaaagaggctcagagaaggacatggaagacaataatgtatactctctcctcctccctgaataatgaaaaccatgtgtatttgttccctccgtatgttaaagatttccttttagtggtacattctgcactcattttgtatagtctaccaaggcgggtatccctaggaacaatattatataggaagcaggtatactctgatcacattcaggataagtgtacagaagaaaatacggtgtttactctttagggaactggaaacactccctgcattgatgtacattttaagaatggcacttttgatacatgttatcataaaggtgcttaatagagctgaattaaagtttttcaaatctgtaaacaaagcaaaaaagtaaattgtagtcatttgattattttttaaattggtgctttatattttgttctcactcagagtaaaagctgcaatttattgttcaccagctttgatgtattcattactcagtaatgcaatacctctattgttgaattccctttggaaataagtgaaaattctaacggccactgaaagctgctcgctaggttttgcttggtggagaaacataatctgcacctatccatattaattgggttgtatccccattaaaaaagaaaaaaagggaatgtggcctttttagtgtgttttttattgttgttgttttgtaattatcaaacccaggtaagatattggtatcctgcactggattttcaaatgaagttcagcagaagacagttaagattaaagtactatacaaaaatttcaaaagggtccatactacgctatctgtatgacgacacttaggctggggatctctttcagaaactcggactttaaaagcaacttggagcagttgatccacctccacattcaagtaatttatgaatatgcagaatagggatctgttcatctagaaatttttaccatttgtcttctgtgtagctgcaaggaacactaatgtttatacaactgtcagtccacccagtggtgcaactggttctgattcagtcttccgattcctttttatttttcactttttcctatttctgaatttttttttttatttgtgatcttgattttgatgaggggttggggagtggggagggagtcgaaccaagacttggagttaagaggattttcatcttttgcatccaacaggcagaatatgatctgtgtccaaaagtgaacttgagtcaggaatgaatcaatttcagcataaacaagcacaaaaatttagtctgctggctgactggaagcaaaaaagtcaagatggaatatgatgaattccaacacaatggggcaccaaggcctttaggcctctctttttattttgctttggttttgtttgtttttctttagagacatgctctttctcatgggacttgaagtggactcatctttgtgcagtgctggttttgccatactcatttcaagtattatagacatatgtaatggtgaaaatatatgaactgtggcctttttcattcttgttacttgtgatgcaattaagtgaagataagaaaaaaaaaaaaaaagcagagatttaccatgtatcagtgcctggctttttgttataaagctttgtttgtctagtgctcttttgctataaaatagactgtagtacaccctagtaggaaaaaaaaaaaactaaatttaaaaataaaaaatatatttggcttatttttcgcaggagcaatccttttataccatgaatattacaaaaaaattgtcagattctgaatatttcttctttgtagatttttggaatcattatgagtaaaagtttgttactttattttactatttaaaagatgttattttaccatgtgttaccaagatgaaactgtatgggtagcttttttgtttgttttttgttttgtttttgtttttgtttttgtttttagttgtaggtcgcagcggggaaattttttgcgactgtacacatagctgcagcattaaaaacttaaaaaaattgttaaaaaaaaaaaaagggaaaacatttcaaaaaaaaaaaaaaagataaacagttacaccttgttttcaatgtgtggctgagtgcctcgattttttcatgtttttggtgtatttctgatttgtagaagtgtccaaacaggttgtgtgctggagttccttcaagacaaaaacaaacccagcttggtcaaggccattacctgtttcccatctgtagttattcgatgaagtcatgtacatgaccgttctgtagcaataaatgtgccatttttataaactgtttctgacacttgtttcatttcattttgcattgtccatatagctatgattctcttctgtaagtaaaacgcatctatatttcattttccaagtgttggaggtattgacagcttaacaaacaaaacatacaaaaaaaatcacaaaaacaaattgaaaagcaaagcacatgattgatcaaggaagagatgcccttaatgaaaatggaacgggatgcatgcaaaacaaaaagaaaactgtctagaggattaactaattgaaggaatataattaatgtgtgtgtaacactgaagctatgcatttgaagagctctgaactgcaccagtgttttcggttgtgctgcaggttgctaagtcaagtcagccttaaccttttgcaccagttggtcggctgtttggcagaacattctcagatcttttcagtcaaaaatctaagatgatttattttgtatcactttgttaaaagctgaatattgttaactacagttaatattaacactgtatttatactttctcaaactacatccgccccaccacttctggttgcctctgttgactattaatccagatgtaaacaaccagatgtttttttctaacttgtacaaactgacgtgtgtcaactatcatggaaggaaaaaaatgtacagattaaaattattcagtgttatgtactgtaagttaatatttttgtagaatggacatcaatctactttgcaaaatttggaggctatttcaacattgcactgtagaaatgtaaagtaatgtatgcaatgtaaaggaaagcccgcggtagctgagcgcttcataacagaatgttctaatcaagtacgtggtatttggggatgtctccaatattgctcttgtattctttctaattgggtttagtgactagttgaaggaaaatgttataacgccatttggttcacatgtgaagtgccctccatagccaaatgttgggatttttttttttttcgtttttggttggactgtttgcagatatttaaattttatgaaatttccaaagattttggttgataacccccttttaccttctaaatgatttgagatgttcttatgttcttactgtgtgttttaaatatatataaaagagccacaagcattt

SEQ ID NO: 7806 - DNA, 205 bp, Homo sapiens
ggtacaaaagacactggacaaccatattgcaatcagatctacagctcctggataattgcttgattctcgccagagactgtcaatgtttcattcattgccattaccaataaatcattgcttttgttcagatggtatcactagtgtttccattgtaatcttgacacatgcaattgtaaataaaagtcaccacttttgccaagcttaa

SEQ ID NO: 7807 - DNA, 2407 bp, Homo sapiens
cccccgccggtggaccccgtggcgttaggcaaatgcccaacctccagatacctccgatgtggagagggtgttatttagagatcaaggaaggaagtcatccttccttgatatatatacagcctttgggtacaaattgtgtggtttcttgaggattggactcttgatggatttctatttttatataactatacagtaagcatttgtattttctctctctaggtataagttactagtttggaatgtccatcaggacctttaataaatgagttaaaaatttgtcttatgagacacacctatttaagtacagattttggctttattgcccaaaaccctcctgaaagggtacggagagtcccctctgtgggctggcagtgtgaatgagatctgtttagtctcgtgcatatagttgctgttttttaaatgaacacagttgagtatttgaagtgaatttgaaaaagaaatgttacttaatctttccctaagcccatgggttacagaatgctagggaggcaatttggttacctgcaatggctgcttttgccagcgaggccaccattcattggtcatcttggtatttgtgtgtgaatctcactttcctcaatgtaaaaaggaatcaagtatggatttcagaggtgctcttagattccccatacacccaagggtaataaacgtgtacaagtacagtgttcatgatacgtgccttggtgggagtccgtggtgccacagggaaggggctcccactgcttctggtctccagggacagtgctgctggaaaggctagtgatgagcttcaccctggagctcctcccgggaccttgcaagcctctccatccagcatcttctctatcttagttgaatgccttctttctgaacatttgttttaagaattattttataaagtcaacaatactttgcttgaattctttcttaatttacgattttttattataaaaatgtatagtgatacaatgggacatgtgaagaatacagaaaagtaaccactttaatgcaataactgttatcataatattgtatttcgtggtagtcctttcctgtagatatttttaatgccatttaatgccattgtcaccttggatttatgagtgaaaagtgtttctaaaaatatagaaataatgtcagatcagagtctgatcttctatgtttgtatttaaatggattaaaagatccccggtggttccatgaagaatttgtaaagatcactttctctttcctccaagccctgaaactttgttcttcaaaagagcgtttctttttttttttttttttagccagtttataaagtggaagtattaggagattcataaatcttctatattgagaattggctatgttaataaatattacaacatcattaaggttttagctaagtttgattcatgctgtctgttaaatcaaaactgatctaaatcagaattattaaatgtgaggagcttttttaatacaggaaaagaaacatgtcatccacttgagttaatagttttcctacgttgatgacagccctcatgagtagcatccacatttttaaaatttcaaattggtttttctactagtagattgtgtttctagagaaagatacaaggcataggtgattgtttaggattttcctctagcctttgccattacctttttggggatgaggttcacagtagactttgagtgaccgtcccaccgtgaagtgaattctctgagctggtggtgtggtgctggaaggaaggttatttttggagccactctctccccttaaggatatttcccaagggcctgcttcaattctttgatgactttagaggtgaaaaaatatttttatggagatgatgcagaaaactccaattcaggagcccttgcgagtatatctgaagcacttatttgctaaggaaacctgaattgatagcagtactgtgctgtctggaataatgtccttgatactgagttgggaccagactggcttttatagtgacaggcaaagaggaatttattgagatcactgctcatggcatttgttgctgtaagaagtgttgcctttgattgttactaaccacggatgggtaacggtcatacattaggctagtgtttggtaggacaaaatctttttagagctttgagaattgtcatcctgttggtcaactttgaaatacaaatgtttgccctggtaattagcaatgaactgctggcagtttcttcagctgtgtatatacggatctggcttttaattgatgaatcaacttctacagaaacttttgcagggacagtgttgatgaggcagtttagcttgccagggtgatgataaagcccaggtccctgcatgtatagtgctcttctaaagaatatgcattcttgaactacttaactttttaaaaatcacaataaatttttgcactcaaaattt

SEQ ID NO: 7808 - DNA, 990 bp, Homo sapiens
ccattttctccagaagcgtggaggaaagattatgaaaggaacaggctctttaaaaaagaaaacaaaaagccagaatcttcctttttttgtttcattggggtttctctttctgtttttctttctactaccataaaaactatctcaaatcacctgaacatcaagtgatattaaggttgtcatcttaagaaaaaatatccatttttttcttaagttcgggaaacaaagttcggggaaaatacctggcatgaaactgtagttagggatacatttcagcattttactcactttatccaagttattcattttattcaagttatatgtatgtataattcaacaattttagattatggtgtaagatactccagtaacttatctttctgtccttttaagtgtaccttgaattctttgatttattttattgcatcaatgaattaaaacaaaaatcttgggggaagaaattggcaatatcgtataaaaatctgctcatattagaacacagtataattcagcagtaaacactagaatcaaatgaatagccttttgtatcagttattaatcttttctaactctgcttagctgctaataatcctgaggcatagaaattgaagaatttgtaaaaatagaattgccttaaaggatttgaagtaagaacataattttggggagagttttttagtgattcacagtatccctcttagcattaatttaaggtaaagaggcagattgattttccctctttcctggtaattcctaagtaattaagaataaataagttccaaaagaaattgtagctggaatcttaataacaattgtgagtggctgtttgagttgcccccaccatgtccttagatctaatctgtgctaccttattaactcacagcaggcttactgaatggcttcatttcagatttagttgatttctccaccaaatgcatgtcatgtattctcaataggctgtattcccagcagtcaataaatgaacacccgtaa

SEQ ID NO: 7809 - DNA, 2059 bp, Homo sapiens
tcccttacccccaggctgggatgcggccacaaagcacgtctatttttttatgaaagactctcaggactttgtgtgtgtgtgtgaattgcattcatcacaaagatattgaagacaataaataatctttataacaaactccttgggttggactattaaacaatagcagagccaagaaataggacttttaaaagtcctattattcggccgggcgtggtggctcaggtctgtaatcccagcactttaggaggctgaggaggggagatcacctgaggccaggagttcgagaccagcccagccaacatggtgaaaccctgtctctaccataaattaaaaattagccgggcttggtggtgggcacccgtaatcccacctatttgagaagctgaagcagaagaatcgcttgaacctgggagatggaggttacagtgagccgagattgcgccactgcactccagcctgggtgacagagcaagactctgtcttaagaaaaatttaaaaataggccgggcatggtggctcatgcctgtcatcctagcactttgggaggccaaggcaggtggatcacttgaggtcaggagaccagcccggccaacatggtgaaaccccatctctactaaaaatacaaaaattagctggaaatcgcttgaacctgggaggtggaggttccagtgagccgagatcgtggcactgcactccaacctgagcaacagagtgagacaccagctcaaaaaaaattttttaataataataaaagtcctattattcaactggttatgtacattatggttgaaagggaacgttttaatccagtctcaatccagggcaatagaattacaaagcatgttgtatttcagttcaaatggtattgtattataaaattacagttacattttcctttcggtgatcttcagcataatttcccagaggcccctttttcctccctataggccatcttattaacagattttaaaatttatagtaatgacaaatgacttatcagtgttcatcatctgaaagctaagtggttcgttcaatcactttttcaaagttgatagtagattgcatggtttcatgtttcctcatattggtttattaattctatttaatcaaggaaaataacttcagattccataaagtttcagtttatttttagtttactactaggtgagatagcacattacatacttttactatcaaatattattttagcagcttcccatagtaccaaatgatttgattccctactctcattttttaaagcatataaatatttatgggcttaaaaagggggtttttaaaaactgaggatatcagtaataaattgcagaatattttgcaaagctttcttttggaaagcaaacttttgtgcctgcctatatgcaaagtattttatcagggacttgaacaaagacctcactctttttcacttgtcttatgtcgagagaaaaggttattggcagccacattcctaagactggggaatggtgtgtccttttaaatttgaagataactttaggtaattatggaaactcctcaaagaggagaaagtaatttttttccagacatttttctcattctgtgtctttcacacactagtttccatagttcgagaattctgttttttaccattgggctgtgaatgttcacaatatcagtcctgttgaattcctatgaggtaatcacaatgtgtatatgttcattttctaggtatgataaaagaatgtatggctttttattctgtggaagtaaaatcctgaacgtttacaacttttccttaacttgtaaataaaaaattgtaagttttttctttttttacagaaaacttagcttgtgtaattctgttagtttcagatttctctcctgtttttgcaaattgtgggaaagattgacaatgcaaatgtgtcaaagacatactgttgggtgcaatattaacaattttaaatgcaaatttctttggataaattatttctatattctgtaaatctgagatttaatgtatattttgtttaaaaaaatgatttagtaaaatctttgaaaagtatgatcttctaaagtattt

SEQ ID NO: 7810 - DNA, 573 bp, Homo sapiens
cgtccctgggtaacctaatggccactggctagcagcacacaatctcgccagggaaaatctgaggccacacaggagagaatatacagcctgcagagagtgcgtggcaatccttactcccagccgactgtgcgccaagatgcttctaaacccatcacctgctgtcttcactcaaatgatttcagaacaggatttgcgaccaggtttatggggagattgaatcaacgattggtctcaaagacagtccattctttatatacatgtttagcatttttaccaacctcacatcatgtgtatatttgtgtatttgcacatggttgtgctgtcgaggacctggtgctgagaagagtctgttcacagccaaaattcttcccactgtcattcctaacctgggatttctagacacatcctgctgtgatgtaaacagaaatcacgaattcgctcactggatcaagttgttccactggtgtctaatacgctattgttgccggaggtgggttctgtgacgtgaagccatttcccatcattcaacagccagttacaattttctgtttaattaaattcatatttaaacaa

SEQ ID NO: 7811 - DNA, 1969 bp, Homo sapiens
gggcactggggaacgtcttgggatccgaccccgggccgaccgcaccgtacccgcatcctctctcccagggacaacccccctccccagctcggcccctctttccctgtcgcctgcagccacccgccaagcatagttcagggccacgcgcctgctcccgatgcacggggagaagggcgactttcaggcctgaggagaggccctctggccgcctcaacgcacttcgcggacctcagccctgcagctggagggcaacaggctgccgggccccgctggccacgccgctcccatcaccgcaggcgctggagcctccaggcccaaacaggctgaagctcctaaacttggccattcccaggaggcttggagacccccagataaccataacagggaagcaggggaggcggaaaaatagagtttgagaaacttttgtataagtagtttcaaactatttgagaggagaattaaagacatgcttgttttgtttcgactctgtttaagcacgctcaggacttggggagaggagtgaatattggggtacgggaggagggtgcgttgacggacagggtgggtcagggaaagaggaggactgagaagaagctcagggtttccttgtgaaaattctagggacacttcgctgcagcagagaatcgtccccattccgaacgcttcggcggcctagaccagaggcgcccttccctggagccggcgtgcgcgcttggggtccggagtggatggggctaaggctcagatgctagcgcgctcccagttcccccgctagccccatagtccagcggcagctgatattttcaagtttgacttcaatagaaagcgtcaagaccaccttccctagggcgagagcgaagtgtcccccggcccctggcgtccccgctctcctaaggactcctctcagttcaccaagcagatctccggttcggtgccagtccctaacacccaaggttgatcaccagcggtacaagaactgaggcaaagagatgcttttccttttcggagccgcgagactctctaacctccccaactcgctccacactcgccaacccagagttcggtaaaaggcgcgtctggtgaggtgccgcgctcggagagtgtcctggagcgccctacgccaccgccccgagagctagttcttgcgggcgtgccctggacagtatctgcagttctttggcgccggctctagggcgaggaaggaatctcgaaatctcagcccgcttcacaatctcctgagactctctgaagaaggagagtcccggactcccgcctgagcgtgctcgatatccaccgttgacactggaagctgggcgaccgccagcagaacctggatgcccgccaacaggtcctggcacggggggggggggggcgtccaccccacaacccccgtccctaagcgtgctttcaggatgatgcccccagagccttaattagcatcaactggctactgtctgtcggtcctgagcaaattagtgaagctcccagtcccctttcctcgtctaaataaactctgtctctctggaaggtgggaaagatggaataagatcacctgtaaaggctttgtggaaagtaccaagaccctggcatgacgcaatatggattgtaatcatcgtccccatttccccgaaattccctggctgttctccggttcctgaaaccgacttgggaaaaggatgaccacgctggagctgggaatatgggaagcctcatcatagtttccagtcctttctctgcgggtctaagaggctattgcataaccagggctgtgtacccctagacctccagatggtgccttgcacacagtaggctgatcagtaaaaatgtactgaataaattattcccccccaagaggtagggagtaatatctgcacttttcctcacaaggatgtctccttgggggaggaggatggagcagcccgtgtgttatcaccttttagcaagaaaacaaaacaaaacaaaaccagaa

SEQ ID NO: 7812 - DNA, 1276 bp, Homo sapiens
ggggtgggaggggtggagggagggaaccagccatccttggaaaagaccactctcttgtgggacgtttcaagcagtacatgttttaatgtagtgaacacagttaggaaaaccacgatgatccattgacagacaataatttggttgttctaaatattcctggcagagcatttagctaacaccttgcagcgggaaccttactttccttttagttataaatgagataaactggaaaatttcagttgtaaatgatgatgcagaacacatatctgcttaaagaccttgagatgagccaggaagaaacaaaagcaaggggcatttcctctccaactttcttccttggaggccaagttctcaccctgtccaactattcgcaggacaccaggtcccttcagagagaaatgtggagagtcaaggtgtctactgggagccgggtttcccacagggagctgagtctacagactccagggcaatcaaaggtcaccacccccacccctcacctctaggatccttgaatttgtcaatgatactcatcaagtatgcttggatcctttggtccttggatgcttctcagccaagtggcggtagcacagatgtggtgaacaatgacgaattgaggcagggaatagacctcactagccctttgcaatggagatcatcgttctagtggccatgtgaagaatggaaccaagggaggcacaattagaggcagagggaaaccaggcagacggctgctctttttgagttgagcttaactctccttgtctgaacttggtgatagcaatgggaacaaagtgggtagactaacagagagcattaagaagttaaatcaatctctctctgtctcctcccaacctctctctctctttcatccccttctctccctatctctcttttttttttcttctcctgtcccttcccatcccacccctttagactaccttccagtaaatcacactgtcatttggtgccacaagctttcagggtagacactgatttttcccccctaatatctgctctctttcaaaaggaataattcaaaagacttaggacaattaccactgaaacacttcgagctatttagctaaagcccaccaaaccaaaacaaaatactgatttttttttttttttttggtgactctgttcatacagtgaataaagatctatcaaaggaaaaggaaactgagaccgaaaacttagggtctaagttgttctaaacccagggttctcaaatgtgttgtacaaaaagtttcatgtaataaaattaagcaaataaaac

SEQ ID NO: 7813 - DNA, 1217 bp, Homo sapiens
ctaccattttcctgtgtacttcatctatttgtgtacaaaatgatgtcgttttgagggaatttaagtatttaaattgcttcatagtctaaattattaattttcttaataaaataactgtttaaacattgatttgcagttaagaataaaccttaaagcaaagacaaccacattttaatttgttcacagtatgtaaatctgtctaaatttcagtgaatttctggtcagtatgatgcagcctctgagcagaatattgaccagtaagagggtaaataaagtgggggcaacccctggatatgaatgttaccccctaagtctccaatattgcaggtttccctgtataacgtaaacacacttgccctcatgcctcccagaatatgaggtctaattaagaagtcccatcaggtttattttgtaaccaaagtcttttttagaggtcagacttcctaatcaaaggcctgggcctgcagtcctttcatcttaatgcaacttcctttgaaatcaaagaatattttgtctgagagctttaaggatctggtaatagacttcaaaatgttaagtgaaatttttttttcctctatttatcaatgatatatttcacttttaaaggaaattttagaggaaaattaatagctgctttttgcctaaaaaaccttgtgggtggaaacattcctctgagaatggcttttataggtattttgcctggtaatgtattcattcatgattgcccatattcttgaatgtcttcattccaatggggtcaggtcaatattatgaaaataatttttatatttatatttgtaacttaaggaatttatttctccctttactacagcatgtaaattcagctcaaattgcatgatctgaggatttaaattcacaaaacctgccactacattctggtttacattagttacttcatgctggctggggttagtgaccatttgcatactcttttaaatcaaggaggctgtagtagaagcagttttaagattcttgaaggcaaaatttgaaaaacagtgaatacttctaattgtttccttttagtgccagaactaaggacattgtgaagcacttgttagtaaacttaaccttgaaatgtcagactggaaggagtttttatagtctttgtgcatacttctaggtattacagaaacagtctgtaaatgacattttaagatgcaaatttaattctgttcacagctgatttatactgattt

SEQ ID NO: 7814 - DNA, 1991 bp, Homo sapiens
cacatcccaacaccgtcacgccaaaggaagagaaagatcaactcacctgcagttaaaccatctaaagagaagaaagaccactggagacctagaaaacatacatttttctcttctcttctcctgacgtctctccactcctcttcttccaaatacgatgctattttcagagtcccctcctaggcctgcagacatgagggagtgaatgattgatttacctgcttctcactaagagtccattggggtggtttgcattgtaacttttcttttacatcctatttttccaggaactttggatttaagtactctcacagtgtcttaaatcataaattcttgaagttaaatttggcagagtatcaaaagggggaaaatgacaaagtgagctctaagaaaatgtgaggctacttctaagatgtgtgttcacaatagaccataactcctctagtatcaaaattggggctcttcagttaaaaaggggtggggaggacaaacgtgtcgatgtgctttggtggagaattttttccttgtgcttctagtagactttaaatattgtatccctttgtcaaaccttgtttcccaaattcaattaaagagaggagagaattgaatggcgtttagagaagatagaaaagaatcacagtcatatatttactgttatatagattgccacattctaaaattcaaatacggtgcttaaggtttcatgccatgcttatctgtaagtatcctatttagggaagaagattaaactctcttttcaaaaaaacaaagtgaaatgcctggattcacattaaaacaatgggctctcgtttgctataatattttaaagctgtttaatcaacagtggagtctgctctataaatatagattatttgttcaataaactggctgagcttagagagaggtgcagaattcctggttctgagcaggtgcccagaaggtaccattaggtgccatgatccaggctgaaccaatatacagtggggctgaagtctgcaaggaggttgctggcttgggctgacctcactaatgccatcagcagcggtaggtaaattttttctccttgggtattacaagtttttgtctggagccaaccaagcttgccaccaacatattgagagtaatacactattgaaagttatcttggatggggagaaaaaaaaatagtggttttccttgtttgcaaaaacttccttcctattctcattttttcttaattttctttaatttagtccaagttccagttcttttaggccttctctttgatttattttcccctgcatgtgagaagcagttcagaaaaaggtctatatctccacctcctagtgagttagagtgttttctcagagcacctctgggtggcaaagggaagcatgttcctgccaaggtttgctgtggattcagaagcaccaggagcaagagaccagaaggatgatctgctcctttgtaacgttgttgagggccctcttgtttccaatgagcagcttataggttactcacagtccactttctcactggacacacaaagtggctctttatctacctttgcgggagattttcactctcctgcaaatgatcgttctcacactcatattagctcatgttggaatttcccatcctgccatgtcctttcccatttctttttggcttttttgcctccaccttttagcccacatcatttaactccactactgtgaaagcttgcttaaagaaaatccctcttggccgggtgtggtagcccacgcctctaatcccagcactttgggaggctgaggcggggagatcacaaggtcaggagatcgagaccagcctgaccaacatggtgaaaccctgtctctactaaaaatacaaaaattagctgggcgtgttggcacacacctgtaatcccagctactcaggaggctgaggcaggagaattactttaacctgcggggggagcctagattgcgctactgcactccagcctaggcaacagagggagactctgtctcatt

SEQ ID NO: 7815 - DNA, 20 bp, Homo sapiens
atggggacagagcacgcaat

SEQ ID NO: 7816 - DNA, 781 bp, Homo sapiens
agagggctgcagggaagtctcttgtgggtgccaacttaggggttgagcaggttgatgatgagatcccagtgagaagatggggggcaacactgaccatttggtgctgagcgctggcctctgggttgcctcttgattaccccaagacagacacaaagggcagaaggtgcggtctcaacaagataccaggtgaattgttctgagtgttgatggcaacagcttggaagatgattgcatgcatcctcataatcatgtattcaatggactgtaatttatgatttttcaaaatcatgttacaagatagacatattctacttagacgttaaactgtacaagtgcgtacaatgtgaccttctctaaatgcggtagattcaaacaaagatgctctgtagacaagtagaattaaacctgcgaatccgtgtaaaaattcagtgaagacatgcactgctggcttctttattttttttttctttttattgaaacccagtcttcatttagttgctaaggcttttaatacattttgaatggcaccaaaacaaaataagtcaaaatggacagtcattttatttggaggaaatatttgaacaagtgtctccaatgtgttgtgttttgtcatgaaccttcattttcttcacttgtaattagagcttgctacgtgtttatggaactgaaagctcaacaggggagcaataaaccgagaaatcatgagaaatgtctaatcccatgggaaaacctgtatgccgattttcctcaagccatctcacaaaataagaatttcaaatgt

SEQ ID NO: 7817 - DNA, 1631 bp, Homo sapiens
ggttgctgaagcaccattcagcatctggatcctgattctccttttaagctaaaatctcatcaaggcttcaataagaagatggatatggatatatagtatattctactcctgtaaggaaaatggtatttggaattccgaattgacaggttatctggaacaaaggagcttctttttttttctaggttttgcaggcatgaaatagtgattatatctgtggaaaagcataggaaggcattctcctttttcatttttttcctttggctggcagctcttcccagtgatgttgagagcacctgcagcaatctggtccccagtcgcacaacttcccacatacccagaggagagcatatgcctgtgggggcagtgctgatggcatccagagtcattgctgtggctgagctggaaggaaatcaccaggtgccaccgtcaatatttatcagctttcagcactggttttgttagacagtcagggtgtattatttcaagagcttcaataaaaaaagtgtttgcaggtatttgtcatatttctttagtatgcaataatgctatcttatcctttttagtgctatttctcaggttttctcagtcaaccagctagatgcatgtgatgcatgtctatccttcactttttttttttcatttctggattttcctgggatttctgacaacacaaaagtagaaagtgcttggtatttctgtcttatacataggaaaacatttaaaataaatagtttttaattgtaggctcaacatctgttaccccatagctttttcgtatattgtttctttccctttgaatttctttttactgtcatctattattttaacaggagttaaaataactcctgttaaactttctgacaatatcataagaattcatattaaaggtgttattctttctggttgtgagattctagcacaaaggcctaaaatcatcaaattagatttccatttgtaaacaaattctaatgggcaaaatatcttgagagcagtttttatatggattatccataaaatgacctttacatatccctgcagagttggccttttgcccgtggtgtgctagtagctttggctgatgctaagctttcctggtatgcgccctatttttaagaagtaattgcttttgaattaagttatagcattactaattcatgttaatgactaggaaaccctctgtaatttacaagatttttcaaattggtggggagtgaataaatacaatttaaaagtcagaaatcagtttggcaaagtgtactttcttaatttctatttatgatgaagtatagtcataatttatttgtaatactactttatggtataccagtgaaagaactgtagtataaaaaagaggtattaatgttttatgaaatctcatgcatcagttcatagcataaaatctagctggacaactaagaagctatggtagcaaacagtgatgttgatggaatgagaatcatgaactttcatattacctcaaaggatttttttatcagtttttttcacacatcagaaaaaactgactgtataaacacttatcactgacctttttctatgtgtagttttgccttttatcttttcccaaatttttataaagagaaattaataaatattttattacaacattgtaa

SEQ ID NO: 7818 - DNA, 5279 bp, Homo sapiens
agtcaacatgcctgccccaaacaaatatgcaaaaggttcactaaagcagtagaaataatatgcattgtcagtgatgtaccatgaaacaaagctgcaggctgtttaagaaaaaataacacacatataaacatcacacacacagacagacacacacacacacaacaattaacagtcttcaggcaaaacgtcgaatcagctatttactgccaaagggaaatatcatttattttttacattattaagaaaaaaagatttatttatttaagacagtcccatcaaaactcctgtctttggaaatccgaccactaattgccaagcaccgcttcgtgtggctccacctggatgttctgtgcctgtaaacatagattcgctttccatgttgttggccggatcaccatctgaagagcagacggatggaaaaaggacctgatcattggggaagctggctttctggctgctggaggctggggagaaggtgttcattcacttgcatttctttgccctgggggctgtgatattaacagagggagggttcctgtggggggaagtccatgcctccctggcctgaagaagagactctttgcatatgactcacatgatgcatacctggtgggaggaaaagagttgggaacttcagatggacctagtacccactgagatttccacgccgaaggacagcgatgggaaaaatgcccttaaatcataggaaagtatttttttaagctaccaattgtgccgagaaaagcattttagcaatttatacaatatcatccagtaccttaagccctgattgtgtatattcatatattttggatacgcaccccccaactcccaatactggctctgtctgagtaagaaacagaatcctctggaacttgaggaagtgaacatttcggtgacttccgcatcaggaaggctagagttacccagagcatcaggccgccacaagtgcctgcttttaggagaccgaagtccgcagaacctgcctgtgtcccagcttggaggcctggtcctggaactgagccggggccctcactggcctcctccagggatgatcaacagggcagtgtggtctccgaatgtctggaagctgatggagctcagaattccactgtcaagaaagagcagtagaggggtgtggctgggcctgtcaccctggggccctccaggtaggcccgttttcacgtggagcatgggagccacgacccttcttaagacatgtatcactgtagagggaaggaacagaggccctgggcccttcctatcagaaggacatggtgaaggctgggaacgtgaggagaggcaatggccacggcccattttggctgtagcacatggcacgttggctgtgtggccttggcccacctgtgagtttaaagcaaggctttaaatgactttggagagggtcacaaatcctaaaagaagcattgaagtgaggtgtcatggattaattgacccctgtctatggaattacatgtaaaacattatcttgtcactgtagtttggttttatttgaaaacctgacaaaaaaaaagttccaggtgtggaatatgggggttatctgtacatcctggggcattaaaaaaaaaatcaatggtggggaactataaagaagtaacaaaagaagtgacatcttcagcaaataaactaggaaatttttttttcttccagtttagaatcagccttgaaacattgatggaataactctgtggcattattgcattatataccatttatctgtattaactttggaatgtactctgttcaatgtttaatgctgtggttgatatttcgaaagctgctttaaaaaaatacatgcatctcagcgtttttttgtttttaattgtatttagttatggcctatacactatttgtgagcaaaggtgatcgttttctgtttgagatttttatctcttgattcttcaaaagcattctgagaaggtgagataagccctgagtctcagctacctaagaaaaacctggatgtcactggccactgaggagctttgtttcaaccaagtcatgtgcatttccacgtcaacagaattgtttattgtgacagttatatctgttgtccctttgaccttgtttcttgaaggtttcctcgtccctgggcaattccgcatttaattcatggtattcaggattacatgcatgtttggttaaacccatgagattcattcagttaaaaatccagatggcaaatgaccagcagattcaaatctatggtggtttgacctttagagagttgctttacgtggcctgtttcaacacagacccacccagagccctcctgccctccttccgcgggggctttctcatggctgtccttcagggtcttcctgaaatgcagtggtgcttacgctccaccaagaaagcaggaaacctgtggtatgaagccagacctccccggcgggcctcagggaacagaatgatcagacctttgaatgattctaatttttaagcaaaatattattttatgaaaggtttacattgtcaaagtgatgaatatggaatatccaatcctgtgctgctatcctgccaaaatcattttaatggagtcagtttgcagtatgctccacgtggtaagatcctccaagctgctttagaagtaacaatgaagaacgtggacgtttttaatataaagcctgttttgtcttttgttgttgttcaaacgggattcacagagtatttgaaaaatgtatatatattaagaggtcacgggggctaattgctggctggctgccttttgctgtggggttttgttacctggttttaataacagtaaatgtgcccagcctcttggccccagaactgtacagtattgtggctgcacttgctctaagagtagttgatgttgcattttccttattgttaaaaacatgttagaagcaatgaatgtatataaaagcctcaactagtcatttttttctcctcttcttttttttcattatatctaattattttgcagttgggcaacagagaaccatccctattttgtattgaagagggattcacatctgcatcttaactgctctttatgaatgaaaaaacagtcctctgtatgtactcctctttacactggccagggtcagagttaaatagagtatatgcactttccaaattggggacaagggctctaaaaaaagccccaaaaggagaagaacatctgagaacctcctcggccctcccagtccctcgctgcacaaatactccgcaagagaggccagaatgacagctgacagggtctatggccatcgggtcgtctccgaagatttggcaggggcagaaaactctggcaggcttaagatttggaataaagtcacagaattaaggaagcacctcaatttagttcaaacaagacgccaacattctctccacagctcacttacctctctgtgttcagatgtggccttccatttatatgtgatctttgttttattagtaaatgcttatcatctaaagatgtagctctggcccagtgggaaaaattaggaagtgattataaatcgagaggagttataataatcaagattaaatgtaaataatcagggcaatcccaacacatgtctagctttcacctccaggatctattgagtgaacagaattgcaaatagtctctatttgtaattgaacttatcctaaaacaaatagtttataaatgtgaacttaaactctaattaattccaactgtacttttaaggcagtggctgtttttagactttcttatcacttatagttagtaatgtacacctactctatcagagaaaaacaggaaaggctcgaaatacaagccattctaaggaaattagggagtcagttgaaattctattctgatcttattctgtggtgtcttttgcagcccagacaaatgtggttacacactttttaagaaatacaattctacattgtcaagcttatgaaggttccaatcagatctttattgttattcaatttggatctttcagggattttttttttaaattattatgggacaaaggacatttgttggaggggtgggagggaggaagaatttttaaatgtaaaacattcccaagtttggatcagggagttggaagttttcagaataaccagaactaagggtatgaaggacctgtattggggtcgatgtgatgcctctgcgaagaaccttgtgtgacaaatgagaaacattttgaagtttgtggtacgacctttagattccagagacatcagcatggctcaaagtgcagctccgtttggcagtgcaatggtataaatttcaagctggatatgtctaatgggtatttaaacaataaatgtgcagttttaactaacaggatatttaatgacaaccttctggttggtagggacatctgtttctaaatgtttattatgtacaatacagaaaaaaattttataaaattaagcaatgtgaaactgaattggagagtgataatacaagtcctttagtcttacccagtgaatcattctgttccatgtctttggacaaccatgaccttggacaatcatgaaatatgcatctcactggatgcaaagaaaatcagatggagcatgaatggtactgtaccggttcatctggactgccccagaaaaataacttcaagcaaacatcctatcaacaacaaggttgttctgcataccaagctgagcacagaagatgggaacactggtggaggatggaaaggctcgctcaatcaagaaaattctgagactattaataaataagactgtagtgtagatactgagtaaatccatgcacctaaaccttttggaaaatctgccgtgggccctccagatagctcatttcattaagtttttccctccaaggtagaatttgcaagagtgacagtggattgcatttcttttggggaagctttcttttggtggttttgtttattataccttcttaagttttcaaccaaggtttgcttttgttttgagttactggggttatttttgttttaaataaaaataagtgtacaataagtgtttttgtattgaaagcttttgttatcaagattttcatacttttaccttccatggctctttttaagattgatacttttaagaggtggctgatattctgcaacactgtacacataaaaaatacggtaaggatactttacatggttaaggtaaagtaagtctccagttggccaccattagctataatggcactttgtttgtgttgttggaaaaagtcacattgccattaaactttccttgtctgtctagttaatattgtgaagaaaaataaagtacagtgtgagatactg

SEQ ID NO: 7819 - DNA, 95 bp, Homo sapiens
ggccacaggtccgagatgcgggggttggagtgcgggtgggctcctggggcaatgggaggctgtggagccggcgaaataaaatcagagttgttgct

SEQ ID NO: 7820 - DNA, 4044 bp, Homo sapiens
tcttcttaccccttggaagaagactgtttccaaataatttgaacagcttgctgctaaatgggacccaatttttggcctatagacacttatgtattgttttcgaatacgtcagattggaccagtgctcttcaggaatgtggctgcaagcaaggggctagaagttcacctcctgacagtattattaatactatgcaaatatggaataggagaccatttgattttctaggctttgtggtagagaggtgaaggtatgagaattaatagcgtgtgaacaaagtaaagaacaggattccagaatgatcattaaatttgtttctatttattcttttttgcccccctagagattaagtccagaaatgtactttctggcacataaagaaatcttgaggactttgtttaaaccttccataaaaaaacaattttcggtttctcgggttctctctctctctctctctgtctctctgtctctctgtctctctgtctctctgtctctctgtctctctctctctctctctttctttctttgtgtattttattcaagatgagttggacccattgccagtgagtctgaatgtcactgacagccctgtgttgtgctcaggactcactctgctgctggtggaaactcatggcttctctctctctttgatcccataaagctacgagggggacgggagagggcagtgcaatgggaagtaaagagatattttccagtaggaaaagcaatgctttcttgtctttagactcaaatgcttagggaacgtttcatttctcattcatggggaaaggcagcctccttaaatgttttctgaagagcggtaaaatctagaagcttaagaatttacagttccttcaataaccatgatgacctgaagttcacctatcccattttagcatctacttgtttttcccatctcttcctttccaattttgcttatactgctgtaatatttttgtaaaaaaaaaaaaaaaggaaaaaaaagaccagctaaaattttcgacttgactttttaacttaactcatgaattaattaaagcaaatgaaaaaattaaaaagtgtgactttttctcggagcatatatgtagcttttaggaaaggctgatgatggtataaagtttgctcattaagaaaaaaagacaaggctgattttgaagagagttgcttttgaaataaaatgatcacctgttctttatgtgactctcccactgaacctgcagacattatttttataccacatgctaaggaagcccactcatctaactctgtagccctggaaaccctcttggcccctgaatgttgtttccaggttataggatctgtgttcattagtggattttgacagcaagtgcctctgatgagttttagccaacattccccgttgcatcctgctcattgttcacactcctctgacttgaggagagctgccttcaccttgatcttgtaacctgtcttccttgcatatacggtagcacattccagatcacttcggtgagaaaagacctctgtttttgaagaggaaactttcttaaattgtaaaataaaacttaaaaaacataaaaactctatacaaaaattgaagacctaaaaattatagcataccttttttttgctcttgagtttttgaagctcttgactttaaatgacttaactttttaaaaaataagatgttttatggctttaacccatgtttttattaagatctgagaatagcatattttaaacactgatagatacagaagaaattattatttaatatataaattgcttggaatgatttcattgcagcttgtaaggatgggttgatgccagaatggtttcataaatctttcagtcttacagagccaaagtttgcagattatatcgagttgcgttgtgcagctgctaaaatggaatcatagctttttataatttgcagaaaacaattgcattaatgtctggatgtttctcagttttattcttttctcataaatgttcctcgaatgttggcaccttctactgctgatctatattagaatctagtccaagaaagtgtctgatttaataacattaaatagttatttcaatatattttttcaaattatcctcatagaacctgttgcctccagtgagatggtaatctactacccgaataaatttaagagcacctgttgagagcccctgttttgcggtagaagacaattgtccctatcccaatttccactgaaatatgagagcagatttgcagagaccatcatgtcagagaagaaatttccttgtcagagatgttaaagggctacagtcccttagcaaagaaacttcgaaatctaagttggtttgtgtttttctaaatttgataccgtaattcatttggcagcaaaatctgacttgaactgatgtgagagtattgtactttatatttatgctacttcattgtgacttaattttccctgaagaaatatccatggatttgattataggttttcccttagatgctgtggaggtgttttgtaatattcaaaatatgcccatattgcctttttaaaaccccaaagattatgaattctgaaacacatccagcccagcgggttttggataaggggttgtaggcatttaagcagcctcacataatgggctgacttcatccaaaacatgaaaatattacaaggcaaattctattttttatattttttggttcaatgcttgaacaacttgtttttctgctgggggaagaaaaaaagaaccaaccctgagtgtgattgttacggaaactaatgactttgtttttaaaggatcacattgattcaacaccttctattggacccagaagtgcgtaaatattacctatggtagtaaacgtttaattatcattcagtttaaatgttggccttctgtatgtagccaagaacagctcattttgtgaatttcagtttttaagtggctgctttttgatttggttgtattattttattataatgtatttgcaagtatattaaaaaattaacattgagccataaaaatccccaaatatgttcaaggacttcataattgaaaaatatatagaaaacaatccttacttctttttacaaaaacaaaatcatgggaattattcttttctatatatttagttataaatctttctctgggccgggcgtggtggctcacgccagtaatcccagcactttgggaggctgagacaggcgaatcacgaggtcaggagttcgagaccagcctggccaacatggtgaaaccccgtctctactgaaaatacaaaaaattagctggacacggtggcaggcgcctgtgtgtggcgggcgccagctactcaggaggctgaggcaggagaatcgcttgaacccaggaggcagaggttgcagtgagccaagattgcgccactgcactccagcctaggtgacagtgcgagactctgtctcaaaaaaaaaaaaaaagaaaaaaaatctttatctggatctgttaaaccatatattattgatcattgcaagtgaaattttgagagattgtttctagtatttaggtgatgaaaacatttggtaatattgctttggttcaaagaattttatgtctttatctttctagaagaaagcaattatatatatatttttgctaaattacataaacatttaattacatcaggttctaatttaaacatgtattactcacttgaggccacttttaaatattcatactctttgacataagatgctttgtatatttctcatttcttttagttcttagtaagtcagctttaaaaagtacctgccaaccagaaccttccatattctggactaaatcttgctcttcggattatacttcagtgcagtaactgtggatttgcaattttgaaggggagatagtagctattatattttacacttgcttgatgtgataactctaaagactttttaactgataaaagcgcacatggctattttgatacacaaagttgtgtttgctactttagaagcttttgtggcagaattgtaatctaattttcataccttgtatttctgaatcacaacaaaaaaataaatggggaacaagactta

SEQ ID NO: 7821 - DNA, 1781 bp, Homo sapiens
gccaaagacaaggaagatgcttaccatatgtattctttctttcatagatatttttgtctatttggatcgcattaattgtttccagtaaaactcttttaccacagggaaatacacatctcacttcagagttccattaggttttatattgtacttttcctccattacttattaaatactcctattaacaaaaggtacaaaataacaggttatgaggaaatgagcgatatatgaacggcataaaaacagaaattacccagtaaaaaggatgtcagaaattgacatacaaatatttacaatttttatgaatggtggtctttgcaaagagcatttatattttcttttttttttactaaaatgatatagggtttattttatattttcaaaaaaattgttaaacatcattcttatcaatgtaaaatttacgttattaaaaaattacaaatgatagaatctttactcagggatgggcaataaaacagcaaagagctttgtgattgggtttgaaagattttgaattatagacagtgctcttaatagtttttaataagttgatatttttttctgtgtagatttaaataatttctttaaaagcgtaagctttggctgggcatggtggcttatgcctgtaatcccagcactttgggaggctacgatgggtggatcacctgaggtcaggagttcaagaccagtctggccaacatggtgaaatgccgtctctactaaaaatacaaaaattagctgggcatgatggcgagtgtctgtaatcccagctactcaggaggctgaggcgggagaatcacttgaacctgggaggcagaggttgcagtgagctgagatcgcgctactgcattccagcctgggcgccgagatagcgccattgcactccagcctgggcgactgaataaaactctgtctcaaaaaaaaacaaaaacggtaagcttttatatttaattaactgatacctttcactgtgcaatctcaagaggaagattttctaaattagacattgtctttaccttaaagaagaaaattgtctatttcagtgtcttttttagcaagattgaccaaaacaggtggtaggtgtgtaatttttaactgtcatgaaatactgtaatgcgcacctttgctaataaggaaatggtctccctttgaattatgggaagtttcttgtctgtgatatggggtgtctgtgtacatatatgtatatttccttttttaatacaggataataatatggggtcttgtccttcaccttttaagttcagggaacagtttgtcctgaccacacatatgttatcagtgtaatgctttatgaagctttagaaatgagctcatgactcattaaaaaataataaacgatgctattttaatattttcaaataaataatctgaggatgtgtttcatactttagcatcaacgctgagttgtgccttgtagaattgcattgtctatacatgcaaaagactattaagttaggatgaactagattccctaattacagtgaaattctatcttgcaaatgctatagaataacttgcattttaaagtgtatttgcacattttacatatgctatgtggttgcctttgggttttctgtacagattgtttttgttattaaatggaaaaggcctgaattatgctcttatgtgaagtaaattgatataacctattgactgtattctgtgtattattctttattttgggaccttctgtgtaaaagaaaatattacctaaattggttagatacaaagaaatcattaaaattattaatgtatatatg

SEQ ID NO: 7822 - DNA, 458 bp, Homo sapiens
atgcaattagtctgtcactccatttagaaaatgttcacctagaggtgttctggtaaactgattgctggcaacaacagattctcttggctcatatttcttttctatctcatcttgatgatgatagtcatcatcaagaatttaatgattaaaatagcatgcctttctctctttctcttaataagcccacatataaatgtacttttccttccagaaaaatttcccttgaggaaaaatgtccaagataagatgaatcatttaataccgtgtcttctaaatttgaaatataattctgtttctgacctgttttaaatgaaccaaaccaaatcatactttctcttcaaatttagcaacctagaaacacacatttctttgaatttaggtgatacctaaatccttcttatgtttctaaattttgtgattctataaaacacatcatcaataaaataatgacataaaat

SEQ ID NO: 7823 - DNA, 459 bp, Homo sapiens
atgcaattagtctgtcactccatttggaaaatgttcacctgcagatgttctggtaaactgattgctggcaacaacagattctcttggctcatatttcttttctttctcatcttgatgatgatcgtcatcatcaagaatttaatgattaaaatagcatgcctttctctctttctcttaataagcccacatataaatgtactttttcttccagaaaaattctccttgaggaaaaatgtccaaaataagatgaatcacttaataccgtatcttctaaatttgaaatataattctgtttgtgacctgttttaaatgaaccaaaccaaatcatactttttctttgaatttagcaacctagaaacacacatttctttgaatttaggtgatacctaaatccttcttatgtttctaaattttgtgattctataaaacacatcatcaataaaatagtgacataaaatc

SEQ ID NO: 7824 - DNA, 728 bp, Homo sapiens
ggctttttaccatcaaaatttttaaaagtgctaatgtgtattcgaacccaatggtagtcttaaagagttttgtgccctggctctatggcggggaaagccctagtctatggagttttctgatttccctggagtaaatactccatggttattttaagctacctacatgctgtcattgaacagagatgtggggagaaatgtaaacaatcagctcacaggcatcaatacaaccagatttgaagtaaaataatttaggaagatattaaaagtagatgagaggacacaagatgtagtcgatccttatgcgattatatcattatttacttaggaaagagtaaaaataccaaacgagaaaatttaaaggagcaaaaatttgcaagtcaaatagaaatgtacaaatcgagataacatttacatttctatcatattgacatgaaaattgaaaatgtatagtcagagaaattttcatgaattattccatgaagtattgtttcctttatttaaaaaaaaaaaaaaaaaaaaagaatgctaggtaatcttcgtagaaaactagaaagtatgataaacaacagttggaggaatccatggaaaatagacgagaaaatgtaaataaggctttctggggatcacagaacttttgtatgaataaaagccttataaaaccagctctggcatatgactaaaatattcctctactatttttcaatgtcatctaatgcaaacgctcaacc

SEQ ID NO: 7825 - DNA, 4388 bp, Homo sapiens
atgctgcaggtcagcagaaatttgcactaataatacttaccaacccactttgtggatatgaatcagaagagtttgtttattctttagtgtgtgtgtgtgtgtgcacgcgtgtatgtgttcagtgttgtttgcacagagagattgttttaaaaaatggcaccatatttggcctagcaggatttatttttatgtcatcacctcccttgcctttgtttctgaaaattttgtctgctaaaaagtttctgctacagagtggtagatgaagttatatcatggggtcaggggagatgggaaaattttaagtttttgtctaactccccttcatctgtaactgtgctaatctatctagagacctcaaacactgctaaaggccttgcaattgctgctttacccacgcatctcttgctttcaagatggactacaaaagttccttatccttttgaaaaggtcttctgacacacttatcttgcacaaagaaaaagaaaatttcttttactgtgtttaatgttcagtgatatcactgaggaaatggtgaaagctcctatcagaactataggatttcttctgggaaatacagatggaaatacagaatgaatatgtttttttgaggtcggaaactgactttaaaagcctccttgaagttttttacttagaaatataaggaataagtctttgaacaatctgggtggcaagggctggtagattattttagacatgattgtctgtttaaaactctcctttcactttttatcctccctggagctacagctgttcgccatcacatcactcccatcctatcctttctgtcactgtcaagcaaaacaatcagtagttactaatcgctgaactctcaatattgtggggcattttccccccagttgattaattttgcgttaaagactgacacagacttagaatcaaatttatttttctggaattaacactctgtgactcaaagtagtgccactgcagtgtctttttaaactggaaacagaattggaaaactgcctgacttatcttgcatccctttgaatgagtttacagactgccagtgtctgcaaaagttgaaagcaaatgggagatgatgtcagaggcatctgtttcctttaccatctgcatcttattataaatgtagtcgtcataaagtgtggtttattttattttggtaggctctgaaatcaaaatgctacgccattataagccagtggagtaattacaatgtattggatgaaaacataaggcagtgtggagacttgatgaaaatctctgtacagattgcagtcttcttcctgatgtttcaaactgtggttcccccaagctctctaacacttggaagtctgtcattctgacctagataaaagtggttctttctcagtagttattattatgtcaaaatgtgcctccagagtgataaagctctgtatatgttagattccagctaaacctaacttggctgtcatttttcttccattatagtgtgagtggagactgccccccctccccaacatattccttcccatatctctcatgattgtccctctgtaatttcaaaatgaatgaaattcatgtgaatgtaggttgagagggcactgaagacctgaatctacactagtaatctcaagaaagattattcattctatctcagagttaccggcaagcatataaaatgctacttggataatatctacatgaatattgcatgctacatggttgataacactatttccattattgggcagaatctcagtgtttactttcaattcctaggatatgtgatcgtgaatcagatcacatataaaaagtctggattgtcagtagtattagatctgatcaaggtaggaattacaattgcatgcaggtagcaagcaagaaagcagaaactactgttccctttattttaacattgtacagacaatacagaaatgtacctgttggcggccgggtgcagtggctcacgcctgtaatcccagcacttcgggaggccgaggcgggtggatcacgaggtcaggagatcaagaccatcctggctaacacggtgaaaccccgtctctactaaaaaaaaaagtacaaaaaattagccgggcgtggtggcgggcacctgtagtcccagctacacgggaggctgaggcaggagaatggcatgaacctgggaggcagagcttgcagtgagtggagatgcgccactgcactccagcctgggcgacagagcgagactccgcctcaaaaaaaaaaaaaaaagaaaaaaagaaatgtacctgttggcaggagaaggccagatggagtatgtggagtaatagggaaagaagagttacagaaaatgaaaaagaaaatgagttacactgagaatgaatatgggaacacgtcattgatagcaaaagaaaggtacaggcttacgaaaatgatctttacaatgtatcccagctttcacccccacatggcaatgcagagttgtatttacttgtttctgtactcacctactcccaccccaagggaaaattttagacatgaaccctactatttagttattctaaaatagaaagtttgctggagaaagcgtccactcacagattgttctgtaaggaatgttatgtatgggtgagcgggtgacacatccattgggtatgtatgcatgtgatggtgcctgagacccctgccttagaaacagaattcctaaggggattgactctcccagcatgttcccaggtcctgcacccttagggtgatctaggaaaattttaaatagcttctactcttatttttgttctttgaaataattaaaagagggattatcactatctgatacttctgaaagaaacacttacaaaatttcttatctgtaaaatccgtctttttctacattaacttccccaaacataggcctaattgagataattgcttttattataataataggattgaaattttaaaattttgaaaggacttattaattttgctgacaaaagtgaagtaacaaatataatgataattggctttttaaattttcaaacaacatagatttactcaagatgaaataaaaaggccatattcagagttgaatttaatgaaaactcagaggaaataggaaaatctgctcaggagaaagaagctaaatctgcatagatttagtttgtagaatttaatttaaaatttaaattttaacaaagtgatgacacaacaatatgtacgtttaggtgtggacaccaaaatattagacatttgattgtccttttacatagagaataactaataaatgcctgacaagaatgggacaatccttccttgtatcaaaattcccaggtcttgctacattgccctctgcaaatgtattcaaagaagaacctcctccaccacttacttttggttggcataattgttcagcaacgatttctgtacatcaccaagtatctttggcattcttggtatacaaagtatatcacaattttaagtgagtaaatattaatgataatttttgaattgctttgtttggcttgattaactttgatcagaaatagaaacgttttcatttgttgatttaggaaaaagcataaatagaatgcagtataacaccacttccaaaggtaaggatacctaacattcttttttttttttttttttttttttttgggatggagtctcactttgttgcccaggctggagtgcagtggtctgatctcggctcactgcaacctccgcctaccgggttcaagtgattctcctacgtcagcctcctgaatagctgggattacaggtgcacgccaccatgcttggctcatttttgtatttttagtagtgacagcgtttcaccacattggtcaggctggtctcaatctcttgacctggtgatctgcccacctgggcctcccaaaatgctgggattacaggcatgagccaccacacctggcaagggtacctgacattctaagatatcaagacacttaatatgtgggctattagctgcttatttaaatgttgaccaaattgtctgatatatctgattaatcatgatttcacttcatttcggaagaaaaattatccatatcatttttaaagacgcaaatgactttggatttttgcatagagtacaatagacacttcaaacaatagattctaacattctctgaaacacttgagatgtttgagctaccatttatatgggttatttatatttagtctaagtaacacatacatgtttaattgattctgttttcatggatagattcaactaagtcttccaagcaattaattttttgttcgtcgtcgtttttccttcatacgttatctagttatgcagcactggaaacagactgaagatcataaaccagttttatcagacctatgtgtaataagactcctgttaatacaaaaataaaaagctaaaagcaacttgt

SEQ ID NO: 7826 - DNA, 3243 bp, Homo sapiens
gacttgatgactataaaatatttgttaggacttcaaattattaaagagtctatttattgaatttagacatttaatcatgatctttacagaaaagaacatgttattcgtattttgctaatatcaactgcatggattaaagtagtccctccatacatggggaagtgtttggagcaaagagatgaacagtttgtctgaaacaaacacagagcactccatcaaaatttacctgatctttgtgattagaacagaacaattctatttgcatgtttctctatctgaatattctgtgacaaaaagttaagattcttgggcagaatatttaaattggtcagtcaggtagaagatacatgtgtgatatagaaaaataatgcctctcctgctgccatccgtttccctcatatattttggacaagatttatatggacaaaattaagtctttaaaatttaggcactttaaggagaactaataactttttccatgtatcaagattatgaggttaaaaataatgtggttttatatagcatagtggttttattttgttagttatttttaaaggagaagaaatgttactttttaactttatactcagttgcattatcataaaattttcatatatgcctagataatggggaaaaaaagtcttgtgattgactttcgcaaaataaacaggatttactgagtagaggtttcagcccattccttggaatactaacaggtatttcatcagtcattgtaggttgggaagggtctctgttaatcctactctgctttagccagaatagcctagtattttatttctattttatatattgagatttcttctaacatttcctttgataaaaatcttctgctttttgaaaagtggtatgtatcatatttttatgtttctggtgtgtgaactttatggtaacttctactctagaatacgtacgtatgcacccacagacacacacagtttattgacacatctattatgtaatgctgtagacctgtccgtgtctgcttcataaggagtaacgactgacattagcatgtccagtgacaagtcacatccggtgtaaaaaaaagagatcagccagttaccttctccattgtcttagttctgtcacccatttcgtcaagtgacctctcatcttctataaactaatacaggaattctttccaaagcaatgtctaaaaactcttttttttaaagtaacagtttggtatgtttattgtagataaattatttttgaggccttcattttagctaagtttagaatttatattaggcaactatgatttgagtggttattcattgagtaattttccactataaagaattttattgaacatttattaaaaaataatgtaatgcatggtcaaaaaatatgtaattcatggtctggacactgacgttgtttagggatttagtcatcaaggacagccctctgttgtttctaatgccgtactaatcaagactgtatggacacttgcatcttaagtactaaggaattactagtgattgttttattttatccatgtactcttttagtatttaataattaaatacctattcttagtgtttgacactccatatttcttttttttggaaatgaaacaaatatgcagtccaaaattcaggaactactagagtgaaatgatattaagtggaaaccagagataaatgctgttaatttaacaagtagattcttctccaaagaatgatgagtgattcttgggaagataaatgttaatgttcccaatagtcaagcttgttttgcagtagtgaaaagcttagatgagtacggatacctcatttgaaactcagcctagtaaggaagtgaaaacttagcagtcagtgacatggggaaatagttatagaaaatgtcactgaattttttcatatttataattagtcatttacatatttttgtcttgttgatcattacctgtaaatgaaagaccttaataggaaaaaaagagtaaagctcagtgtgaatgcaaacatccacaaaatatgatcttcgtttatattctgtgatgttgtttataaatgaatgcctcagttctctgctacccttttcacagctttgtactgtttgccttatattctatttgtgcttttaaagtgtgtctgttgggaaaacaaaatgtgtaggtggtttgtaagtgaataatttttatttcttcttgtattaaaattttgtttttttctctactttgggagatgtttatttacattgtcagactattcacaaaacagattctaaaatttgtttgctcgtatgctgttcccttcaatgtgatatcagagattactatgaatgttagtttcattccgtgaaacattacttccatataaagacagatctcttaataagtgaatctagtggaagaacataggtatcattctaattccatggtaaattttgtcatgattctatatgaataatggggtccttcaggaagttggaatttttgccttctcttttaattgcagtgaagttctctttataacttctaaaattcggaattctagatccttgcttttgcagaatttggtgctcagacaatatttaaggacatttcagcgagacaaagtgcatgtttttatcgagtaccctgtgcaccacattatatctggcaattctttttgtttcattatgtgcatcaatatttttctcagctactattacctgaaacttgtttaacatgtattagacctagaattttcattttctttctcacatagttgcttcctggtatctgatttagaaataacatttaaatgccaagtatctgggggattgaaggaagggtctatatgagcaggtgaattagcagtactgtttttgtttagtggatattgttagtgactttttgtgtgtgttttgctttgggacctttttattttggtgttgcaaaaagtaacatattttcatcattgcttcatacgacatggagttaggacagggaaaaatcattcaacactccttatgcattaaatgatcaaataaaccagtgtaggatattaagactatcaattggtgggattaggcttgacattttatttttataaatatatattttttctgaatgtgtctgagtccaagagtgggcaaaaaataattttctactttggactaatctatagaggtttttgaaagtctgcattactaacttgttgaattcatgatattctgcctatggcacaaattgtaaacctttgtttttctaaaataaagtaattgaaaacctgc

SEQ ID NO: 7827 - DNA, 1355 bp, Homo sapiens
gcttattcttgacatgagtgcattagtaatgactcttatgtactcatgcatggatctttatgcaatttttttccactacccaaggtctaccttagatactagttgtctgaattgagttactttgataggaaaaatacttcattacctaaaatcatttttcatagaactgtttcagaaaacctgactctaactggtttatatacaaaagaaaacttactgtatcatataacagaatgatccaggggagattaagctttgggcaagggctatttaccagggcttaaatgttgtgtctagaattaagtatgggcataaactggcttctgaatccctttccagagtgttggatccatttccctggtcttggcctcactctcatgcaggctttcctcttgtgttggcaagatggctgccaactcttggcaattcatacatccttgtttctgtctggtagagagtttgcttctcaaatggagcaaacaaatttgattattttttcattgttaaataggcaacatgaccagaaaggatggaatggcttaagtaaactaagggttcacttctagagctgagaagcagggtcaaagcacaatactgggcaattcagagcatggttagaagaggaaaggggagtctcaaagctggagagtttaccaacaaatattgactgcagtgattaaccaagacatttttgttaactaaaaagtgaaatatgggatggattctagaaatggggtatctctgtccatacttctagaatccactctatcagcatagtccagaagaatacctggcagtagaagaaatgaatattcaagaggaagataaatgcgagagggcaatcctttactattctcatatttatttatctctcattctgtatagaattcttgccgccatcccaggtctagccttaggagcaaatgtagtagatagtcgaataataaataacttaatgttttggacatattttgtctacttttgagaattatttttaatatgtaaattctctcaaaagggtcaggcacctagttattattttttaatgattatgtgaaagttgaatataatataccactaaaagtgacagttgaaagtggtggcataggacggtagggtagaaatttgggagggaaaaaagaaattgggagggtacaggcaacaggagaaaggaatcaaaccacagaaaaatacaaagggaaacttctgcttcactattcagacaaagacagccctaatgacatcaccaacagtcaaagcaattagagaccatacctaatattgtttaaattctagatgtaggctaacaatgaaaagtatttgccaaactgaataaaactgtcatggttaccttg

SEQ ID NO: 7828 - DNA, 346 bp, Homo sapiens
gtgccatgggatgctacaccttgaagctgacagtcatcaacaggggagctaaagttgaagccagctgtgtgtagcagctgttacctgaagacgtgctacctctctacaaagtgttgatccccttctttcccatgagagagagaactggtgatactccaacaccgtccagttgtggcagctctccagaagtaatagcagctgacaactttctgtgccttttcctttctgttgaaaaggcatagaaagttctgggaacataaacatttttacccttttctatgccatttattttgtaaaaatcctatttaacagttatttaataaaacaatatttttagaaactaaaa

SEQ ID NO: 7829 - DNA, 1496 bp, Homo sapiens
acacagagccccctagatggtgggggaatggcaaactggacccaggactccgccctttaaaacaccctgaacttactggaattggacaccttgtttccaacctccgtcagactgttgcagtagaagaatgatttcctttgaaacctccagtacttttgtttttgttttttggaatactgacaattcctcgggaacctggcctctaattagttttagatgacaaggtcttaaggagaaatgaaattatcgatttgagcaatttgtacctgtgattgtaaagtcaatatcggattttattgttgggaccatggacctcttttgtttgtatgttgtattgtcgtcccaacggaaggagagctcctgactccaggatgggctgcaggttgcagtcagggcttgaagtaggagcccagcaaagaaccacctgctggacagtccttgacatgtgttctgtgtgtgtctgtatagccttaagaaaaagaatggcttcactttcattctgtattcttccccccaccatgtggctgggaggacttgggagggggatggggacattgggaacctgtcaagaagtgctttatccagagaagcaaattttgcacgattggactgcaatttttgttttgtattgtttgtgttttttcttgaaaagctttacttttctttccacactcagctctccctcctcaaccccacttttatttttcttgctggggttgaggagagaaaatatagaattcctggataagaccaaacaaaacaaaacattaaaatacctgtatgttttgttttagacgagaccaaactaaacaaaaagtatctgtttatcaaagtaaaagtaacacaatggacaattctgcttattctctcaaagagattctaagatgcacctttagaactattaatagcaacctgcatttttttttaatttatacttcagaatcctttaagaacctggtgttcctgagtggtcctgaatcatataagttggtaatggaagctgtaatgaccaagtcccctaaacatactatgtctttgccacgtgtgctgtgacttctctgtgggtgatttaatttatttggatccacctctgagtgagcgcacagtgatcaggtgcttcaaagccaacagaccagctcctcttcctccggatcctcttttgatctgcccaggaaagggatgcattgacactctcctgcatgcacctggcgagaagccacctgaaagtcactgtggttaaagatattggtggaggtaccccaggagcactgttacaaatccttcttgttttggcatctcgtacaacattattaagacacagctgagagttgatgggtgtgtaatgcatatgccaaggaaatgtcactaatcccaaagcaatcaaaaaggagacctcaaaccagatgttaatttgttctttgtgtaacaatgtaaccaaaatattgatgataaaagtcataatttaagattcagaataaatgggtttgatgtctggc

SEQ ID NO: 7830 - DNA, 1275 bp, Homo sapiens
aaggcaaactccttagcaggatctacagagtgtttcgtgatctctccttctccatcatctcatctctggatgctgtggtgcccagaacgttgatctaacaccatcttgaagcacacatgctgatctccaggtgcaccacgatttgtgcccttgaaaatgctgtttgctcaatctttctggagaaagtttgccacatattcggacttagtaaattagaactcctaccttgaaacccagatgaaggttcaattttccccaggattcctttcctcaccattctcctatgtgagggacttcttgtattataatcttttaatataatattatattttatgtaatattgtgttaaattatattgttttatgtaatatattattttaaatgttattttatatatgatattaaaagattataattatataatctttttcgataatttattcttgtattacaatctttttattataatagtctccactctccccaaaatattgtgaattcttcagctgaggagttttgctttagtttcttatcgccatggactgggaattaacatgtatttaacacattttgctcaaacaatcaaacagtaaaagctgaagagagcgtattattattcgcccattccgagagaaagttgaagatgactgaagaactaaaaatacataaatgaattaagtaattataaacataaatttcctgtagctccaacatgactttgatctgagtaatagtgttgtgaaatagattactacatgattttcattgcttttatattatatatagtaattaatattcagaatagttgattaactttcttaagtgtcacataatttaaaaatgaaattgctgtttgccccagatatgtttttctgtgttctttttaaatttcagtgaaattttcttatactcccttcattaaatctattatctggtttctaaacctttacctatttaatgtctcttttcctttctttctaaaaagtaactggttaaactacagttttgtcatttatgaaattttttctgttattattgtagggatagtcaatattatcattttaaggatagttaaaacttattttgcaattaatacgtattttacagtacactaatatgcatatatgttgtattttattaaaatattaaaatgttttttaaacaaaaatattgtccgaagctctaaataccagagtattgattttaaagtctgccaagacaataatacaagtaacacaactaagcctttctttaaataataaaacgagtatctaa

SEQ ID NO: 7831 - DNA, 613 bp, Homo sapiens
agaagaactatttatacaaacatggggactgtgaaaagaaaattctatagtgaattgtgaaaagtggacatatttctaaattcattccactgcctttatccaaacttaagaattacagacatttgttattccttcggcaagacatccccgctgcacactgatatgttcatttcgtaatttggttgctggccaccaagtgctccttagtttttaaatacattttgagattaactggaaacttgaagaagaaattagttcccgattaagactatcccaactttatttttattgtcagtttcacttttgtttctatgttgttttatgtctttgttatataattgtacattgtgtgatatgtgaaaaaaaaacacgaatttggatgaaccttgtgttacatgtacattgttttcattatatagacagcttgagaatagtgcgttcctgaatgattttgaacatgctacagtgaaaagtgacagtgtggaccatggaatcaccagctagaggttatggactatacacacctattattatattctgattaaatacaggaaaaagtaacaagtaaaattactagattgcaataaaaaaattcattttttggtctttcctg

SEQ ID NO: 7832 - DNA, 90 bp, Homo sapiens
cagtaggtggcaaattattgttgttatttagttgtttatttttgactggctttgttcttggtgttgaaaattaaaataaagcaaatctgc

SEQ ID NO: 7833 - DNA, 373 bp, Homo sapiens
ttggtggaccaactgggtgatccctgccatctctgcagtggccgtcgccttgatgtatcgcctatacatggcagaggactgaacacctcctcagaagtcagcgcaggaagagcctgctttggacacgggagaaaagaagccattgctaactacttcaactgacagaaaccttcacttgaaaacaatgattttaatatatctctttctttttcttccgacattagaaacaaaacaaaaagaactgtcctttctgcgctcaaatttttcgagtgtgcctttttattcatctactttattttgatgtttccttaatgtgtaatttacttattataagcatgatcttttaaaaatatatttggcttttaaagtatgc

SEQ ID NO: 7834 - DNA, 2884 bp, Homo sapiens
aaacagaacaatgacataaatcaagggagaaagaaaatgggcactttatgtctcagaattactcaaatcaatttatttttagttggtaatggatataatatttcttaaaacaaaagtaaggtgttaatgaataggtctctccttctcctcctcctcctcctcttcccttgggggaaaaaaaaaaatgtgctaataaaacttccctccatggctaagagggaaaacgcttacattcaattctttagtcatggatggtctcgttccagatgttattgttccagggaactaaattcattcctgatgccagatctgatcgagtcagtatgtcttcagcttgatcagattttaaaatcagttttgaaagtggttcccgacttctttgctttgggagaatttggtcttatgctcataagcagttcatgagtgacaagtgtagcaaaagccagccatatattttcagaatctatatcctcaggaaatggtcctttttttttctataaatcaccaaccaactatctaaatggacatttgggggaattccctcccaaatttgattttgttattagaaaaatgattccgtgaacacagatgtgttttgaagaagtagcacgtaatggcttttatctaccatcaacctgataaggcacatgtgaaatggaaatgttctctttcctctgaagcagcaaattaatgttgaaaacttacatagacagaaagtaggttttggaaagggaaaccacagagattagggggacttaaaattaatataggcacaggaaagagaaaagtgtgcgctccattctcagtgggggttcaccacaaaacacgggccccaggagggaagcgctgtctaggcacacggcaaggccttagtaacagcatgctacactgctcgaggtacggtatgtcccatcgccctgtgcaccgtagagacctcagtcatctcaaggaagaatacatttgcttctccttagaggcgttcgaactagaagctatgcgttacctctgattctggaaacagaatagcagccactcattctgcattcccatttttctctccacgtgttctggtggaatgagatgctccttggcactatagcctgatgtcccacattgacccactgaccacacaggaaaagcagcgaaacctgcaccctctcttctgagtcacgcctgtggctcatcggcttccctcttaacctttagtgccctgaagactgctgccgctgtcaccgttgcgctgaaaccccatgggcccgttctgattgaaggtgaagcccaccagattatttttcaaagtcttaggtttcggtgtatctaacctgctcagtaaatatggacgcaattaaagatgctctaggaaatttggggactgtatttaatttttctttccttccatctgaggagcaaggaaatcctactgctgaatagctgttagtatctattttacaagatttactcattttcaggtacctaatgtagctgctagcatgcatgcacaacaatacaatttatatggtaaatggaaccaaataatggcttcactgaatgttatggctgcactgaagggaaatgtcacggtaaatagctgccaaattatggatcatgccgaagtgtcacaactgcactaaagacaaatagcactagaggctattgccactgtgacgcttttgagttatgaagaagggtagcggcctgatgcgaggctctttgtgtcctcattatagcaaagggttactggtgcaggggactaggaaaaacccgtccagtgtggtgcttagttattcatccatccctttcagacctaacagccacagccacacggaaagagactttgcctcacttttacattcacaaacaaacaaaggaggggggagcaggttttatgaatgtaactgtgcacaggaaatgactggtaatggaaaaaatgttgtaataaaataatctaatcaaagaatattattaaatttaacatagtctatgtccaaaaggcttagttgcttcttatgcagatagatgtgtgaaatctaagcagtaatgtactttctccctttgtaaagacttggggagtaaggacattaccaactaaattgcttcttcgaaactgaagtgagtcccggtttgtttcattttaatgggagggtaataaagatgaaagaccaacattttaactgatggatcccttaagctacagaatagaaatttattgtgttttgagggaatatactaaatgcagctatgtaaaaataaaattcaaacgcccaggattaaaataaaatataatctgaaaacctcatgttctctctttccccaaactaagaaagtgcactgcatgctgttttcacttattcttagaaaacaagcatgaaagattccgcccattcagataatgccaaaaatatgtttaaacttttttttattcttttgaaaaatgatttgtaaattgagggtcatagttcagcatcagtttcatcttctgggattattgttcaagaccagcctctaatgggaggtgaaacggtacgatggtctcaacacctttcttctgaactgtaatacatatcacaaaaagtacatccataattcagggcaattgtcagtctttttagagaaggggccagggtggaacaatcccagtgagtaaattatttctcagcgtggacttctctgcatgtcgggcttaaggtcaccagccgggcagggtggaaggagcttgcctctttgagaaaccaaggagtcccagtgatctgttaccatttggttatgacttctaaagagccaaatgctattccttcaagcctgttttgcaggcagaaaataccagcagtgtcatttaggggttcctttgatgatgactactgctgttaactgacctcagcattaa

SEQ ID NO: 7835 - DNA, 992 bp, Homo sapiens
atgacactacgtttctctctcatggccttcataccatggatttcccctgctcaagatgaaaagaaattaagaggaaatcagattgcttagagatagcagattattgctcactttttaaaaggagctccacagagagaatgaagaacgtgtaactttttgcaatgataatgtctgctttgttcttgaggggcactcttcctttttctgttcaggaatattccggaggagagctgcagatgccacccaaccctgcgaaatctgccctgcgtgtcgaaacagatccagcagtgcaaagaacttcttcattaggacatcaagcctgtagtcatattttcaattgctgctgtaactttttccttgcaagtgctttcacttatttcgggaccacctaaggctctgtgtggtatacagcaacacagtttgagatatttctgtgatgttctgtatatcatatagttgctaacaacctgtcaaagtcatcctgacaccaaactgagaagctgatggtttgggtaacatattagaggagatgaaaaaaccgacagtcctcattactgtaataaaaccagcagagacacactgagaatcaattactgattgtgacctaatgaactaaccctcagtcaagtagaaaactgcaccaagcctcttacattatcaaatgatttaggatggagcactgtctgaagacgggcaacaagtcgaggcagatgagttttcttatattgtggctgacttaattaccttgttcctgagtgcagagatcaaattgagcaacttaaggtgctaaagctctgtgccagctggaaatgaaaaggaaataattaacaccaacaagagctacgtctaaggttgtggcacctcctgacagaagcaaggagactcaaagttaaggcggctgcaaagtccttgacgaggtgagccctgctctatccgcctggctggattcgtccaggttgcctgtggcagctgtgcactgaagagtccggctg

SEQ ID NO: 7836 - DNA, 4031 bp, Homo sapiens
aggagttttagtttaaatggaaaaagcaaaggagaaatcagtaggtgaactcagccattagaggaagaactggcacgtagcctcttgctgtctaaggtctcgttccgtgctggagaatgcatatgagcccaagagtgtgggcctgagtggctgcttaggacgttttcgtttaactcaccccctcttttcctcacaagggatggtggccggggtgtggctcaggaatgtaaggacatgctgaattctggatctctaagggtgcctggacatgggcgttgcagaaagagagccacattctcagggtctctggtggtgtgtgcttgcggacttgatgactgatgttgcctctgcagcccacacgctggggttcaacactgggttatgctcgttttttcctggagtcagtgctgctagcttcatgttgctctgcgacaatcataggattgaggtcgaggaagacttttgaacaaactcctcaatttaaatccgccttgagcaaacgttctctgtggtctgagaagtggaaggggggagggataaatgagtgtctatgaatcaaagctttattatcttgtgattccattaatttgcatacagagtcttagaagtttctttattcaaaagcaaatgtggataaaaatgtattacaaaaaaaaaaaactctgctatggggtccagagtctaggagtggtttctgcagttgattgtcagtggagaacctgtggctgctggttcatcaaagcgctggtccctgagtgccattcagattgcagatgcagtattttacgtgatgtttagagtgtttggtggttgtgtaattttggagagaaagaagtttttcccaaaaaagtccctagtttattgggtgttctcacacaacctgtaagatgaagctgtttttctgcctgtgtgcagggctgattctggaattccagaaggccttgtgggagcgtaaaaggcttttgaataaagtgtggaacagagcgcctcattctgataacatgcaatcataaaaaccatagggcaacttggagttaaggagtttctagaatttgctttagtctccaactgcaattctttattgatcatgaaattgttgaagagaaacacaaatgtcagttttacctttcctgtgggcgtgaaagcacatcgaagtttcaggcaactgttaacatctctaccatctgtctgagttgagatttcaggttgtgacacttgccgtgacttatttgtaaatgacattttgtgtgtcttagatactaatggaattcatattctggctagttctttcagtgcatttgtagacatgttcttttcctttgtagcagtcctccctcaccctgaaatgttggtgttctaaccgatttctaatgctaatttcaactggaagcactttttcaagcccagctatcaaaccacaccagacatgtatggattcgggttgcccaataaagcgttgctattatgtaagcatccctcacgcatacagcatcaccagttttgaaagcttgaactattctgcttacttcaaggtacagaaaaaaaaaatgtacttaaactgtgcagaaaagatgaaatcactggataatatgtattataaaataagcttcatgtgagtgacactggtttaagttgaaataaaatggtgaaagcattgatatcaatcattgtgactttatctcaaaacaatattgacacacatagatgtttttcttcctttatggtaagattacagcctttattgtcttaaatctcttatactcttcaatattttcaaagaaaacattctagtctcagaaatagtccatctctttgcaaaacagggctggccaattatcaaggacccataaaaatcaaaacactttcaaaaattttaaaaataaaaataattttcacatgattgctttaggaattttgaagtatccattcttttcactatggagtgttgaatatagaagattttttaatgaacaggcttgccctttgatgccaaaggcaaaaaataataataataacatttgcacgtgtgatcacagagcagctgtgaggcatcccgggggagcgcacgcagtggggatgtgattgctccactcaactattttatcacaaagtgttgtaaacatgggagatgaaagcttaactctctctacacccagctacagacccgcaatggccctaaaaatctggggtattcattgggtgggctgccatggaggaatttttggttttgtttttatttttatttgttgttctgtttacaaatcaggagagcccctgtttttatatgctaggaaggtccttgggataggccgaagaggtgtgcaaacgagcagtggaaggcccgggccctgtctctcaggaccacggcggcctgccccacacacagttctgcttctccctatctagaacgaggttttcctggcagattcctgccagactctgagtggagcccccccatgaccctataaaaggggctgtttgtcctcctcccaccctcctgtgctcttcctccctccccttgagggcacatggccgctggtaccacatgttggagcggccgcccccgagcccgggaatgccctaacaacacccatgcttgtgttgctgggagctgacattcaagaaaagtgcattaaaaattccttgagaaggcatattcttttgagagccgtaaatgaaaagtgcattcacggagaacatgctcctttgttgtgagaggaaagaaaggactgttgttgcctttaaggaacaggtttcccagttccccggaatgtcagggtcacatgaggaatgggtgagcacttagggccaagattgtcgtgtgcttggcccggcagcttctctctaagtgacctctccagcatcactctgtgccagtgctcatatctgaggccacttgagtgtcacgaggcagagcctggaaacattagctttggaaaccgttccttcctttttatgtggaggaagtaaggtttcacaagacacctaagctggacatggtgatgtgccacttggatagttcccaaagcagaaagcagccaggacatcccagtaccccacttctccgtgccgtgtacttttagggaggttttcgaaagctagcttcttaccgatgattttgtctatttttctgttttatgtgaaaaccttcatttataacctgctcttctcagtgttcttctattcagcattcagtatgacttctatgcctctaattgcgactgtatggagaagaactgtttgtcattcagtgccgtgggatataatcagtcctgtaaattcatcagaatgttctgttgcctgattttttttccattgcattttaatttcattaaacatattttagttctacagtaacctaattcctcattgttaccatgagatcctaattctgtagctgtgttctgtaatcccatggggcgtgtaccatttggagacacatgaaggatacagtagacagcacggaaggcagcagcaacacacaggggtgtcctccctccccagagcccagtgtgcacacagaaccaaattcaatctcattcatcgtgagcttgcatggtaactgatccagccactcagtacctccattggataagagatttggccacagattcttctagagaaaatccaaatgtggagggtgcatttgtttctgcacccaaacaaataccttttgagatttcttataggcattcctctcaaagtctcattactctgatcagttattgatcggaggctaccctggctcagtcaccagctgctcactgtgtccttctgtggtctcaggagctgcagttgttgctgttgtatgaatagacgatagttaattagactggatgtgtctgtactggcagtgattttgcaacttcctctgtataagcgatacatttgtaaatcatgggaatgtatttgatggtaattgcctgtggtggttgtatcatgatttaattttattatgagcttttggctttatatatttttctgcctttttatgcattcattaaacagtttaacagaccaaggacagtgta

SEQ ID NO: 7837 - DNA, 1593 bp, Homo sapiens
aaacccacctggttccggaatcctgtcctcagcttcttaatataactgccttaaaactttaatcccacttgcccctgttacctaattagagcagatgacccctcccctaatgcctgcggagttgtgcacgtagtagggtcaggccacggcagcctaccggcaatttccggccaacagttaaatgagaacatgaaaacagaaaacggttaaaactgtccctttctgtgtgaagatcacgttccttcccccgcaatgtgcccccagacgcacgtgggtcttcagggggccaggtgcacagacgtccctccacgttcacccctccacccttggactttcttttcgccgtggctgcggcacccttgcgcttttgctggtcactgccatggaggcacacagctgcagagacagagaggacgtgggcggcagagaggactgttgacatccaagcttcctttgtttttttttcctgtccttctctcacctcctaaagtagacttcatttttcctaacaggattagacagtcaaggagtggcttactacatgtgggagcttttggtatgtgacatgcgggctgggcagctgttagagtccaacgtggggcagcacagagagggggccacctccccaggccgtggctgcccacacaccccaattagctgaattcgcgtgtggcagagggaggaaaaggaggcaaacgtgggctgggcaatggcctcacataggaaacagggtcttcctggagatttggtgatggagatgtcaagcaggtggcctctggacgtcaccgttgccctgcatggtggccccagagcagcctctatgaacaacctcgtttccaaaccacagcccacagccggagagtccaggaagacttgcgcactcagagcagaagggtaggagtcctctagacagcctcgcagccgcgccagtcgcccatagacactggctgtgaccgggcgtgctggcagcggcagtgcacagtggccagcactaaccctccctgagaagataaccggctcattcacttcctcccagaagacgcgtggtagcgagtaggcacaggcgtgcacctgctcccgaattactcaccgagacacacgggctgagcagacggccccgtggatggagacaaagagctcttctgaccatatccttcttaacacccgctggcatctcctttcgcgcctccctccctaacctactgacccaccttttgattttagcgcacctgtgattgataggccttccaaagagtcccacgctggcatcaccctccccgaggacggagatgaggagtagtcagcgtgatgccaaaacgcgtcttcttaatccaattctaattctgaatgtttcgtgtgggcttaataccatgtctattaatatatagcctcgatgatgagagagttacaaagaacaaaactccagacacaaacctccaaatttttcagcagaagcactctgcgtcgctgagctgaggtcggctctgcgatccatacgtggccgcacccacacagcacgtgctgtgacgatggctgaacggaaagtgtacactgttcctgaatattgaaataaaacaataaacttttaatggt

SEQ ID NO: 7838 - DNA, 1488 bp, Homo sapiens
cagtggggaggacgaggatgtgggaccgccagccgcgggcactggtgggccctgacctccccgcggggagggtgggtgctgtggcccctgcaggtgtggcagagatggggcatgggcattggggtctccatcagcctctgtggggtgtctcagggtgggcagtgggggtggggctgggacgctgtttgtgctcagcggggacagccagggttgatctggccccgagggttttggatgtttttaggatgacataaaaagcaagtgttttccccatttcctcttatgaaacaccgtctgagcccaaggtacacattgggcggcctgcaggaacctgctccaggtggacacacgggccagcagccgcgaaccttgaagctggggtgaccgcaggagaccctgtaaggcctgtgagcggagccctcgaccccgtgacaccctggccagacaccctgcttggactggggtggcctctgctacccaggggtctggcacgggggagggctggggctttctctgcctggtacacacggaaaggcggctgtgcggacgcagggtcaccgtgctccgggttttctgacagtcggtgtttcctgggcctttggagtggctgcgaggcctgaacgccttgtggatccgctgtgtccagcccggctgagcatcgccagggctagctcatgctgctcttgtcagcctctggttctcctcgagtccttggggacgtggcagatgccagcgaccatcagacaacgtggaggccctcatgggcaatggctgagggggccgggctgaggctgtgcacatgcagtctgcacgccactcttgggctctgctggcggagatccccttccttctgggtgcagactgcacctccggatgcagttttgatgtccatcttccaggagagacggtctcgggtccagggagtggagggggctgcccctgccgtgcaggtcctggccgatggcgccttaccctgctgccctgggcttttggcctgaagcaaattcctgagtggggggtactggggcctgccgcatcctgtcctgtccactgcccacccccgtgtgctggctccctcacttctggctgcagtgggagccgccagtctgacccttgtcaccgcacgctctgcccccaccccgttgcaagaggtcacaccatgtcagcagccttgcactgaccgcagccggcccccaggcctcagagttctggatgcttccgtgcggctccaacaggcatcgtcttcccttccgcaggtggaggggccgcttcccgcaggcatctgagctctgtgccggggccgtggccatgggaagatgttccacgctgcctcctcctcgagttttcctcggaaacactcttgaatgtctgagtgagggtcctgcttagctctttggcctgtgagatgctttgaaaatttttatttttttaagatgaagcaagatgtctgtagcggtaattgcctcacattaaactgtcgccgactgc

SEQ ID NO: 7839 - DNA, 816 bp, Homo sapiens
ggcgccctcagtctgcgcggataaatgtcgtggagccctttttgtatggaaacgttttaagctatttaaagcctttggaaaatacaggaagctccagggctggagcacctctgagatggaattgataacatggtcttaactcaccgaaataaacaagcacgtggtgagaggagcaggcctacttgtttgttctcaggaaacttaatgaatagattactgattttcctagtcaaagttaattcttacccttggagtaaaacgaaggtgtttatcctgtgagcctgtgcgttttgcatactgggttggtttgctggggctgcggtgacagcatatgccgcgagctgggctttaacagagatgtgtgctctcacagctttgcaggcgggggtctgagatcagggtgtcgcgggtggggggtcactgctgaggccgtgaggggaatctgctcaggcctgtccctggcttctgggggctgctggtggtattttcagttccttggtgtgtggatacttcgccccatctctgccttcacctgtgtcctccctgtgtgggtgctggtgtccaaaatttccccttttcgtagtgacaccagctgtgttggattggggcccaccctgctccagcatggcctaatcttaactaattacatttgcaaggatcttatgtccacaaaagtcacagtctgaggtgctgggggttaggacttcaatatataaattttgcggttacacaattcaatccatgacagaatccaaaggtttactctggttataaaaacagtacaataaaatattgtttatagccttccctgtaagg

SEQ ID NO: 7840 - DNA, 377 bp, Homo sapiens
gtggccagcctttccccctgtgaaagcaaaatagcttggaccccttcaagttgagaactggtcagggcaaacctgcctcccattctactcaaagtcatccctctgttcacagagatggatgcatgttctgattgcctctttggagaagctcatcagaaactcaaaagaaggccactgtttgtctcacctacccatgacctgaagcccctccctgagtggtccccacctttctggacggaaccacgtactttttacatacattgattcatgtctcacgtctccctaaaaatgcgtaagaccaagctgtgccctgaccaccctgggcccctgtcgtcaggacctcctgaggctttggcaaataaacctcctaaaatgat

SEQ ID NO: 7841 - DNA, 231 bp, Homo sapiens
ggcccgtgggccgcgcggatccgggatctgcgctggggggtccccgcgtgcggggcgcgcggagccttcccttcgccctggtgaggccctgccataaccaggcgcccagccctgcggaggaggccggggctcccaggaagcggacgcccggtccccacacagcgccgcggccgcccctccacccccgcgggagcccctgccccacgctaataaaatgtgttgcgaggctga

SEQ ID NO: 7842 - DNA, 534 bp, Homo sapiens
caccaccagaataaacttgccgagtttacctcactagggccggacccgtggctccttagacgacagactacctcacggaggttttgtgctggtccccgtctcctctggttgtttcgttttggctttttctccctccccatgtctgttctgggttttcacgtgcttcagagaagaggggctgccccaccgccactcacgtcactcggggctcggtggacgggcccagggtgggagcggccggcccacctgtcccctcgggaggggagctgagcccgacttctaccggggtcccccagcttccggactggccgcaccccggaggagccacgggggcgctgctgggaacgtgggcggggggccgtttcctgacactaccagcctgggaggcccaggtgtagcggtccgaggggcccggtcctgcctgtcagctccaggtcctggagccacgtccagcacagagtggacggattcaccgtggccgactcttttccctgctttggtttgtttgaaatctaaataaaactactttatgag

SEQ ID NO: 7843 - DNA, 128 bp, Homo sapiens
tgccctggggtgatggggaccccctcgctgtctccacaggacccttcccctccaggggtgcagtggggtgggtgaggacgggtgggagggacagggagggaccaataaatcataatgaagaaacgctc

SEQ ID NO: 7844 - DNA, 743 bp, Homo sapiens
gtggcccgaggacgctccctgctccacgtctgcgccgccgccggagtccactcccagtgcttgcaagattccaagttctcacctcttaaagaaaacccaccccgtagattcccatcatacacttccttcttttttaaaaaagttgggttttctccattcaggattctgttccttaggtttttttccttctgaagtgtttcacgagagcccgggagctgctgccctgcggccccgtctgtggctttcagcctctgggtctgagtcatggccgggtgggcggcacagccttctccactggccggagtcagtgccaggtccttgccctttgtggaaagtcacaggtcacacgaggggccccgtgtcctgcctgtctgaagccaatgctgtctggttgcgccatttttgtgcttttatgtttaattttatgagggccacgggtctgtgttcgactcagcctcagggacgactctgacctcttggccacagaggactcacttgcccacaccgagggcgaccccgtcacagcctcaagtcactcccaagccccctccttgtctgtgcatccgggggcagctctggagggggtttgctggggaactggcgccatcgccgggactccagaaccgcagaagcctccccagctcacccctggaggacggccggctctctatagcaccagggctcacgtgggaacccccctcccacccaccgccacaataaagatcgcccccacctccaccctc

SEQ ID NO: 7845 - DNA, 685 bp, Homo sapiens
ccctcgccgaccgccccgcgggcccaggcgggccgggggcggggccgtcatccagaccaaagccatgccattgcgctgccccggccgccagtccgcccagaagccatagacgagacgtaggtagccgtagttggacggacgggcagggccggcggggcagccccctccgcgcccccggccgtcccccctcatcgccccgcgcccacccccatcgcccctgcccccggcggcggcctcgcgtgcgagggggctcccttcacctcggtgcctcagttcccccagctgtaagacagggacggggcggcccagtggctgagaggagccggctgtggagccccgcccgccccccaccctctaggtggcccccgtccgaggaggatcgttttctaagtgcaatacttggcccgccggcttcccgctgcccccatcgcgctcacgcaataaccggcccggcccccgtccgcgcgcgtcccccggtgacctcggggagcagcaccccgcctccctccagcactggcaccgagaggcaggcctggctgcgcagggcgcgggggggaggctggggtcccgccgccgtgatgaatgtactgacgagccgaggcagcagtgcccccaccgtggccccccacgccccattaacccccacacccccattccgcgcaataaacgacagcattggcgccaa

SEQ ID NO: 7846 - DNA, 1684 bp, Homo sapiens
gcctgcaggacaggcctgggcctggtgcccgaggccccccatcatcccctgttatttattgccacagcagagtctaatttatatgccacggacactccttagagcccggattcggaccacttggggatcccagaacctccctgacgatatcctggaaggactgaggaagggaggcctgggggccggctggtgggtgggatagacctgcgttccggacactgagcgcctgatttagggcccttctctaggatgccccagcccctaccctaagacctattgccggggaggattccacacttccgctcctttggggataaacctattaattattgctactatcaagagggctgggcattctctgctggtaattcctgaagaggcatgactgcttttctcagccccaagcctctagtctgggtgtgtacggagggtctagcctgggtgtgtacggagggtctagcctgggtgagtacggagggtctagcctgggtgagtacggagggtctagcctgggtgagtacggagggtctagcctgggtgtgtatggaggatctagcctgggtgagtatggagggtctagcctgggtgagtatggagggtctagcctgggtgtgtatggagggtctagcctgggtgagtatggagggtctagcctgggtgtgtatggagggtctagcctgggtgagtatggagggtctagcctgggtgtgtacggagggtctagtctgagtgcgtgtggggacctcagaacactgtgaccttagcccagcaagccaggcccttcatgaaggccaagaaggctgccaccattccctgccagcccaagaactccagcttccccactgcctctgtgtgcccctttgcgtcctgtgaaggccattgagaaatgcccagtgtgccccctgggaaagggcacggcctgtgctcctgacacgggctgtgcttggccacagaaccacccagcgtctcccctgctgctgtccacgtcagttcatgaggcaacgtcgcgtggtctcagacgtggagcagccagcggcagctcagagcagggcactgtgtccggcggagccaagtccactctgggggagctctggcggggaccacgggccactgctcacccactggccccgaggggggtgtagacgccaagactcacgcatgtgtgacatccggagtcctggagccgggtgtcccagtggcaccactaggtgcctgctgcctccacagtggggttcacacccagggctccttggtcccccacaacctgccccggccaggcctgcagacccagactccagccagacctgcctcacccaccaatgcagccggggctggcgacaccagccaggtgctggtcttgggccagttctcccacgacggctcaccctcccctccatctgcgttgatgctcagaatcgcctacctgtgcctgcgtgtaaaccacagcctcagaccagctatggggagaggacaacacggaggatatccagcttccccggtctggggtgaggaatgtggggagcttgggcatcctcctccagcctcctccagcccccaggcagtgccttacctgtggtgcccagaaaagtgcccctaggttggtgggtctacaggagcctcagccaggcagcccaccccaccctggggccctgcctcaccaaggaaataaagactcaagccattt

SEQ ID NO: 7847 - DNA, 1516 bp, Homo sapiens
gccggcccccgagaccccggcccccaccccacaccacagacacccaccagcccggcccctcccggcgcctgcccaccctccacccacagcctcacgggtccaggacttggcgtgttgttacatgttccttccgagttttctttcgctggaaagagggacaggggcccccacccgtcaccacgccccaacactccccccgaaccagagccgtgcacttgtgcctggtaggagagagacaggacagacccgcttttcccgagacaaggaccccccatgtcacggcagcttcacagacgcggctcgcgcccaccggggtcctggcgggtgggacccgcagcctccacgcggcccaggccagcctgccaccctctgggcctcctacctgtgcctttctctgaggggacaccccgccagagagggccccgggagccgggggtgggtactgaggcctgctcaggccctggaagtgaggctctatggggttccctggccaaggcgctggccccccaatctcaggcagttggggtgaggccgtgcctctttgggggctaaaggtcttgggtggaggacaggcccctctgctgtgcccctatgccctgtgtgggcccaaccagtggacaatggagtctgggggagggggaaccccggggacatgcccccacccgggaggggccggtaacccctgggctatcttctagacggggcgaaccaggggtcattgacctgccccctgcacagggcagggaccgagtgagccactccttgtcccgagctcccgcccccactgggccctccttcctcctggtgctaatttggggaccccaggggccgcccccggcctcttctccatcctgcttggaccagggtcctgggtcttcccaaccataccccgagatcaggccccacctgccagctctactgggcttggagcacgtccgggcagtggagggagggacacagcctgggacaggaagcctcttgggttggagcaggagaccctcatttgccacccagaccaatgtgagcctgcccccagccccctctcattggaagtggcaaggggcttccctcctgggggcagctacactcgtccccagaggcacattcgtgcacattctcacagacaccgtctcacacgttggctttggacaaccaggccccaacttggtccctgccctagggacctccagcctggtgcccagtgctcaggccacctcctggtccagtcaccacctgcagcctcggcagggcaggtacaggggccacctcagatgggagcctgggtccctgcctccgctctgcccctgggtggctgggaggagaggccctctcgggggtgacctgggcgtcagccgtggaaccccctcctcctccctggagtctgcctgagtccctcgagccgcgagccttcgctgaagtgcccttgctataaccccctctgcttctggtgtgtgacgaggcccccgatgttcttgattttcccagagaagcaaataaacagcgtgaacagccccag

SEQ ID NO: 7848 - DNA, 729 bp, Homo sapiens
gcctcgggatggggcgcccaccccctgccctgccctgaccctcgtgggaactgccaagaccatcgccaagcccccaccctaggaaatgggtcctaggtccaggatccaagaaccacagctcatctgccaacaatcccaccatgggcacatttgggactgttgggtttttcgtttccgtttctatcttcctttagaaatgtttctgcctttggggtctaaagcttttggggatgaaatgggacccctgctgattctttctgcttctaagactttgccaaatgccctgggtctaagaaagaaagagacccgctcctccactttcaggtgtaatttgcttccgctagtctgagggcagagggaccggtcaaagagggtggcacagatcgcagcaccttgaggggctgcgggtctgagggaggagacactcagctcctccctctgagaagtcccaagctgagaggggagacctgcccctttccaaccctgggaaaccatccagtctgagggaggaggccaaactcccagtgctgggggtccctgtgcagccctcaaacccttcaccttggtgcacccagccacacctggtggacacaaagctctcacatcgataggatcccatgaggatggtccccttcacctgggagaaaagtgacccagtttaggagctggaggggggtctttgtcccccacccccaaactgccctgaaataaacctggagtgagctgcct

SEQ ID NO: 7849 - DNA, 1501 bp, Homo sapiens
gggcacaggcccccacggccgggccccctggcgacaacttccatcattccagagaaaagccactttaaaaacagctgaagtgaccttagcagaccagagattttatttttttaaagagaaatcagtttacctgtttttaaaaaaattaaatctagttcaccttgctcaccctgcggtgacagggacagctcaggctcttggtgactgtggcagcgggagttcccggccctccacacccggggccagaccctcggggccatgccttggtggggcctgtgtcgggcgtggggcctgcaggtgggcgccccgaccacgacttggcttccttgtgccttaaaaaacctgccttcctgcagccacacacccacccggggtgtcctggggacccaaggggtgggggggtcacaccagagagaggcagggggcctggccggctcctgcaggatcatgcagctggggcgcggcggccgcggctgcgacaccccaaccccagccctctaatcaagtcacgtgattctcccttcaccccgcccccagggccttcccttctgcccccaggcgggctccccgctgctccagctgcggagctggtcgacataatctctgtattatatactttgcagttgcagacgtctgtgcctagcaatatttccagttgaccaaatattctaatcttttttcatttatatgcaaaagaaatagttttaagtaactttttatagcaagatgatacaatggtatgagtgtaatctaaacttccttgtggtattaccttgtatgctgttacttttattttattccttgtaattaagtcacaggcaggacccagtttccagagagcaggcggggccgcccagtgggtcaggcacagggagccccggtcctatcttagagcccctgagcttcagggaaggggcgggcgtgtcgccgcctctggcatcgcctccggttgccttacaccacgccttcacctgcagtcgcctagaaaacttgctctcaaacttcagggttttttcttccttcaaattttggaccaaagtctcatttctgtgttttgcctgcctctgatgctgggacccggaaggcgggcgctcctcctgtcttctctgtgctctttctaccgcccccgcgtcctgtcccgggggctctcctaggatcccctttccgtaaaagcgtgtaacaagggtgtaaatatttataattttttatacctgttgtgagacccgaggggcggcggcgcggttttttatggtgacacaaatgtatattttgctaacagcaattccaggctcagtattgtgaccgcggagccacaggggaccccacgcacattccgttgccttacccgatggcttgtgacgcggagagaaccgattaaaaccgtttgagaaactcctcccttgtctagccctgtgttcgctgtggacgctgtagaggcaggttggccagtctgtacctggacttcgaataaatcttctgtatcctcgctccgttccgcctt

SEQ ID NO: 7850 - DNA, 140 bp, Homo sapiens
gggggcctgtgacctcccatggagcccagccccgccctccacacctccggcgctccgcacccacctcccacggccccgcccctgcccccgctccggccagaggggccctggctgtaataaagaagccgatctctcctctg

SEQ ID NO: 7851 - DNA, 206 bp, Homo sapiens
accgcccctcccacagcgctggccgggaccccgagcctggctccaaaccctcgaggcggatctttggacagaagcagctcttccccgaacactgtggcgtccgggacggccccacccgtccccccacactccctcccacggggctccgggagacaggccggccctgcacctcaccccaccgtgacctcaataaacgttgaaactcc

SEQ ID NO: 7852 - DNA, 80 bp, Homo sapiens
gaagggctgcccgggtcacctcagctgcccacacccacactctccagcatctggcacaataaacattctctgttttgtag

SEQ ID NO: 7853 - DNA, 370 bp, Homo sapiens
ggtgccggggcctgaaggtcagggtcacccaagcaacaaagtcccgagcaatgaagtcatccactcctgcatctggttggtctttattgagcacctactatatgcagaaggggaggccgaggtgggaggatcattggatctcaggagttcgagatcagcatgggccacgtagcgcgactccatctctacaaataaataaaaaattagctgggcaattggcgggcatggaggtgggtgcttgtagttccagctactcaggaggctgaggtgggaggatgacttgaacgcaggaggctgaggctgcagtgagttgtgattgcaccactgccctccagcctgggcaacagagtgaaaccttgtctctctctac

SEQ ID NO: 7854 - DNA, 265 bp, Homo sapiens
gcggacccggtgggaatccgagcggctccctcgggagcggggactgctggaacagcggctattcttctgttattagtatttttcttactgtccaagatcaactgtggaaatattttggtctcttgtgacgttcggtgcagtttcgttgtgaagtttgctattgatattgaaattatgacttctgtgtttcctgaaattaaacatgtgtcaacacaggactttctggatcattccagaaagtgtcagacgttttctcattgtcttg

SEQ ID NO: 7855 - DNA, 726 bp, Homo sapiens
ccgcatcactccccacccgccacccaccctggagcccgccggcctgggcagggggtccaggtgggccacacaggggccaggatggcggaagatacgggtggggagggaagatatccagaaaggagccacagctgacgccaaaaagaaaagaaaaaagatatatatatatatatatatatatacacgtatatatataaagagaatttaataaaacaggggaaaaccaaggaacacttgaatttctcaggttttggacattcagagagatgaattgtgagaacagcaaagaaatccatcagaaaaacagaaagaggcagacgtttcccagggcgttcaggcagccctgatggaccgaaggctctggtgtctggtttggccccacagcagtgtgggccgatcctgtttacctcatacatccctgcactgtgtgttttcatttttgtctgctttagttctcttttattttctattcaccacacactcaccactcccagcttctcgtgtccagtgaaacccctgaaccaagatcactgaatttttgtttttttcttgttgctttgggaaatttttttttctctgtagggtttttaagaggtttcgggggttttgttgtgtaaatattctattttattcttggggggatcaaaccttaggaaaaggatatctatatatctatatagctatatatttgtgttccttcagggaaactggtcttgaaaaagcaag

SEQ ID NO: 7856 - DNA, 226 bp, Homo sapiens
ggcccggagaccccggcccgaggcgcccaggcctgagccccatgcctcccagcaaccagggcccgcgggtgtggcccccaccagcccaggcctggactctcctcagttctgtgtcgtgttcgggtttttcctctgtgactgggccgtcttggtgtctcgtggcacgcgtcacagtggtgctagtctgtttttaacaaaagaggatgaaaagcccctcctctccggc

SEQ ID NO: 7857 - DNA, 122 bp, Homo sapiens
ggcggcagccgggccgtttgggctcaagacacacacacagcgcagtgagccgctgtcaacagacagtttattctatatacaaacacaattttgtacactgcaattaaatagaatggaatgag

SEQ ID NO: 7858 - DNA, 1164 bp, Homo sapiens
ggctcccagcacgctctctccccacatcgtctgcccatctgggtttttgggtttttctgtgttttcatcttttttttttttttcttaacccgttcagtgctgccagtcaaccaagggtctgtgagtgtcagcgtgggatcaggcagcagagcttttttcccctttgccttgatccttcgcaaggctgagccactgggctgtgggggaaggggtcaaggccatatcccaatacgtgtagggcgagggtccctgctggcacattcaggctgtgctgggaagaagagacctgggcttggaaggaaccggtccccgacggtttctgcttgcctcgcctcttcccccttttgtcagctgagcagtttgtggtttctatgcccgcaagtttcaggaagtattcacaaaagaaaaatacattttttcccccaggggtggggcaaggacagtggagagagtgctaggaaatgagtcccctgggaaaggggaccgggccgtgatgttaaatatctccggctcccaagtgactggatttgcctaggaccttcagaccaacagacttcagaccctcagacctgccccggggccaggtggagaaagtgagggccgtacaaggaagtgaaattctgagttgttggggctaagcctgaccccctctccatgctccccgccccaacccactctggcctcagtagatttttttttcagttgtggttgttgcccaggctggagtgcagtggcgccatcttggctcactgcacctccaccttccgggctcaagcgattctccagcctcagcctcctgagtagctaggactgcaggtgctccaccacgcccggctaatttttgtatttttagtagagatggggtttccccatgttggccaggctggtctcgaactcctggcctcaggtgtgatccgcccgcctccgcctccccaagcgctgagattacaggtgtgagccaccgtgcccagcccctcagtaggttttaaggagcccccagccctcctcccttctgggcccgaccagcttatactgctccatcttccccggccacatgccccgccaagtactgcacagggaccccccacccaggggacctgctccgtgagataatgtgaaatacgactgtggaccaaacgcaataaaacctctgtttgtacgaag

SEQ ID NO: 7859 - DNA, 146 bp, Homo sapiens
gcctccctcccctgcggggccgcggggaggccctgggaatggcaagggcaaggtagagtgcctaggagccctggactcaggctggcagaggggctggtgccctggagaaaataaagagaaggctggagagaagccgtggtggtgaa

SEQ ID NO: 7860 - DNA, 622 bp, Homo sapiens
gctggggtggggctgggaccacaggtggcttctctcttgcctgctcctgtccctccagcacgtcccctgcaccacggcatagcttaggtgcgccgtcctggggtcgctgccgagagcgcctggacttcgacgtcccaccagcgggcgcctcctcccagaggcttccaggagcacgagggccttgcggcacaggactgtgccctgtgctgtcccctgcaccccggctcagctgagctggggaacactgctgtcgtgtgaagtcacagtggccttgttggtgcccacagggctgtgtggatggaggaagctgtccctgcccagtgcatcccccaggtcatcacggggacgcaggaggcaggccctgccctgccctctcctcacaggtctgttgcagggactccagaaaccattctgggagccgtggatgggggcggagctggggtttggtgcagtttccagggtgcagtacagcagggcctgaatactggccctggactcccttttccagaacaccaggtgtggccacctggggctcaggtacacagtggggtctctcggaagccaccgtgtggttctttcacaggcacgtttattttgctgaaataaaaagtttttaatcggg

SEQ ID NO: 7861 - DNA, 215 bp, Homo sapiens
ctccacaagtgtgtggccccgcccgagcccctgcccacgcccttggagccttccaccggcactcatgacggcctgcctgcaaacctgctggtggggcagacccgaaaatccagcgtgcaccccgccggaggaaggtcccatggcctgctgggcttggctcggcgcccccacccctggctaccttgtgggaataaacagacaaattagcctgctgg

SEQ ID NO: 7862 - DNA, 843 bp, Homo sapiens
cccgtgtccaggagccccgccaggtgcccgcgccaggccctcagtcttcctgccggttccgcccgccctcccggagaggtggccgccatgcttctgtgccgaccacgccccaggacctccggagcgccctgcagggccgggcagggggacagcagggaccgggcgcagccctcccccctcggccgcccggcagtgcacgcggcttgttgacttcgcagccccgggcggagccttcccgggcgggcgtgggaggagggaggcggcctccatgcactttatgtggagactactggccccgcccgtggcctcgtgctccgcagggcgcccagcgccgtccggcggccccgccgcagaccagctggcgggtgtggagaccaggctcctgaccccgccatgcatgcagcgccacctggaagccgcgcggccgctttggttttttgtttggttggttccattttctttttttctttttttttttaagaaaaaataaaaggtggatttgagctgtggctgtgaggggtgtttgggagctgctgggtggcaggggggctgtggggtcgggctcacgtcgcggccgcctttgcgctctcgggtcaccctgctttggcggcccggccggagggcaggaccctcacctctcccccaaggccactgcgctcttgggaccccagagaaaacccggagcaagcaggagtgtgcggtcaatatttatatcatccagaaaagaaaaacacgagaaacgccatcgcgggatggtgcagacgcggcggggactcggagggtgccgtgcgggcgaggccgcccaaatttggcaataaataaagcttgggaagcttggacctg

SEQ ID NO: 7863 - DNA, 387 bp, Homo sapiens
gcggtgcgtacccggtgtcccgaggcccggccaggggctgggcagggatgccaggtgggcccagccagctcctggggtcccggccacctggggaagccgcgcctgccaaggaggccaccagagggcagtgcaggcttctgcctgggccccaggccctgcctgtgttgaaagctctggggactgggccagggaagctcctcctcagctttgagctgtggctgccacccatggggctctccttccgcctctcaagatccccccagcctgacgggccgcttaccatcccctctgccctgcagagccagccgccaaggttgacctcagcttcggagccacctctggatgaactgcccccagcccccgccccattaaagacccggaagcctg

SEQ ID NO: 7864 - DNA, 1868 bp, Homo sapiens
gatcttcggatcggccaccctcgcccctcgcaccccagcccagggcggcggggactccgagagccccggagagaacgtggcccagccctggagggcaggcggccactcccccagccagaagtctttttttcttttcttcttttttattatttttttctttttttaaaaagttctgaccgtggtttcctggactcttcatgggctttgcttcctacctccttcacccttcactcctgccctcctcttcctcctcctcctcctcctccgtctgtctcctttcacctctgcgccaggtcggtcctccctgccaaccttccccagctccaatatgtagcagtctctctggatggcggagagtgaaggagacggagaaacgcgccccatcccttccgccgcctcctttcccccccgaccctattcaggttttaagtcaaaaatgtcgatatgtcattatgcactttacagatgaggggaggggccgcagtgcgcagaacccaccccaccccccagtgcagacttcggggtctccaccccaggccagcagcgcccactgggctacagcaagccaacaggtcacagaagccaacgaggggactgtttctcttccactcctatcctcttttcttgatcttttttttgcattttccttcatttctttaacaaggagagcaaagctgttttagcagaggctggggctgaggtccccatggggtttgggtgcaggggcatggcaccctttcctgtcgggaagggagaggggaactacccccccagcctgccctccgccccgccccagccggcggactgtgctgtttcctccgcccccactcccgtgttttctgacctcctgcctgagtttggggtatttatagactattaattttctgactgagccaatagtggttggggaactcttgaaaaaggggagagaatggctgggtgctggggagttcccccctccgagccctccttcccggcccaacctgagggatgtggatttgggactgtctgggggcccctcctgcagcgaggatgggagggggtgctgagctgtgaatcccctgggcagggggcgacaactccgtgtagcattaacccccgtggcggggtccgctgctggtctaatttggaccccctgcctctcagtgcccctgccctaggggtgtctgtctccagaggggagggacaaatcccctactggggccatttcaatggggtagtttttggatttttttccccactcactttttattttttaatgataatggagatgtctggacccttcctcaccccacctgtcggtcttgtcctggctctgcctgtcccccaccgttgttctcgtaggtgaaccccaggtcctcaactccccccctttatgtgttgaaagttaatggtttcagatgtgaacatcacgtgttataactgtagcgctgtaaatttttttgtgggagggtgggcagggaggggtcccagagggtagagctcaaggattttgggttttgttttgttttcatttttccaaaaaaaaaagaaaaaaaaatagaaaaaaaaggagtaaaaggggcgggtttgttttttgaagaactgtcttggatacctatttaaatgtgtgttctgttttgttttttaacgatttttaaataacgtctgtgcctccactggttgagggtggaacctccaggcaggaaccggctcgccaccctctgcccggtaagggctgcccaagaaagcattacccgccctcggggggtcgggctgtgggggtcccggcacctggcgtgagtttcatgtatgaaaacataaaattgaaaaaaaaaaaaaaacctacacgagcaccgtgatttcaagtaataaacagaaaatgaaac

SEQ ID NO: 7865 - DNA, 727 bp, Homo sapiens
aaacccttcctgctcaagatcgtccttccaatggctgtgtgtttaaagattgtgggagcttcgctgaacgttaatgtgtagtaaatgcacctccttgtattcccactttcgtagtcatttcggttctgatcttgtcaaacccagcctgaccgcttctgacgccgggatggcctcgttactagacttttctttttaaggaagtgctgtttttttttgagggttttcaaaacattttgaaaagcatttacttttttgaccacgagccatgagttttcaaaaaaatcgggggttgtgtgggtttttggtttttgttttagtttttggttgcgttgcctttttttttttagtggggttggccccatgaagtgggtgccccactcacttctctgagatcgaacggactgtgaatccgctctttgtcggaagctgagcaagctgtggcttttttccaactccgtgtgacgtttctgagtgtagtgtggtaggaccccggcgggtgtggcagcaactgccctggagccccagcccctgcgtccatctgtgctgtgcgccccacagtagacgtgcagacgtccctgagaggttcttgaagatgtttatttatattgtccttttttactggaagacgtacgcatactccatcgatgttgtatttgcagtggctgaggaattcttgtacgcagttttctttggctttacgaagccgattaaaagaccgtgtgaaatg

SEQ ID NO: 7866 - DNA, 18 bp, Homo sapiens
atgcagccatgtctctgc

SEQ ID NO: 7867 - DNA, 1852 bp, Homo sapiens
gggagcagccggctgtgctgtcagcggggcctggcggtggaagcgcctccagtgtgcatgagcgtgtctgaagatggggggctcagggggcacgtttgcgtttggacctgtctgtgcgttctcctgcgtggcagtcctgatttccatgcttctggagaatccatttcgttaacactgaaagccagttctcttttcctggcagtttttttcattttatttttggcattttttacaagataccgttcgggaaaggcttttgaaaggacggaagcgtattcactgtgcgccagtactcctggctgtgctgtggtttctcccgacgtgcacatcgatctcgtatgtgtggcatctgatattaaacgggaggttttaagaagcgtctgccgtgatcatggagcttcggaagcgggaatggttcttccgggtttgctgttttgtctgtttcccccttgtgtggtttccgcctgcgacagttccagaatttgctctcccactcagtgtgctctgcagctgtgaggaaacagccttcgttagaggcgggagcagagacgagccgctgctctgtgtcgtgtttgctgtggccgcagggagaggagcaggacacgcacctttccaggggcctctgtgtcccgcactgtgtgtgagtggaccgcagcgcgcagccacatgccctggctgccatgggccagaccgcctccacctcccccgcccgcctggcctgtcctgagtgcatttccctgcactgtgtcgtcactgcacagccagtcaccgcggtctcagtcatcggcgcggatggctatgctggggtcccagggtggccgcagcagtcagggtcactgtgggagccctggggtggagtgacaaaccgcattgtcctgtgcccgccatggcagaagcgcagcctttgtatggaggcccaaccgcgctcccgtctggagaagcggcttccggggtgtggctgccgggtcggctctggtccacagcacggtgccggggctgcaggttgttgagggctgtgactccgtggggctcagccaggctccagcagggtcagacgtgctgttaagagcaaagccacagacgatgacttgtccattctcagtggatgctccaggctgtgcctacacagcagtgctggtgacatgtccagggttccagggcccggtggcctgggagctgctttctccccactggctgggctgcatctggccctggctggaggccttgctttgaggggctgtgaccctcttcccccaggccctccccagccgacgacagccaccggagaggagatcggaacacgattgtctcagatgcagggcgctgtgcgggacgaagccgcaaggactctcgtatcgggcccttgggactcgggaggtgccagaggcggcggctgctctggacctcggtgttcactgacctttgtttcacttgcctctgctcgactccgagagcaggaaacccggccgtggcctggcagctccgcctcccatgcccgcacgctggggtctgtcttgtctggagcagtggggcacaccccggaggaggcgggggtcagggctgtcggccttggccccctgctggtcgctgtttcggggactcggggcggccagtaccaccgcctgaggcggggctcagcagcgttgcatgtacgggcctcgtactgcctcatggaaaatcctccggagccgccctccattgtgggttcctgagagtaggacacattgccatggttttgtgggaatcacgcgcccctgatggaacttttctgctgttgtgaagtacttttatccatttgcttctctgctgaccttgccaagttgttcgaggtggaattaaacacctcccagac

SEQ ID NO: 7868 - DNA, 95 bp, Homo sapiens
cgccgccgccgccgccgccggagcctgtcgccgtcctgtccccagcctgcttgtgtcccgtgaggttgtcaataaacctgccctcgggctgccgc

SEQ ID NO: 7869 - DNA, 945 bp, Homo sapiens
caggttacgggcaggacttgagtggcttcggacagggcttctcagaccccagccagcagcctccttcctacgggggtccctccgtgccagggtcggggggcccccccgccggcggcagcggctttggacgagggcagaaccacaacgtgcaagggttccacccctaccgacgctagcccgcggcgccgcgacgtctgcacggcccagacccaggattccaaacttgtgaactcgtgacaatcacaaacttggcggcaaagtggcgactcaaccttgggggggggggcggggggagggcgcgaggcttttggagcggctgtgggtgtcgtctggactgaggtttttaaatatttctttctctaacccatcagcacaataaaaaaaagtcactggttcaacaacagggtttaaaaaaaatgtcttcagctttaattcaaaacttcaggtttctttttcttccttttttttggaaattattttcctgagccttttgttttacggtatattgtaaacttttatgttaaagaaaaaatatacatttacaaattgtgagatttttaagagaaattttctacgatgtatactggcttattttttaatttaaaacggggtttccgtcggcactggtggagggggtgcgctgttagtcccctcgctcctggctttgggggttgggacttggtggtccagaaactctgggagcttctagaagaaatctactgagtgtatttctgttttttgtttaattccttgcttttgtcgactgacctgcttggtagtgtctgaggtgaactgtgggggttgcgcacagccagccgcgtggatcccacgcagcgctgaaccgaaccgagtaggaagcctttctccccaggcacgtggcttcagggcgtttcccattgaccagtttgaccctggtttgaataaagagaagtgcgtttggattag

SEQ ID NO: 7870 - DNA, 31 bp, Homo sapiens
tggctcagctaataaaggcgcacatgactcc

SEQ ID NO: 7871 - DNA, 3031 bp, Homo sapiens
tggcctaggccggccttctggaacgttctctcccggccctgcggcgcggtctggctgccccatgggcctgcgctgtagacgtcccccataggtcgccccagggcctctgcccacccgagccccaccactctcagaacccccgcccagcgcacggcgacctcgcgcctcaccggaagaccttgcctctgtgccgcggaggtccaggaggaaacggggcggccgctaggcctcaagtcccgaccgtggagcgctggcaagggcgtcctggcccagccctgagcgcgcggcccttcccctgtcggaagccgttgcttgaccccgggcgagggaggcggtagcctccgggtccgggtctgggtctgggtccgctgcttcgcagggacagcgctggggaggtgacggcgcccgccgcaggtggggcgaggctgggggagggcggcgccgcggcgggcctgccagctgggggcctttgcggcgcgcaggggcgaagcctgtaatcactgcagccgccggtaattcgctaatgagggctttgcagggattgttttcattctcagccccagctgtgggagtgcgggtgggggtgtggccgagccccggcaggaagccccgcccagacggtgttcagggaacccggagcccaagcgctccggcggagcccaaaagggtgggggtgggaggggcagaggccaacggatccccctgcctgtcgcaccccttggcgggagacgggaaggcagcgggctgcgtacgatgggaccctggtgcagacgccgggccggctgacatttggaccccatcccagaggagatgctggctaccagctggggcgaccccaagggtcgctggagtcagtatcggcccggcgcagccgcggcgggcgaggccaatggaaaggagactgaggggagtcccggcagtgagcccgaggccctgggacctggagcccgcgctggcctctccccagcggagcctgcacgttacggagaccatcacatgtgggcgtggtcagtgcccaggaccgcaccgctgctcatcttgtcccttttcaattcccttctggttcatgatgcataaagcgctaggccctagaactccagaaacagcacagctggggcggggacccagccttgccctccacccgaggctctgggacaaggcgggaggttcgggggccttccggcaggtgaacgcagggctggagagtatttggtgccagatgaggtgaaagcttatagaagggcctgaggggctcggctgcctcatcccctggcgggggaggctgggagctgggcctcctgcgtggggtgggactcgcaggggccgggtctccgtgactggggcaacgcctcgtcctgcagagggagccgacgacctcttttctgcagaaaagctccagcaggcgctgccttcacccacggatctgcccaggctgaaggcacacgctcaatgccccacgtgccttctccaggaggaacgaagcagggtttgagggttgggtggatggagctcagaaggaaaccccagccccaccacggatgacaccatccctcccgtcccatccccagcatgggcaaggccagcctttctggcagaaggagctgtcctcaactcagggccgctgtgagcaaagctgaccccagcccccacccccagttaacactgctgcttctctgaatgcatgtcacgctgcaccccatgctccgggcccacaccctgcaggacaaggagctccagacaggacgtccataagtcaccgaggtgtgccacccagcaggtgctggaggtgcccaatgctccctcctaggacctcgcagccaggcaaggctgtcaggttgttttgggggaagagggggtcatggatggctgagcagagagcggggaaaatgcaggctgagtggggcgacctcctgcctgccaggagccccctttcaggacacagcgggggtctcacacttgctgtccccatccatggcccgagggggaacctggtggtctcttctgagcttttggacttggggatgccaaacacgtgctcaccctcacactcgccccggcccgctgcgcccctaattgccaaagggtagggaaatggcgaagccagccaccaggtcgctggtgacagggccagggttatgcaggaaggtggtgcggcattgccttccacatatgtaagtctctgggcggcgccctcccagctccctgcctctgtttccccatgtgggccgtggggaactcccagagctacctcttgggggagcgtggtggcagcgatgatggggagacgcctggaagctcacagaacttgggtctggctggctcctgcccgtgacgccttgcccagcagcaaggtgcgcaacatggctgccagccccgcctcccacccccaccccgagtcctgagctcactttcgccttctccatcccctgccgtgggggccacagccacacctcaccgcccagtccagctgtctccagaaggggacaggcagtccgcggtctctggacaatcaactcaaggtacgcccactgcaaggcctccctcccaccgcggcccctgcctggccacctggcctctctgcaccagggtgacaaggggtcctcgtctgccccccaatgctccagggccagtcctaaggagctgagggtctgaggacgcagggagggtggaggtgtcctgaggctgatggacagtgaccgccactggcccccaacatgaccacacgtgggtgctgaactcggggcgccgtgcccaccggcatggtcctcccgagctccgacagcattacctcacccggccccatctgttgccccggtccagccctgatggcgcgcgcctggtctgtctgattcccctagccgccaccccacgtttctgtaccgggtctctgcagtgttaaacggacgtgtaaatagtggtaaatagtgaaagcctgtccttccctaaatgtaaagccatctgtccggcgtaaggacgacaccgtcagctgtccgactcgcacacatttaataaactgagctcttgcattgcc

SEQ ID NO: 7872 - DNA, 713 bp, Homo sapiens
agcagccccctgagcctcacaaggacctcctggctggtgaggagggggccgcgccaggctcccaggcctccacagagtcttcagcgcatcccccaacagcagcccctgccagtccctcgggtccaggcaaggccctgggggtctccttaaatgccacctcgggcaagtcccagtcccagtcctcggccacccccagctctggatcccagggccagctgccctctggctctggctgtggctcccgcctgtccggcagggcccagggccagcgtcgggcacagggcagctcccactggtctcggcaacacacccagccgcctggtacttcctccagcccctcccagtcagccctcccgtcctcggggcccctgcagccacccaacgtcacctccagcccggtctcacccatggtccagtctcccagcagcagcaacatccccacgcagccccccagcaagtcctctggcaagccggaggacgcagcccccaagaccagcggacagcgccagaaggaatcgtcgaaacagcctgccagcagcgcctcagtgcccgagctggtcccctgccattccgggacctctctggagtacacttcggagtccaccaccgagatcacctgcagctggccacaccacaggcccccgtgcctgcagcactactggtgcctgaaacacctggcctgctaggaggctccaataaagctaacccggacc

SEQ ID NO: 7873 - DNA, 1728 bp, Homo sapiens
agggagcctgccctgcccccaccgcccaccacctcctccccttcattcctgctgctacccctggtcccgagggctgggagtacctggggccccatccccccagctgggatggtggaagccggtggtggccacggaccgcccccctcctgccagggccacagaacccgtgttcatctcatccgagagcggagttcctcacaagcactccccagcagcccttggcctctgccgtccacaggacgccctcttgctcccggaaacgtgtggtcacccgccgtccactgcacggctggtacggccttgtcttcaggtctcgaggcctgactccgggggacaggtggcagcaggtcggccgccctcccgtcctcccagagctgctggcgctgaggtcagagcgggtctgatggggagctccgtctcaccggccacccgccgtcaccatggcagatgcccttggccggaactaataagaggcgtcggggccagcttccggtcccctgcagtgatagagggcttggtgcctagctgagtcctcgctgtccccgccatcccctgatctgtgcggctccagcctcgccccctccccacgtgcaccatacctggggagttcctggtccagggtatcctggggccaccctccctgcctccaaaacagggatccctggcaggctgtctttccacgcccctgagttcagagtcggggacccaggccaggtcgggagcacagccgctccccaaacccagcaaaccggcagagagccggtttcccagcagccggagccctgcaggagaggcctttgtgttttgttttgttttgttttttctcttttgagacaagagtttcactctgtcgcccaggctggagtgcagtggtgtgatctcggctcactgcaacctctgcctcccgtgttcaagcagttctcctgcctcagcctcccaaatagctgggattacagttgcctgccaccacgcccagctaatttttatatttttagtacagatggggtttcaccatgttggccaggctggtctcgaactcctgacctcaagtgatccacccgccttggcctcccaaagtgctgggataataggtgtcagccaccgcgcccagcctggagtggccttttatgagaggggacccgtcaaatctgtgccttatggaggggtccggcagcggccacaattgtcttgtcccctcaccccccaactccccctggaacacctctcccaggcaagacattttcacagcaccattcacaacggttgggccaaaaagaaacttttccttcatcatttcctgcactcgctgaccacaactttggacaccccaggctgccacccctccccacccgttcacccccaggatgctgttgctgtaggacgcctgctgccctggagccctccccaggatgtgagccagtcccctcgctggtacggaatgccgctgggtgcccggaggcggccatggtgtctcgatggacggcagccaggatggagcacccatgggtctcacggccatgcttcagggtcttcaggtcctgcccccggccagtctgccaagaggcacccccttccccagcctctcgcctgcactgatgcagacaaaatctcacctggcaggcccaacccccccccacccctcccccgccgtgtgtggcccctcgccgcatcgttggggttttgttatgtgaaaatatcctggaaataaatacatgtttctgcacttag

SEQ ID NO: 7874 - DNA, 293 bp, Homo sapiens
gcgccgccctcctgcctccggacccttcccgctcccggccgtggggcgcccctcctggacttccgggcctcgatttcttccgcacaagcctgaccgtggatttcagggacacataccgcctccagcggggagcacgggtgctgccttccgtgcggatcgagctttcctggactcggtcattggggccaccccgtgccagcggtgcccttctgcggccgcccttgctgcgtttgtgtcccctctgtctcgcgggccgggaaactgctctgatgggaaaataaacagcccaaaac

SEQ ID NO: 7875 - DNA, 1134 bp, Homo sapiens
ccctgggcgcgtgcagccccctgaatcttctccgtgcagccccttggggcgcgaccttgtgcgaggccctcggggcccacccacagcggcccagggccagaccctggctggaagccagaacgcagactgcaggggccgcgcctggctcaggcggccccacccccgggacgtggggtcacttccttcatgtaagactttggccgaaatttctacacctgtgtctagtcctcccctccaagagcattaactatttaaaacaaggaaaagaggaaaaaaaaaacagaggcccgccctaccccactcctgcccctccgtttctttgctgaagtgagtagtgtgatcctggaggccccccggcctggccccgccccgccagccgcccccgttagcgtcataaagtccagcttgtctccctcgatccaaaggccgttttctcgaggggagggcaggcccggcctggaggggtgctgtggagctgtcttgcccaggccctcctgggagggggacaggcattgttgccaggggtgaggccgtgccccaggcctccccgaaaccaaaggggaaggcaggggtggggccgtggctgaagccggctccccaaccaaaatgctgcaccaaagctcgggcgccgcgggcacggctgctgcagtctcttcccagcctggccctggcaaggggcgggtgggcgctgccaggcgggtgcttctcgacgcacttgctcccggaggctgcgccccggcgcctggaacccgaggtgggaggaccggttggtgtcaccctgctcggccctcagccctgccgcgtggggcgcgtgggcacggagcttcctgcctctctgctccgacacccggcaagcagccggagacaaaacgccttaaagcccccggcccagccctgcaggtatattgcaggggcctgggggcggccctggactggcgggcggttccccagtggggtgccctggaggctgccgggcagagtggagcagcttggggccgtgcccagggcggtggctgtgagtctagtttttgctttaccaagtgtacagaaatggcatttacgtttctctgatgctcccttgaagccatagaatttaggggcttttttaaaaaaataaaagaaaaatgaaaccaa

SEQ ID NO: 7876 - DNA, 239 bp, Homo sapiens
cagcagctgggcctgccccagggcaacgtgggggcggagactcagctggacagcccctgcctgtcactctggagctgggctgctgctgcctcaggaccccctctccgaccccggacagagctgagctggccagggccaggagggcgggagggagggaatgggggtgggctgtgcgcagcatcagcgcctgggcaggtccgcagagctgcgggatgtgattaaagtccctgatgtttctc

SEQ ID NO: 7877 - DNA, 216 bp, Homo sapiens
gatttctacctcaaccgcgagacctatgcaaggacggtgtggaccaactcgcgcccgcggcatggtgcccgccggcctgccgggctcccacccctggacggcagaggcaaggacggacgggagctccactgtgaatcggcggcacgcgccgcaggaggctgggactggtccagtttgtactgtcgatagttttagataaagtatttatcatttttt

SEQ ID NO: 7878 - DNA, 132 bp, Homo sapiens
gaagctgctccctcccccagcaagcccagcgccaggtgctcttgccttttcccactgagagaaggctgctcttttgtactgccccccgctcattaaacagcctcccccagccctgagtgcactgatgtccgc

SEQ ID NO: 7879 - DNA, 115 bp, Homo sapiens
cccctgcgccgcgcggactcctgccccgagggtccggacgcgccccagctcgcgccccttcccatatttattcggaccccaagcatcgccccaataaagaccagcaagcaaccgg

SEQ ID NO: 7880 - DNA, 379 bp, Homo sapiens
ggccgcctcggggctgggcatccggcccctggggccaccccttgtcagccgggtgggtaggaaccgtagactcgctcatctcgcctgggtttgtccgcatgttgtaatcgtgcaaataaacgctcactccgaattagcggtgtatttcttgaagtttaatattgtgtttgtgatactgaagtatttgctttaattctaaataaaaatttatattttacttttttattgctggtttaagatgattcagattatccttgtactttgaggagaagtttcttatttggagtcttttggaaacagtcttagtcttttaacttggaaagatgaggtattaatcccctccattgctctccaaaagccaataaagtgattacacccg

SEQ ID NO: 7881 - DNA, 1892 bp, Homo sapiens
gggaggggtgagacgctcgctgccgtgcccgccacaccaagatgttggggctgcctggcgcccactggagacagacagacagacgcctgtcccccgggaccgaggcctgtgccgtccccacccgccccaacatggtgctcatccttgccgagacccctgcggtctgtgcccgcgcccagcccagctgccccggctgcacgcctgctgctcccagctcgcccggctgccacaagctctctgcgggtccatcctccccaccggggtccgtcctcgcaggccctgcccggcctctctgcagaccctcaagcgtcgtctgcatgagtgagcaggcgtgggtggactctggccgcggccacacttggtgctcaccagctgcttcggccttcaggtgacctccctccccacggcatcctgctctccgggtggaagagcagctttctgtctcccagaaggcatcgcttttccctcttgagcagatcggagcccctgggaggtttggaagctgcctccaagcctaggacacggaccagtggccggggcggcctctggcccctgacgctggctgagacaggcccgtggggcggggttttggggcgtgaacaaggctggcagtaagtggacaagctgctcccctggctaaggccctgccctgccctcagccagaggtgcctggccatgcctgcacactcctccccattttaataaatggtcgcaacttctagaagtcctgctggtgccacctggtggggtggacgtctctcagactgcccttctgacaagcaggggtgggcgccaggcaggctgggtcaggccctcaggggtccctggagccctgggagggagggactgggtcgtgggaggtcctggtagctcccggcacccaacctcgcttcccgtgtgggccccgtgttgcttttctgctgagaggggcttgggcctcggttctccctgtggcagcggcattggtgcctgggttcttaaccctctggacccagcagctaggagcttctggaacccacgaggacatctgccactggcatggtctactcactgatggggtcctcctgactccagggcagagacgtccgtgcgggaactgaccgaggcgtggccccaggccccggcatcctcccctcgctgcacgtggtcacttccgaagcagcgctccctgtggccgcagagacagagcccgcaccctggctgtctgtggtgcctgggccccagctcccgcccgccacccgccctgttgagtgcggcctccagactcgagtccagaatctgtttctgtcaagtcagtcgtccccagctgcacacggggactgctgagcgctgcgctctcacgggtctgttccggacagagggtggcaggggtgagccctgatcccttacaaaaaataccagcttcccagggagtaatggcgccttcactgaagccattttgtacatggggacggggtggggacgtctcttttttggtgttggacgtttgaccagtggggaggggttcagaggcggcggtcctgtccttggctccgtctgtccgtgtggccttgctgccattccgtctgatcattaaacacagcttttgatacatatggcccggcctctgcctccgcagtgcacggcttggggcatctgctctgtgcaggtcccggtgagcagaactgagagctggcaggccgcctggctgtcctgcagaggacggattggaattgccaccgcagggccggccagtgctgtgaggtgcccagcgtcactcccatgggctctgtgggccatgtggtccctgtcacgcttctcagctctgccactgttgctggaaagcatcacagaccatgtgtaaaatgggccaaaataccttttacaaaattaaaatagagatggggtcttgc

SEQ ID NO: 7882 - DNA, 658 bp, Homo sapiens
ggcccttcccagcagcagaatctgttgagttgctgccacaaacaaaaaatacaataaatatttgaaccccctcccccccagcacaacccccccaaaacaacccaacccacgaggaccatcgggggcagagtcgttggagactgaagaggaagaggaggaggagaaggggagtgagcggccgcccccagggcggagatccaggagctggcggccgccgatccgatggagaaggggggacccaggccagcaggagacaggacccccgaagctgaggccttgggatggagcagaagccggagtggcggggcacgctgccgccttccccatcacggagggtccagactgtccactcgggggtggagtgagactgactgcaagccccaccctccttgagactggagctggcgtctgcatacgagagacttggttgaacttggttggtccttgtctgcaccctcgacaagaccacactttgggacttgggagctggggctgaagttgctctgtacccatgaactcccagtttgcgaattatagagacaatctattttgttacttgcacttgttattcgaaccactgagagcgagatgggaagcatagatatctatatttttatttctactatgagggccttgtaataaatttctaaagcctctg

SEQ ID NO: 7883 - DNA, 316 bp, Homo sapiens
ggcctggcactgcgactgcccagtctggcctgcgctcccgccgccctggtgccttagcccccggcacaggatggggcaggctctggcacagtgcctgggactggcagggtggctgagcggctgtcttgcctcttgtcattgtctgtccccacccggtcgtggcccacccggctagagacggcgtcctcaaggcatctggagggctttcgtggctgccagggcctggtctttgttgcactaacacgtctcctctctgggaaacgtcccttgtcaggagacggctcttctttgaaatgaggtcattaaaaggaaacag

SEQ ID NO: 7884 - DNA, 619 bp, Homo sapiens
caattgcacgctgctttgtaagccactttttagtactctgacacatacatgtggttatcttttgccctgttgtgatggataatttgaaaagaagtgggtttatgtcaccttctcaccttcttataagaaagctctgagaatgggcatttttgtattttgttgttgttgttgagatggagtctgccacccaggctggagtccagtggcgtgatcatacctcactgcagcttcaacttcctgggctcaagtaatcctcccaccccagcctcccaggtagctagtactataggtgtgcaccaccacgcccagcaaatttttaaatttattatagagtgggaggcagggtgcggtggctcatgcctataatcctaacactttaggaggccgaggcgggtggatcatgaggtcaggagatcgagaccatcctggctaacacagtgaaaccctgtctctactaaaaatacaaaaaagtagccgggcgtggtggtgggcgcctgtagtcccaactactcaggaggctgaggcaggagaatggtgtgaacccgggaggtggagcttgcagtgagccgagatcgcaccactgcactccagcctgggagacagagcgagactccgtctc

SEQ ID NO: 7885 - DNA, 83 bp, Homo sapiens
gttccttatcctgaaagtggacactcaaggagtgtgtctgtagttcatttgcaaataaacatttagttgaaaaataattctcc

SEQ ID NO: 7886 - DNA, 174 bp, Homo sapiens
tgggggaaaacctgtgcaaattaattcacatacatggttcagaaaattcacagcaggagggccgggcgcagtggctcacgcctgtaatcccagcactttgggaggccgaggcaggcggatcacgaggtcaggagatcaagaccatcctggctatggtgaaaccccgtctctact

SEQ ID NO: 7887 - DNA, 180 bp, Homo sapiens
agagaaattctataactttaatggggtaacctcacattaattcatgtataatgctccagaaaattcacaccaggagagaaatcttacaagtatgatattgtctttgtcaatacctcatttgtaaaacagacccattagtcgtgaatttccagctctttcaaaaataaatgtttatgtgag

SEQ ID NO: 7888 - DNA, 174 bp, Homo sapiens
ggggcctcgctgctgtcatcccactccggctcctcttttcatccccccccttccccccccccaacaagggggacatggtggagggaagcgggaaggctcttctgtggcatcgcacgatctagtctgtggtgtagactggtcgccatcacgtgtaataaagcacccgggaaaggc

SEQ ID NO: 7889 - DNA, 275 bp, Homo sapiens
gcgcccaggcccagggagacgggatggagacacggggcaggaccttccttccacggagcctgcggctgccgggcgggtggcgctgccgagtccgggccggggcctctgcccgcgggaggagatttttttttttcatatttttaacaaatggtttttatttcacagttatcaggggatgtacatctctccctccgtacacttcgcgcaccttctcaccttttgtcaacggcaaaggcagcctttttctggccttgacttatggctcgcttttttct

SEQ ID NO: 7890 - DNA, 749 bp, Homo sapiens
cccaggccccacctggggcaggcggcaccggcgggcgggtgggaggtgggagtggctgcagggacccctagtgtccctggtctatctctccagcctcggcccacacgcaagggagtcgggggacggacggcccgctgctggccgctctcttctctgcctctcaccaggacagccgccccccagggtactcctgcccttgcttgactcagtttccctcctttgaaagggaaggagcaaaacggccatttgggatgccagggtggatgaaaaggtgaagaaatcaggggattgaggacttgggtgggtgggcatctctcaggagccccatctccgggcgtgtcacctcctgggcagggttctgggaccctctgtgggtgacgcacaccctgggatggggctagtagagccttcaggcgccttcgggcgtggactctggcgcactctagtggacaggagaaggaacgccttccaggaacctgtggactaggggtgcagggacttccctttgcaaggggtaacagaccgctggaaaacactgtcactttcagagctcggtggctcacagcgtgtcctgccccggtttgcggacgagagaaatcgcggcccacaagcatccccccatcccttgcaggctgggggctgggcatgctgcatcttaaccttttgtatttattccctcaccttctgcagggctccgtgcgggctgaaattaaagatttcttagaggctgcgtcgccagcgtcctgttt

SEQ ID NO: 7891 - DNA, 384 bp, Homo sapiens
agttgcagtcttgcgtgtggatggtgcagccaccgggtgcgtgccaggcaggccctcctggggtacaggaagctgtgtgcacgcagcctcgcctgtatggggagcagggaacgggacaggcccccatggtcttcccggtggcctctcggggcttctgacgccaaatgggcttcccatggtcaccctggacaaggaggcaaccaccccacctccccgtaggagcagagagcaccctggtgtgggggcgagtgggttccccacaaccccgcttctgtgtgattctggggaagtcccggcccctctctgggcctcagtagggctcccaggctgcaaggggtggactgtgggatgcatgccctggcaacattgaagttcgatcatggt

SEQ ID NO: 7892 - DNA, 1886 bp, Homo sapiens
cacagccacccccacagccggagcccccgccgctccacagtccctggggccgagcacgagtgagtggacactgccccgccgcgggcggccctgcagggacaggggccctctccctccccggcggtggttggaacactgaattacagagcttttttctgttgctctccgagactggggggggattgtttcttcttttccttgtctttgaacttccttggaggagagcttgggagacgtcccggggccaggctacggacttgcggacgagccccccagtcctgggagccggccgccctcggtctggtgtaagcacacatgcacgattaaagaggagacgccgggaccccctgcccgatcgcgcgcggcctccgcccaccgcctcctgccgcaaggggcctggactgcaggcctgacctgctccctgctccgtgtctgtcctaggacgtcccctcccgctccccgatggtggcgtggacatggttatttatctctgctccttcttgcctggaggagggcagtgccagccctggggttctgggattccagccctcctggagccttttgttccccatgtggtctcagtgacccgtccccctgacagtgggctcggggagctgcatcacccagccttccccttctccgactgcagggtctgatgtcatcattgacagcctttgcttcgtgggggcctggcagggcccctgcctccccgacccccgacccactgcaaatccccgttcccctgcactcctcttctcccagcccatccctccggcccctgtgcctctgcggccccagcccagctcccagggccgtcacctgcttggccctggcccagctccctgccctgagtcctgagccagtgcctggtgtttcctgggctcggtactgggcccccaggccatccaggctttgccacggccagttggtcctccctggggaactgggtgcgggtggagtactgggaggcaggaggtggcccggggaggccttgtggctcctcccctcgctcctcgccctgggcctcagcttcctcatcaatagaaaggatgtgttcggggtgggggcgtcaggtgagaacgtttgctgggaaggagaggacttggggcatggcctctggggccacccttcctggaactcagagaggaaggtccgggccctcgggaagccttggacagaaccctccaccccgcagaccaggcgtcgtgtgtgtgtgggagagaaggaggcccgtgttgagctcagggagaccccggtgtgtccgttctttagcaatataacctacccagtgcgtgccgagcaggcttggtggggaagggacttgagctgggcaagtcctggcctggcacccgcagccgtctcccttccgtggcccagggaggtgtttgctgtccgaaggacctgggccggcccatgggagcctggggttctgtccagataggaccagggggtctcactttggccaccagttcttcggccagcacctctgccctccagaacctgcagcctggaggggtgaggggacaaccacccctctttcctccaggttggcaggggaccctcttctcccgtctgccctgcgggttgcccgcctcctccagagacttgcccaagggcccatcaccactggcctctgggcacttgtgctgagactctgggacccaggcagctgccaccttgtcaccatgagagaatttggggagtgcttgcatgctagccagcaggctcctgtctgggtgccacggggccagcattttggagggagcttccttccttccttcctggacaggtcgtcatgatggatgcactgactgaccgtctggggctcaggctggtgtgggatgcagccggccgatgagaaaataaagccatattgaatgatcgcc

SEQ ID NO: 7893 - DNA, 316 bp, Homo sapiens
acctgcgtgatttgtacaatgtactttatttctgctacgagtaatttcatgaagtttcaacttgcaaactgacttttgggacaaaccaacacacacacagaagagaaagcaaagaacttggaactttgggttgactcggtttgagttttgtgtcaaagaagatttcccgcggctgaagaggttggtgttcctgttacgtgtttcaggtgagaagcagcaaagcgtcttaatgttcaaaacgcctctctttggtctggagaaaaaaaaaaaaaaaaaaaaacaactaaaaatttatttaataaaagttttacttgct

SEQ ID NO: 7894 - DNA, 835 bp, Homo sapiens
caaaggtcttcttccctcgccccttctccatcgtcccaggaatcccagggggcagcacagccggcccccggcccacgttttcggtggaaaattagagtgaacaagaacacccctgccgactcccagcccggccaaaaagacaaaacacatagacgcacacactcaggaggaaaagaaaaaacaaaggcagaagaagaagaagaagaaataaaaacccacccaagcaagaagacaaaaggtaaagacgcaacgtttccaactctcgggacgccaaggccgcaggactggagggccaggccccgccacccccacgggagacccgggacagggcgtcttcctaagttattcatctcctctccgcctgctgctcgggaaggacagacgccggccgcccgcccgcgccccggaggccctggctctgtccggagaccaggtgagcacagcctggagcctgtgcccagggccgacaggcgcgacacccagcaaggccacctctccccgggcccccgcgcctctgccggacacggaccggcccctcagcccccaccgaggacgcagccactggggggaaagggagacacagcggaccccggccgggcagcggagaccgcagaggcgggcagggtggggcaggcgagtggtgtcgcgggggtgcgtggcgcttgcgagccctggccaggggaggaagtgaggcccaggcacctgctgcccctcgagggggccctgcctgccgcggggcctccccacaagcccctcccaaagcgccggccgactcgctgtctcgctggggactctttcagccctcgcgcccgcccgtttgggaggagaagtctct

SEQ ID NO: 7895 - DNA, 3491 bp, Homo sapiens
acctgccgggcaggaccgtgccacaccagctgtccagagtcggaggaccccagctcctcagcttgcatggactctgccttcccagcgcttgtcccccgaggaaggcggctgggcgggcggggagctgggcctggaggatcctggagtctcattaaatgcctgattgtgaaccatgtccaccagtatctggggtgggcacgtggtcggggaccctcagcagcaggggctctgtctcccttcccaaagggcgagaaccacattggacggtcccggctcagaccgtctgtactcagagcgacggatgccccctgggaccctcactgcctccgtctgttcatcacctgcccaccggagccgcatgctcttcctggaactgcccacgtctgcacagaacagaccaccagacgccagggctgattggtgggggcctgagaccccggttgcccattcatggctgcaccccaccatgtcaaacccaagaccagccccaaggccagaccaaggcatgtaggcctgggcaggtggctcggggccactggcggagccagcctgtggatccaagagacagtccccacctgggcttcacggcatccttgcagccacctctgctgtcactgctcgaagcagcagtctctctggaagcatctgtgtcatggccatcgcccggcggtcagtgggcttcagatgggcctgtgcatcctggccaagcgtcaccctcacactggaggaggatgtctgctctggacttatcaccccaggagaactgaacccggacctgctcactgccctggctggagaggagcacaacagatgccacgtcttcgtgcattcgccaacacgtgccctcacagggccagcgtcctccttccctgcgcaagacttgcgtcccccatgcctgctgggtggctgggtcctgtggaggccagcagcggtgtggcccccgcccccaggctgcctgtgtcttcacctgtcctgtccaccagcgccaacagccgtggggaagccaaggagacccaaggggtccaggaggtgggcgccctccatccttcgagaagcttcccaggctcctctgcttctctgtctcatgctcccaggctgcacagcaggcagggagggaggcaaggcaggggagtggggcctgagctgagcactgccccctcacccccccaccaccccttcccatttcatcggtggggacgtggagagggtggggcgggctggggttggagggtcccacccaccaccctgctgtgcttgggaacccccactccccactccccacatcccaacatcctggtgtctgtccccagtggggttggcgtgcatgtgtacatatgtatttgtgacttttctttggatttgttttgtgtttttgttgactagtcctggaaatgtttgaggctagacggggaggggccaggacccacccactgctcctgggggatgaggtcctggttttaaagccccgtcatttcaagcgggtcgatcttccacattcactggagagactctccccacctctgtctgggtggggcgcggacccctcactgtgcgcctgtgcagggggtgctggtgcacgtggcagtgtggatttccagtggtcacggtcttactgtttcaaggtttttaaataagaaaaccaaccctgccttcgcccatgcccgcccctgcccgcagttgccaaagagccgccttgtcgctgtgggcgtcagggcttggctggctcagtgcacaacccacagtggccttcagaggctcctcctgggactgggaaccgccgcagggccaggcggacggcgtgaggtttgtgttggggctggttctgcccatgctagggggtgggggagctcccaggacagaccagccttgtttctcatgtaatgcagtgacgctgtcattaaacacgtggattcatgtgtggccgggactggctggctctaggtccccggctcgggtggggtcacacggtcctgccctagagtccccatctggccctggagctgcagaagcagcttctgaggggcttcccaggcctgcatttcacagatggggagctcagccctcgaaggccgcagagacgcctcccaggcccgtctgccagggcgccggccacaatcctgcagggccaaggactggactccaggcaagtccctgcgctccagctggacggccctgttccagggaggaggtgctcggttgacaccatcagggagggagggtgggcactgctgggctgagttcacccccagggctggccagatggggccaggagggacagagcaaggggggtgaaggccgtggtgggagggtcccatgatgatgggccagggctcgtgtagaaatgggggaattggttccccatggcccaggacagctgagaggaggtggaggggccccaggggagtgtacgtcaggctttgcggggcacgggggccactcagcagcgctggggcaggtgcctctgctgtcagctccacccgacaggcagacgaaggccagtggggccatcgcttcctggggcgaccctggcagtggttgggagacgcccagatggagggggaggctgaccaagggccccgcagggcgggctgcaacttttctgttgatcctggaatgtagctggtgcagtgagagggaaagagaattgaaaaactcaggctgccataggttctgcgatgagaggtgcaggaggcaggagcctggcccagggggtgctggtgcctccccggggtctgggcggagagaacaggaggaatggctgggaagtggctgagggagccaggaggccggggggccgggggctgcaggggaggctgtgggggtcctggcagccaggaggccccaggtggttttgaggctcgctcttgcgcggtgcctgagaagagggtgaaggagctggggcaggccccatcctgggcattggagatgatgaaaccgagcagacctggcccatgtggagctggcatgggggacacagcccagagacagagaagcttatgaggaagtgaggaggtggcgtcacaagggtggggagggggccttggggaagggcggccttggatcagaggctcaccacaagcctggcatttcagccagggctggagaaggcagggacgcctgggtgagaggcaaagggcacagccatgcaaaggccctggggcaggacggcacctggtatgcgggaggaacagagtgaggagaggagggcagggcgtgcagggccttgtgggcctcagggaggacttgggcacctacgccgagggagtggagctcctgggtgcgtgtccagatgggaaaggcagggtcgtatctgtggggacctgacaagggcaggggaagcggagaccagggtgcaggctccgcccccacccaaggccgggcccagccagaggaggggcagggcagggcaggaggtttctggatgtttgttgggtttggtttggttttgttttgttttgtttattgtggtaaaatacaaaatctaccgtctt

SEQ ID NO: 7896 - DNA, 560 bp, Homo sapiens
ggagtgggcgggcccacgatgcagaggagaagctgtgggcgcggccctgccacaccccaccccgtggacgagaggctgggggtccaccctttggggcctggtcccatcctgcaccttgggggctccagcccccctaaaattaaatttctgcagcatccctttagctttcaatctccccagccccctgaacccggaaaaagcactcgctgcgcgatacacccagaagaacctcacagccgagggtgcccctcctcggaggacagccacgcgctacactggctctccgggccacccccaggacacagggcagacgaaacccacccccagcacacggcaggaccccccaaattactcactacggggggctgtgccataggccacacaggaagctgccttgtggggacttacctggggtgtcccccgcatgcctgtaccccagatgggtgggggccggctttgcccatcctgctctcctccagccgagggaccctggtgggggtggctccttctcactgctggatccggactttttaaataaaaacaagtaaaatttgtgtttt

SEQ ID NO: 7897 - DNA, 245 bp, Homo sapiens
tttgccctgggggggcccagcacagccccagcccggagcccagccccctgccccggccctgctccagaacccagcccagatcggaggacaagttcctctctagaacccaatccaatttggagccccagcccaactccagaacccaacccttctctagaatccagcccagatctgaggccaagctatgtgctagagcccaggccagctctgagaccaagcccagcattgagaataagctctgttct

SEQ ID NO: 7898 - DNA, 3488 bp, Homo sapiens
ggcgacgtgagcataacaaaggacatggaagaagattccagatgccagaaaacctctgtcagacgcccactggccccagatctcatcctgcctcatcctgagtcccaatcttccaagggtgccagcccctccgttcatctctgaaacccagcatccttttcagctgcttgaaaacattgtattttttttttttaacgatgcagtatttgtgcgttccagaaaagggcccagctctgagcccctcacccttccacactcacgaactctcagccgaggaaggcaagaagcgcagggggtggcccgcgtggcgtcggtggcctccgctcctgctcgcagcctctgtggtcagagctggatacaagattcaagacccttctcttgcttgtcacccgctccaggttggagccacagacacccaccgccaccccggctgggtctgcgtcctttcctgtgcctttccctccagaatgcggcctcagacctagaagctcaacccccctatgagggccacgtcctggggtagctcctgacctccgaccttatgtccaaatttcacacccatggtttttcatttgacccgcccccttctcgctcataatgacacccagctcctttgagaggatcagagcccattgcacaagaagagccgctgccaaccatccttgtcctccgattgcaaaatgacaccccagtaatctagaacattctcaagcccctttaactcagatgtcaagccaccgggcaaaccccgtcaatacctcccaccaaggaatgagatatgtggacctcactgctcccccaacccagcgtcaggctgggacacgccaacgctgttccgggttggaacagcagaggctcagaaactggctctgaaataggcagacctagcaagaggaagatacagggtatcgggcgtttgagtgtttcagaagtcattcgggaagataaatccagtgcgctggccgcagccacctgcattcaaagcttggaccagcgggttcttgttcgggaggcaaatttccctaggaaaaagaagacagacttttctaatgtggtccaaatgcggatcactggtcagatggactctagaagcactgagctccctgtctctggaagtatttaagaaaaggctgggccaggcacgatggctcacgcctgtaatcccagactttgggaggccgaggcaggcggatcacctgaggtgaggagtttgagaacagcctggccaacatggtgaaacctcatctctactaaaaatacaaaaattagccaggcgtggtggcaggtgcctgtaatcccagctacttgggaggctgaggcatgagaatcacttaaacctgagaggcagaggttacagtgagccaagatcgtgccactgcattccagcctgggcgacagagcaagactctgtctcaaaaaaaataaaaaataatcagggcacagtggctcatgcctgtaatcccagcactctgggaggctgaggtgggtggatcacctgaggtcaggagttcaagaccagcctggtgaacatggcgaaaccccgtctctaataaaaatacaaaaattagccgggcatggtggtgcatgcctgtaatcccagctactcgggaggctgaggcaggagaactgcttgaacccaggaggcagaggttgcagtgatccaagatcatgccactgcactccagcctgggcaacaagagcaaaactccgtctcaaaataaaaagaaaagaaaagaatggacagtgtttgcagagagttgctcacgagtttccctctaatcctaaatgtcttcatgtctatcagtctgagcagacggtgagtagggcgggcacattctccaggcccttcttcctagctctgtggttgacctctcagcaagtgctatccaggctgggccaaccagacccacaattaactgagcctcagtgaaagcgtccagtgcatcttgacctgagacagcaaggaattgcatttggggttattccaacgatgatggcagggaactggtggtatttagtgctgaggggcagtgatacagaaagatttgccctgtgggacagggtcctgcgcgagtcccatccccaaaagccagcagctcctgccatgaggaagacggggtttctgagcaggcttatgcctgcaggttcctgtggagccaccggctgtgacgggacacctctgggtctcagcattgccctggggaggctgggacatttagggacatggtagggttttaacatttgtttcccaaatgtcaaatcccgggcacaggggcaagaccctgtcccgaattcccaccccagtgaatggtgtcgctgccaaagccaacacaagatgacaaaagtggctgggtacggtggctcacgcctataatcccagcactttgggagaccgagacaggtggatcacctgaggtcaggagttcgagaccaggctggccaacatggtgaaaccccatctctactaaaaatacaaaaattagctgggtgtggtggcgcgcacctgtagtcccagctactcaggaggctgaggtagaagaatagctggaacccaggaggcagagattgcagtcagccgagattgcaccactgcactccagcctgggagacagagcaagactgactcaaaagaaaaaaaatgacagaagcctgattatcagactgcccggaggagacaggctccagcagatagatgccagccaggcccagctgccacgatttgtcccaggtgaccaaaggcacgcagctccagcatgaatcgttctaacccaacagtgacaagaactgctgggccttaaccgtcatggaagactggggccgcttccaagtcacagacaggagacggggacaggaaagaactcattccacccaatcggacacctaataattgagtgtctacagcagcaatcaagtgacaagtgaggccctacctgacccagaaggtgcctgccggctaaacattctgcccccaccagaaactccagggggtccgcccgttatgccgtggcccacccacgcccctttggatcaccagcagtcacagacaacaggcaggcgaaactgaagaccccaactcagccccagcggaccctccagagcaaaagaggcccccggcgaggccacctgtcggcaggcatgccgaggtcaaacagccggggccaccgttcccagctgggccacgacctgcaccgtccacagatgggctttgagatggatttgtatcagggtggggggtgtggtttggccaaaatgcaatggaccccgacccctcctcgtaaaaggatgttgggtttccctctggtgacacatgggatgcgtcataaaccctcccccaaagtcctggtcagcagcccatccttccaacgatgagttttgcggtttttcagaacagaaatgatcactacgattgacgacggtcgtgatgttaagacgtcgtctccatgagctttggggggacttttatgtggaataaagaaactatcactgag

SEQ ID NO: 7899 - DNA, 164 bp, Homo sapiens
catggagggcccggcatcgctgacccccacgccgagggcttgccgttttcccggaggacgtggacttttgtgagacaagaggcggctccccagcctgggtttccatgtgaccccacagtggggctggaccagggccctggaggccaataaagagctttctgggt

SEQ ID NO: 7900 - DNA, 143 bp, Homo sapiens
gcgtttccctatgggggtgtctgtacgtaggagagtggaggccccactcccagttgggcgtcccggagctcagggactgagccccaagacgcctctgtaacctcgctgcagcttcagtagtaaactgggtcctgtttttttaa

SEQ ID NO: 7901 - DNA, 192 bp, Homo sapiens
ccccggccgcacactcgactttcctggtgctcaccacgcagaggggcacgggccagcctcgggcgcagagggaggagtgacctttctttttctttttattgtcgttcgttttgtttttccacccttttgcctggctcctggcacctgtacctctggactctcctatcgggggattaaaaaaaaaagtaaaat

SEQ ID NO: 7902 - DNA, 1081 bp, Homo sapiens
gccccgccaggactatgctcccaggcccctctgcccaggggtgccttggggatgctgcactgggcagctacccacctggggatgggacgtgaggccaagaccccagcagagatgccagaatgggggaggcacagctcatagccacacacccagggcctgactgaggcccacgcaggaaccgacactcagacacaaggcaaagagggccacaggacccgggaaatacacacagagccaggagcagaagcaaagagcagacacacatacagcctgaaacagacctggacagacagacacagcctgaaacagacccggacagacagacacagcctgaaacagacccagacaaacagacagacagacacagcctgaaacagacccagacagacagacagacagcctgaaacagacccagacacagcctgaaacagatccggacagacagacagaaacagcctgaaacagacccagacagacagacagacacagcctgaaacagacccggacagacagacagacacagcctgaaacagacccggacagacagacagacacagcctgaaacagacccggacagacagacagacacagcctgaaacagacctagacagacagacacagattgaaacagacccagacaaacagacagacacagcctgaaacagacccagacacagcctgaaacagacccggacagacagacagacacagcctgaaacagacccagacagacagacagacacagcctgaaacagacccagacagacagaccgacgcagcctgaaagagacccagacagagagacaggcagacacagcctaaaacagacctggacagacaggcagacgtagtctgaaacagacctgaacagacagacagacgcacacacacaacagatgcgcagcaactccccgcccagggacccctcccggcctccctcgcacactgggaggaggaagccgccgagactgcagggagcctggccccggagccccgggtgcgccctggtctttggagcagccacggcccacaatcaccccccttttctaagactgcctgatccgaaataaagtattttgac

SEQ ID NO: 7903 - DNA, 432 bp, Homo sapiens
caagggcttcccgctgcctccagacagcacctgggtcctcgccaccctaagccccgggacacctgttggagggcggatgggatctgcctagcctgggctggagtccttgctttgctgctgctgagctgccgggcaacctcagatgaccgacttttccctttgagcctcagtttctctagctgagaaatggagatgtactactctctcctttacctttacctttaccacagtgcagggctgactgaactgtcactgtgagatattttttattgtttaattagaaaagaattgttgttgggctgggcgcagtggatcgcacctgtaatcccagtcactgggaagccgacgtgggagggtagcttgaggccaggagctcgaaaccagtccgggccacacagcaagaccccatctctaaaaaattaatataaatat

SEQ ID NO: 7904 - DNA, 392 bp, Homo sapiens
gccctcccaggaccccctcacggggtcaaagtcacacgtccagcttcagccacattgaggccagcattgctggtggtcagggcaggaggccttggcgtgactggaggccggacagacaagcgccagcgtgctccaacacatagggccaccaggggcctcagccccaggaggtcccttctctgtgccctcaccagcctctcaacacctcggggacccctgctgctcctgcccccacctgtcactgtgcttagggctgcaacatccctggagcagcttccaacactacttcagggtggcagtgtttggggcactgggcgagcctgccggcctctagatggcctcatctcttccttccacaaactgtctagaaccaataaaaggaaacctgccaa

SEQ ID NO: 7905 - DNA, 90 bp, Homo sapiens
cagtgaccctcggcccccttttgagtcctcgggcccagaatcgtatcccaaagccctcccatggcctagaaaataaataagttattgttt

SEQ ID NO: 7906 - DNA, 198 bp, Homo sapiens
gcccccaggcacccacccagctggggtgtttttgggggagtcgccgccaagcccaggctgctggagccaggcaccctcctctgtcacttgctgcttggagccttaactccagatgggggggtcaccaagagggagtgggcaccctggcgggccctctccccacctcacctcttaataaaggtcagacactggccaggc

SEQ ID NO: 7907 - DNA, 76 bp, Homo sapiens
gccttccagggcagggtgggctccagttgtcttgagggtccggatgggctcaggtaataaagaaacggaagcagca

SEQ ID NO: 7908 - DNA, 371 bp, Homo sapiens
gagcaggggtgacgtatgtagaatgcttagggtgtcctccccacagagcagatacttgaaccgactcaattcctgtgtaaagagcactttgtcctgcttcacggacctccccaaagtgtgcagagttctatataggatgctggattagttcctttgatatttgtaaaaattcccccaagagccgcatatgaatctgccctttaataaagcattattgagattgctggcctattggggaagcctgcgggcacaggagcaggcgtggaatccaatacttgtaaatgaattgaagcgtcaggaccacccgcctggccacgtgcgcgggcccctggacctaacgaggcagtgtataaacttattctctagccctg

SEQ ID NO: 7909 - DNA, 191 bp, Homo sapiens
gccgcgggcagccaggcccagcccccgcccgagctcaggctgcccctctccttccccggctcgcaggagagcagagcagagaactgtggggaacgctgtgctgtttgtatttgttcccttgggtttttttttcctgcctaatttctgtgatttccaaccaacatgaaatgactataaatggttttttaatg
